United States Patent Application Publication US 2014/0325702 A1 - sequence listing, part 10

SEQ ID NO: 8599 - DNA, 1113 bp, Heterodera glycines
ttgtcgttctgctgttggttcacctgcttctccaattggcacattctttcccgaatcgcttcgaactgatcagcagaaactgaaaaatactgaactttatttattagttattacaaaatttaaattgtatttacaaaaatacagtatcactaccgtatttaccatgctgattgtcgttctgctgttggttcacctgcttctccaattggcacattctttcccgaatcgcttcgaactgatcagcagaaacttaaaaatactgaactttatttataagttattacaaaatttaaattgtatttacaaaattacagtaccctaccgtatttaccatgctgattgtcgttctgctgttggttcacctgcttctccaattggcccattctttcccgaatcgcttcgaactgatcagcagaaacttaaaaatactgaactttatttataagttattacaaaatttaaattgtatttacaaaattacagtaccctaccgtatttaccatgctgattgtcgttctgctgttggttcacctgcttctccaattggcacattctttcccgactcgcttcgaactgatcagcagaaactgaaaaatactgaactttatttataagttattacaaaatttaaattgtatttacaaaattacagtaccctaccgtatttaccatgctgattgtcgttctgctgttggttcacctgcttctccaattggcccattctttcccgaatcgcttcgaactgatcagcagaaactgaaaaatactgaactttatttattagctattacaaaatttaaaacatatttctcttggaagtaatgtaaaagcaaacaaaacttacagtaacctatgtactgtatttttcttgtttgtaaatgccctttactttgataatttctgctaccgtatgatcaattttccctaccgttttcgccctgctgttcgtcctctttcccattttgcttgttctgtttcatttggtgctgctcaatattgacaatcttcgccttcaacacaatgttttccgtgatcagtttctgtttctccaattcggtacgaatttctctctaaaaattaaaaatgcgctaaaaaaagaatttaagttatctt

SEQ ID NO: 8600 - DNA, 718 bp, Heterodera glycines
ttcagtatttttcagtttctgctgatcagttcaaagcgattcgggaaagaatgtgccaattggagaagcaggtgaaccaacagcagaacgacaatcagcatggtaaatacggtagggtactgtaattttgtaaatacaatttaaattttgtaataacttataaataaagttcagtatttttcagtttctgctgatcagttcgaagcgattcgggaaagaatgggccaattggagaagcaggtgaaccaacagcagaacgacaatcagcatggtaaatacggtagggtactgtaattttgtaaatacaatttaaattttgtaataacttatgaataaagttcagtatttttcagtttctgctgatcagttcgaagcgattcgggaaagaatgggccaattggagaagcaggtgaaccaacagcagaacgacaatcagcatgggaaatacggtagggatactgtatttttgtaaatacaatttaaattttgtaataacttatgaataaagttcagtatttttcagtttctgctgatcagttcgaagcgattcgggaaagaatgtgccaattggagaagcaggtgaaccaacagcagaacgacaatcagcatgggaaatacggtagtgatactgtatttttgtaaatacaatttaaattttgtaataacttatgaataaagttcagtatttttcagtttctgctgatcagttcgaagcgat

SEQ ID NO: 8601 - DNA, 1145 bp, Heterodera glycines
agaaagaattttgaaaaactaaaatacattcctcaccatctttcgatctatgataatgccaattttgcctttttaggagttttgatcggcataaaaaagagttagatgaagaaattgaaaagtgccaaagtgatctgttgaaggcaatgggtttggaggaccgcgaagtgtccattgaatgcatcaaaggcgcactgtttctccaaatgtttcaggaagcagtgaaagaaaaggcggatgaggagctgaaagcattaaacagtaagccagcaaaggttttccattgctaattccgggaccaggtcatttgggcgccgacgttctggcgccgacggtttggcgcctatttttgagaaaatcgaattttgcctttttgcatggcaggcgccaaaacgacccttgcgacaaaacgttggcgccacaacgatacggaaaccggataaaacataaatttttttcaatcccagatagccctaacagtattaaagttaagaaaacactgtcttctagtttatttttataggagcattttatttctgctgtttaaataattagttatttttcaaaaatttacttactatcaaattatcagacataatcacttttgatcacttctataatgctgtttaggcttgaaaaatcttaagtttgaacccgattttggacataggcgcaaatgccctggctcaaatgtggggtaaacattgttaagcaaattagcaattttttaaaaattcaaaaattatatattactgagaggcggaccaagcgtctcaaaattttctgaaaaattccattgaattccggtttcatccggattctaatgaaattacaatcagccagaaaaaaaaattcaatttgtaggatattgttggtttcaagatcacctagtaaatcacgaaaaccatatttctacaaaacaatattaaaataaaatgagagaaggataaaaatgtttggcatcgggtgggaatcgaaccccacgcgaccacccgatggcagttctaccattgagctaccgaggcacatccgccctttacttttatggatcttatcaaagcccgctttccgcgttttaacctagggcttcgatcgaaaatttttcaaaataagaacatcaggttcaaaaaatagatttgtggtcg

SEQ ID NO: 8602 - DNA, 3205 bp, Heterodera glycines
  unsure (1)..(3205): unsure at all n locations
gcaattatttaaaaattgttgcattactcggtaattaatagggatacgatttttaggctataaaaaaccccaaaaataggcacttaaaaaaaagaagaaaaattggcactaaaaaaagctgaaatttaggcgtgtaaaacagggcttccatcgaaaatttttttaactcaagacatcgggcccaaaaaatcagattttggggtcaaaatcagaaaatttcacgaaattacttcaaaacagttatttttacaatttatcctatcaaaaattgatcaaatattatattttcgcctcccattatcggttttaaaaattttggaagggaaataagcaaatcgtaaatttcactgcattcgagatcatgaaatcagatttttaacattttttgcggcacatttcgaaaaattgtgcaaaattttgtgattctaagacaaatctttaagaaaacaaagaatcggaaaaatttttgtaattttaatgcgatttgttaacagatttttgtccgaaaaatgagtaaatttgccacaaatcttatattttcttataaattaatgccattttgccataaaatttcaaaattatgattttatttaagaaatcagaactaattttggtcgctacctccaaatcaggacaaatctgacatttttattttatcagatttggaccctacaaatcaggacaaatctgataaaacaggacagatggaagccctggtgtaaaatgacaatatttattcaaaaataaaacaaaattaagccaaatcagaattgaattacattatttttttaaatcaaaaatttgtcaagaaataaagaaataaattttggagacgaatttttgagaaaattttcatttcttaggggtgtattttttgaaaaaaaaatttaggtcgatttttaaggggtgtatttttcgtttttattgcattttttaataattttcggaaaaattccaaaaacaggttatttcaaaattttttagtctttttaaactctaataaataaaaacctaaaataacattaaatgaaatagtaaatgaatatggtttatgaaatgacgatgttcctcatttgcactcaatttttaaattcattttagtattcgtgggatgttccattctgtgcggaaatcgtttcgctcaaaaagttcaacggacccgaacaaaagatatggttttatggaccttttaaaggaaatggaggatacaattagaggaaatgaatttttcatgaaaaaagtgaaggcgattacgaagaaagccggaattaaagaaggaggtttcttaattattgcaaataattaataagaaaagatgggggtctttctgaatcgtttgggcaacgggataatttgtagtgatgctcgagaccgaaaatttcccaagactcgagaccgaaaacgcggaagtcgagaccgaaacgaaaaaacccgagacttttcgtgagtcaagactgagactctcgagcatcactagtggtttgggcaccgccgtttgtgcgtcatagtaatttagaccctaccatttaagctacagtagttttgagtgtctatgtttgtgccacggggtcccgcgttagttgggcgccttaggttagtgcactcatatgaagggatgggaatttaaggcacgaaaaatctacaaaaagtcgactaaaaaagtaaaaatttgtcaaaaaatcaggaaaaagtcataaaaaacgctaaaaagtaaggaaaaattaccaaaagtgaaaaaaaaaatttaccgttttggaggcggagattttaaagtaaacattttgcctgaaagaatctgataaagttgggcaattgtttcaattcccttagtcttctgaataattacgaaaattttctgttggatttctattcaattttcactgatcgaaccttttcaaattttgccataaaaagtgaaaaagtcccccaaaaaatgataaagtgccaaaaaaacataaaaatccaaaaaagtagaaaaaattcaaataaaaatgcatgttagaagcttcttgaacaaagtgtaggacagtttttaagtcatttgaaggtcatataaaatcggcaacaaaaagaagtcatttgactaaaatcaaatccctaattaattgtttaggattaattgtttaggaggattcggcgcattggaccaatattatgcaaaagaagctcgtctggtttttgccaaaggatcgggccaagattttctgcgcaatatcattgacctcagccagtggatgactgcgaaggaggtgcgcgagtgcgcggaaaaattcaaatggatacgcgggctcaacgccaaggagtcgtgggacattgaagtgaacggaagtggaaaagcgtcatcagtgtcggctgatcttcgcaaagaccaaagcgataaagctattaatgatcggcataatgaagataatgcttatggtggtacttttggtagtgaacgtggtggagaagacgaagatggaagtggttctggtagtgaacaacgtgagtatgacgaagatggaagaggttctggtagtgaacaacgtgaggatgacgaagatggaagaggttctggtagtgaacaacgtgagtatgacgaagatggaagaggttctggtagtgaacaacgtgaggatgacgaagatggaagaggttctggtagtgaacaacgtgaagatgacgaatatggaagtggttctggtaaagactgataaatcttaggaacagagagagagacagagagagagaggtgaagagatagaagattaagttagaagtgaaaattttagtttttatcccaaggttttcgttttttatttctatttttgtccgaattttgcacattcattttnanttggataaatgtttttttgggattgtttagggtggttaaaaaaatatatttttgaaaattaattgaaaatttatagaaagtggtaattttttgntngnaatttatttttggtagattttaaataaaaaatttttttaagaaattgagttaaaaatttgaaaaaagattttttaatttttagggtgagagtggggaagttttttaaataattaaaaaaatgtatttatttgttttgggtgtgattagtaatagtgaatataggatgtagagttagttaaagttttgattaaatttttaaaattattttagttattaattatattttggtgtggtgtatgtttttattttttggtaaagaaattttttttt

SEQ ID NO: 8603 - DNA, 1908 bp, Heterodera glycines
  unsure (1)..(1908): unsure at all n locations
attttttgctcgcaattcatttttggtccattttaaacaaaaaacttttttaagaaattgcgccaaaacttccaaaaaacactcttcaatttttagggccagactgggcaacttttttcaataattaaaaaaatgcatttatcccttcccggcctgattaccaatactgaatccaggatgcagacttacttaaagttccgatcaaactcttaaaataatttcagttattaattatatttgtgtgtcgtatgctttattttgtgtaaacaaattttttttatcagtacacgctcttagaaaccaggacattatctgtttttgcttaattattttacaagcaaaattgggataaattcaaatcaggacatatatgaaaaatcaagacattttcgatttttttattaatgccaaaaaagagaaaaaaattgagcaatattaaatgaaaatttttcattattataaaatatttcactattatttatttcaaattgtaaaaatgcatttttggcaattattattttttatattttgctttgtttataaaattgaatccgtcaaaatccgaacaaattttgatgaaatatttggcgacggatgggacaaaaatgaaagtgaacaaacagtgaaaattgaacaaaatcagcaaaatgaacacttggaatttattcattttcaccaacagaacagtgatgaaatgggaaatgaacaaattgaacaagtggccaattggggtgatgaaaacattcataaaaatgctcagaatgacaaaaataaagaaaatggtcagcaaaaaaagagaaataattaaaaaatttgatgcaattaaagaaaagttaagggaaaaaggacaaaacacaagcaaagacaaagcaaaaattgaaatgaaaattggaaaattattaggattaaatcgaagtttaatatataaatggaaaaaagaattaaatttaaataaaaacaaaataaaaaagaatttttatgatgagaaaaagcgcaaattcattgaacgatttgatgaatttaaagaattatatggccaaggcaaacagaaagaatttgcgaaggaattgggcatttccaaacaaacatttataaaatggaaaaaagaattggtgccaaatgaccacaaaagtaaggcatttttgttttaatcatttaatataaatttacatatattcagaagaaaacaaattaagaaagatgaagcattatttgcaaataaaagaagcaaatccgaaaatgagcgacgaaataattgtgaaaaaatagggaattggatggacaactctgaatagatggaaaaaggaatttggttcattttaatatgtgatttttgaggtagcctatcaaagataataattagtattattgtttgtcataattaatggcattttacatttgtttgtatttaatggtcgtaaaatatgacaaaagctacagaaagtttttaaattttttttcaataaccctaacttcactagtatgttgttaaattttttaaaatttttggttaatttcattttattaattattgttccaaaatattgcatctatcattcaaaaattcccatctttactgaatggaaaggagtcattggtcatttttcagttctaaacacaatttaaaccataaaaattctcatttcgccagaattttcataaaaaatgctggaaatgattttacaaaaatgtaaaagttatatcaaattcaaaaatgtttaagaaacattattaacagtgataaatgtgcttcatttgatttaccaaaacaaaataataaatttttttttattaatattagataaagtccccaaaatttttaataataattttctcaaaaaaaaaataaataaatagatcgatttcattttgatagttgccgaagnggtgccaaagaccnntgcaggc

SEQ ID NO: 8604 - DNA, 2097 bp, Heterodera glycines
ctaatagcacggggacgacagactgaggaaggaattggcggaagagcagcagcaaaagcgatgggccaaagtgcctccgcagctctccggacactgccgggcccattccattctccctctcattggcactgcccaaatgccgtgccgtgccctgtccccacctcccggggcgcctcaattcgcctccctttgttgcccttcttttactcttcggcttttgaatgccgctacggctgttaggagcaatttgttaccggtaataaatgggcgattaattcccggaatacttatgttcaaagtcggttgagattgacaggcggcgctaaatattcgctgatgtcccccactctttgggtatggtgggggaggggaggaaaagccatcggcagagcgaacgatggcacgaacatttgtactgaagaagttggcaacacttttcctaattccgtctcactttttattgttgtaaaatgatacttcctcaaatgctcttcaccccctcccccaaatttgtcccaaaatgcaattattaatcgccgaccgtttctttcccgtcagtttggctgctcactctttcttctctcttcttacataaacggcaattaacttttgcttactcacttaattctatgttttcccctctccatttgctccgatttgctcgacaattgcccccatttggagtaaacatgagaagcttgggatgatcccccggggatgcgttttctcatcccccccccctctctttcccttcctcagttaccaaatctcagccaaatccatgctgcttgttttccctttgcgtcattgcataagcgtgtccaatttcttgacaacaaccaatttgaatcagttgaaggcaaaaatcggaaaatcagtccaaaaatggcattttccggaataatgacaaaattaatgtaagtgttgaatcgcttattcatttccgcgcatctttcgcaccaatcgcttttaaagtggcggtgcctttcgcttttcccgagattcccatgccaaaaagggcggccatcgaacagacaggaggaagtggaagggaggaacaaggtcaccactattcattcctctgctcccctcaactcggctttctctcctcgtcgctcatctctcctcccacctccgtccgtccatcagcccattatcgtcatcatcgcccatcaatgaatgatcaatcgttcccccatgtccacgccaacccatccaatgaatcgcgccacttcccccccccccccctcctaataaaagcatcgccgccaccgcatttgttcatcatgcaaaaggggggaaatgatgatgatgatggaatggactgctgtggataatgaatgcattgtcctcgccaagtgcaattgagacaatgaccactgactttgtgactttgcctttgcctttgcttttgcctttggggcactgctggcgatgcgtcggcaatttgtgttttaataaatgcgaaggaaagggacaaaaggaggacaataagtgaccaaagaggtaataagtgcacaaagcaattggtggcaccaaataataacaaaaagtgtaacggcacaaactaatccgaaaagagagacaaagtgcgaaattatgccgtgacactaaatttgaaaatggattattagggattgtatttcaaaaacaagtttggaggtttcaggggcagataataaattactaagtgattcttacagtatttttgctactaaatttactatcgtaattctctttgatggggtggtgaattattatttttgtatacatatctctgtcattttcaattttcatttttgctagggcaccaaactttcaatgcccaattcctccttcccgtttaggcattttctctgattgtacggtgcccctggcgttttgcattgcgtctattgccggaggatatcagccaaatagcgataattttcgtttggggcaactgagttgagattgtgtggcattgcagcggtgcccgtttcccgctgtttgcaattattgttccctgctgaatgctgaaaacgctatttgttgggaagggggcaaaatgggggggggggggggaaataggggggggggtcgaatattgtgtcggat

SEQ ID NO: 8605 - DNA, 1654 bp, Heterodera glycines
  unsure (1)..(1654): unsure at all n locations
gaaaatcnttggccttaaaaagttatattgactcaaattaggctcagacggagttggcccgttccacccttccctcccacttttcccccattggccctttctcccctccccttgaaaatgagcatgaatccttctattttttgatgaccaatttacctgttcgaatgtttttgtcatttgggttttcatatacatatattaataaggtaatcaaacaatttttaattgctcattttgtgcttaatgtcttctcgcgttgtgttacacatttcgcactttggctgaacaaatgaaccaattcacttaacaaatggcctcaggcacaatgaaatgaacacaaccaaaagcagagaaagggtggatggataaacaattattctgcggacgcaattcaaaatgagcgaattagggaaatgggcaatgggggggggagaggggggcattgagtggatgagcagcagtggacaaatgcctcttgggggaggggacactgaaagtgctgctgcttttaatggacaaacgcacggaattggggggggggggactgaacgacttgagggcggagattggccaaatccatcaaacgcacgcaatttgaaacaaaaacgagacagacagaattcaaggcgagactcacagattttgagccagcgtgaaaggtgaaaagacccgcccaattgggctcaatgacaatgatttgttgggtaatcgttggaatttgtctttggcctaccgtatgctctctgtgttactaccgtacactcgcgtgaatttgaaaattattgtaatgaaatgagaggaaaaacatttgttcttcctcctctcgaattcactttcttcgcctcccgtcaccatcgcatcaacaattaatcccatttcaattacctccatttgccccttaatttgctcgtcccatttgtctctccgtccattggccttgaaccaatccccgtgttcttttcctttgctcatcttcgacgggtgatgagcatgcaaactttttttgagacggacattcgggggatgaataaataaatagcaacaaaagcagcgaatgaatgaaccaaccaaaagtggggtgatttccccgattcccccccccccgcacaaatctttcattatctcgccaagctttctgctgctgctgttcatacctaattgcgtttcccagccttgacgatggaatccgctgacaaatgggagggggggggggggagaaaagtgggctaacgagaggggggggggagagcagcgaatggcccccgcgggggggggggggaagatcgccgaccctttcttcctttgctttggcatcccttcgcccccaaaattacttttccctacttatttgtcgtattaagtgagtgttaagcgaggcgtgaatgttatgtgtatgtatggcctttcactgaccgttttccgttgaataaaatatggcgtttattttctcacaaaaatctccaaaattgggagggggaagaaagaatggggaaaagagagagggaggccagagaaaatgggggagaaaaagaaagagagacacttaataacataacgtagctgatgaatgaaagaagaaatggcgatgaaacacgcccatccattctacgccggagggggggggggaatttcaagagagagagagtacggaatg

SEQ ID NO: 8606 - DNA, 1460 bp, Heterodera glycines
  unsure (1)..(1460): unsure at all n locations
cagtgctgatggattcaatgagtaagtgaatgtttggtgtgattgttggtntagtgaaagggacagatgaataaaagggacaaagcatcgaataaaacacttcgccgccactgcgtcgcatcaattggactgaatgaacgacgcccaattgggggggggggagggattggattgagttggggtgaggtaaattgagtaaattgagctgatccaccggcgaatcaatgttgggggggggatgagaagcggagaggggaaatgagccaagcggcggactgacgaaggctcaaaactgcgcgcagcgaattgttgggtcgcggtgagaagttagcagcacaggggaaaagcgggggggggggggcaatcccgaagccccaataaatgtaatcccttggacaaacaatggccgtaggggcgtcggacgacactctccgccgcccagggggagggcgaagagagagggcacaaatggttgtgccatttgagtgaacagattcaaaactgttaggttttgcattcagaaggttacttcagcagatggaggggtcatttaattgttttaaataatcgcttcgaaattcgaatccttcttctcccccccccccctcattaattgcattttgccttttcttccataacaattctttatccccttccctctttctttaattatcccattttgaaatgccattcattttctccccctcttttcaattgattttctctgattttgtccgttccatcctccgatccctccgttctcttcatgttctccgctgtcattgcttatacgacttcaatttcaagaaggaatgaatgacgcgagtaaaggaagcctattgctgctgatggccatctcccccttcgaattggtcggcgtgaaatcggatcagtcatcaatatattcggatcgcaaacagctcttcccccttccgcccttccccttcccttcccgcgcaatggcccaccctttcttcttattctcggctaagaccgatctgtcactcgttggtgatgatgctgttgtacacattccccaaattcaaatgccttcaatttcaaccttttttatgccgaaattcccaacttttcaatttgggctcatttggtccttcgctgctccccataattttgatatgctttttaatttcgtcagtttcgtttcattcgataacaaatgcatttttctccttattctgcgcggtttatgtaataaagtgtaaaatgtaatggtaaagcaaaacgagcgaataacggacagcgcagacggagtgcattagcgcccgtcatcgtccgtctgtcattcgccgttttggctatgtaatgaatgagtcgacaaaaactgtggagcattgcctcccgcccccccgttgcctttgccccaatataaaagttgcgcattgcattaggcgaacaccacaaatgagcaacatttgtcggaaatgtccatacattggtct

SEQ ID NO: 8607 - DNA, 4894 bp, Heterodera glycines
cccccccctctcccctactatgcggggctttcgctgtgcttattcatcagtccaacagaagcaaccggggggagggggggggggcggagacagggggaaagaggtagttctgcttgctggcggatacatgcggcggtggcgggcactgccacacgacgacgacggccgtttacttttatccgatgctgtgccaaactaaagccctcccaaatgagaaaatccatttgggatttgcaggttgaagcatagctagtgccatttagatgccccacagtagaagtgttttgctgaaaagggttttttgtttcgtaaattttaaattacaatttaccgaatttgtttttggcttttgtttaatttgaaacttggtatttgtctaaatactttttaaagtaacttttttaaatggtcgcaaaaatactgtaatagtggcaatttcttccattttcaatatattttggctcataatccttccccctccccgcaatggcacattttccgcgcccctctctgtaatactttttgcaaaaaagcaatgccattatgctccctatgttgtcactcggccaattattgtgaacccataaacaccattttactggcggctcaccctgtgactaaatgcctctaatttggacattttgccaagttggctaatcccatttggccataatttgctgtccgcgtgcctctcagcgccttcattaacatcagaaacatatttgtccttttgcgttacataacttggtaaattgaatctgctaagaaatgaaaaatttaatttatttgtctaattaaaatagtaattatatgatttttatcaaaattttttatatttgttttaaagtaattttataatttatttgttctttaataaaaatttacctatacgttgtttataatatgttcacgattggatcaatatttggttaatgcatctaatataaataagcgatccaacgatccaaatgattagttacgaaaaaatgattatttaatgcttttcgtccaatgtttattcaagcaacggtggttcagtggtagaatgctcgcctgccacgcgggcggcccgggttcgattcccggccgttgcaattcctttttgctttatgttatttcttctcaattatttaaatacatttttattacttcgattgcattacctcttataaaatctccaaattttcttttattctattcagctattttaatttgtttttaaatttcctgctgttatcctttaataagcattgctttccaagactcatcccgcccttcacttcctctccccccccaatccaatcctccatttatcatcatcccctcggggagggggctattttggatggctcggctcaatcctctccccattcccatccacttcaatgaaaggaggacgagaaaatgggcagggcgggggatattgagattagggggtgggattaattttaactgccccggggcagcaagctgcagttctctctctcatctctctctctctctcccctctctttctttctctctctctctctctctcttcccccctctctctctctctcctcaccctatcatggtgtttttccctttcctgaagacccttccggaaagaaattattccggaaagcctttgggcaaaaatgcccttcccctccgccaccacaacccctgagagtaggtcccaccgacgcggcataatctcatcccatccgcagaatccgcaaccattaaaataggaaaatcattttgaaaacagacaccctcccccgcttcatccccttctgctgctaatgattgcttttggtcatcggattttagcgacatttatagggattctgagcaatggtcaacacttttcatttagctaatccaggaaatttcatggcttccctaaaacagtgaattcagctttatcttctaatgccaaatttccaaattcgttaaagttttagtccataaatattttccgattaattaagtcgttgcgggacgcatcaaagaaataactaaattggtatttttgaagcgttttttacatttgtgttgatagtctgtccgtttttatttgaaggctaaagtttcccgaaatgcgagtaaattggcattctgcaaatttatcccaacggtaggaaattggcattattcgtgtaaaatgttttggcacaatttttttttgttgacttttccattgccgggggatggcttttgtccgggcaccgaaggattagtttggccgcttctcctcgtcgttggctgtgtggcccatccctaaatcccatcccgaaaaacgaccgtggaccacagcgccccaggacacagggccacggattggacaaaggggcaaagcgtaagggggaggacgcgttttgaatgaataatgagaggaggacggttgacgagattgggatggatgcactcactcattttgggggatttggccatgggtggggccacaaaaacaacgaagcagcgagaatgtgatggaatggaatatttccatattcttggattatgaaagtccaatccgcaggccgggaaaaaatgtttgattttttaaagaaaactgaagaattcgatggttttccaaatttgatcttttggcataacctaatttttgagaaataaaaaaaaaattcgttttcatgcacagaaagaaaacaagacgccattaagagtaaaaccattcttcgtgaaatggcattgaaaaattttaggaaaatataatttcttgttaaatgagttttactgtctcacacattattccaattcatatgaatttggccaactttgtgaaagttctttcatctccatccatcacatcttttcatcctaatccatggccaatattcataaaattgccataatcccaaagtcgtctcatccgcaaatccatttatcggggattgaattttttttcgatatttccttaaattcatcgtttttcaaaattttactcatacaattcatttgtatatatcaactatgctgcattcggtgggggcgggtcccggtcaaaccggggaacggggatgaaaaattttcgaatttcatcaagaaaataaaaaattttattataaattttccttttatattttgactttcaacgaaattaccgaaaaatttccaataccaatttttctggcaaaatcccatgcttttcgtttattcagtgtgccatttttagcttttctgtgtgcttgttcatcagcttaattggatccgccgtgacgaattttatttatctgttctccctcccttcaaaagtcgcgtttaatttcccttcagggcaatctccaagattccaccccatcccccgggggtgcggcgactgactttggccaatctcttctctttttggccttctcgcggactttcgggggcagtaatcccctgcttcaccatttcagtttttcttcatccatttagctaatacatcttcaaaggatggggcagactcaattccacttttataagggtaatattaacggggcaccgaatgcttttcctcgtattttctcaaatttgtcggccattttcattccgagttcatggttttatacaaatcggcatttttgcattcgcaatttggcaggcaaattccactgaagcttatccatctgataatttttttgacactttttttaaataaaaaatatcaattttggccgtaaaatatttaattgtccatttgcgtcgtccattgtgagcactgactaattgttgaaggtcgagattctcaagaaagggccaaacgcaatgatctcaagcttttcttcccccactaggctcatctgctgctaccggattttccctgtgaatgggcgtgggtccctccctccctcctccttgccaagcccgcctttcctctccgtttacttttcctctaaagccacccccacccccggagggcaaatcttttgggcgctgtgcagtgcctccgccgccggcggatagaaaaaggcgacccctctacccccgccgccggtgacagttttcttttcggcttatcgtaagccgagcttctcctcctccaccctttggccgtccgtcgtcgatcggccagtcgtcggttggccaagcggctttatccccgccggacgggcccaatctattggatgggattgtggggcggggatttagcggagcggagcatgggagcatctgcaccagcagaagcacggggataaagcctacctcgcccattggacgagttttgttggctgggattactcttctgctggtgattgccgggccggccccctcctccaacagatccattggcaaacattggaccatcccatccatcatcacagcatcgccatcaagaattccacccatcccctgtcgtaaccttggaaaaacttttgggtcacgttaggtatgtcaaacaaaaaggggggaaattaaaaaaaaatccataatttcactattaaaaattctttttccaaatgtattattttatttaataggaatttgcgtgatcactttcaatcatttgcacaatttaggaaaatttaaatttttaaagtcccaaaaaagcatttcaattaaaaaaagacgcattgcttttttcatcgcttttttattttatttattcatctcaaatccaacggaaaagcgattttttatttttattttttgcgttggcttttttctatgaagctatattttttggatcaaccgctcaaaatgctcttccgctttatgcttctgctgctgattgcggacggtgatgatgagcatgacaacatggcgacggatgggatggtgatgatccgtctgtcccgtcctccccattcatccgcatccgtccgtcctccgattttgtgtccattttagtcattctccccgccctccccctcctctccgtcccatcttcctccccctccctttccat

SEQ ID NO: 8608 - DNA, 915 bp, Heterodera glycines
  unsure (1)..(915): unsure at all n locations
ttgtcgagctcccncccccccgcccccccccctcagccaacacaatcagtctcgacaacaaaaactattttcccgtaaaaggcggggaaggggggggggggggacttgggccccctgaagcgggggagagaaaggggaagagaagggagaatttgtgncctgcgggtggttattctgctgttttgtcatcaacaatcacctgctgttgctgttgttggctgtgatcatatcctttcttccgggtggtggacaaatcgtaaaatgtttggggtttttcgaaatttttggtttttactgatttgcacgaggccctcgatgatgacaaaagttccgtaaatttgggtgggggtgacttggcatctgctgtattatttaacggtctgtggaatttggaaataattatgatgcattgttttattttatttttgcttgccaatcaacaattgaaatgaaatagtaattttaattgtctacaaaattgatcagacaaaaatgtttgtttttgatcatatttctcaaatggtaatttaacgccctatatttgctggattccgtaaattcttctatctttctcatcacctgcttctcctcactccccggaggggaccgggggaggcctaatcattattcatttcgtcaagatcatcaacccccaggaatttactcgactcttaattaggccagactgatgatcgattgattcattttgctttatcatcctatgaaatcacaaatctacaaataggaaattgcttgtttgtttgtgcgaatatttattcggtaaacatacaaaaatatacaataatggccatttgaagtataatttttgattactatacttattaccttgtaaatacagtaatttttgcttttacacgatatactttaaagcttaagattatgaatttctgaaaa

SEQ ID NO: 8609 - DNA, 3000 bp, Heterodera glycines
  unsure (1)..(3000): unsure at all n locations
tctagagtcannggtcgcacggtaaattaggccgaagaatctcgcaaatgcttctcattgttttccaatcaaccggtgagaacactggaaaattttagtcttttgccggcattaagaccagggcttcctcattttcgtaaaatctttcgagcattaaaaaaacgctgttccatcgaaccgttattccctaaaaaatacattgaaatataaaaaaagatttggcgcctactttgactaaattacgctgtggtatgccagtttcgtcttgaagtgccgaaaattcatcgcccaaaacccgtgacttccggatctttctgattgattttttaattttttctaataacgcatcgattgacagctttttaatcccatcccacacacactaaataaagaaaagataatcatgaaatttttgattaatcaaaataaccaagttaaaattatgggcagtgcaatgcagtgattcaaaaccagcaatacgagtcgctttttgcattgcactttcgttgtcacgaacaataaggtgcactttttcagcgttcacaccataatcattaagaacttggctcagcaaaccacacattttttcgccagtatgactgccctaaatgtctgcaaaatttttaagtaaaaaccccttaaccgaaccttaattggaactgcttccatcacgcgaaaagtcggttccatattactgtcaatgtaatgaactgtgacacttaataacgaatgttttccttcgtgagaactccagccatcgattgtaagagaaatgaagtctgttttccgaatgtcctcttttacgcgagctttcacattcgcatacaaattcctcaggacatcacttgtaaaatgccgacgacttctaaaattttaaagatttaaagaccatttttgttttagaccttattttgtacattggagctaaaattgacaataaatttttcaaggcttggtcttcaacaaaagagagaggcaatgatgccaaacaaataagtgccatactgcgtcatcaaccctttttgtcatttctccatccgaactccattgtgcttaatcgactttgaaattttgaaatatccaaataattacaaaagcttttgacgatttttggctgtgaagaagagaacggcgactcatttcttggcattttggcaggtgttgggctcaagcacaagcgaccagtacttgtacttgccaacaaaagactttgaattgattgttggccatttggtttcacttttgctttttcctcttccttcaacaattcttcatatttgtccggatgatgtcgctgcaaatgttctcgtagacacgtcttcggaaaagttgtagactttgagccgtaagaataactacagctcaaacatttcgctgttccatgagaaattttaaaatatttaatatatttgctttgtggtggcattttcaagctaaaaatgtaaaatgtgttaaaaatcatttaaaaagagatatacaatatgtaatataaaataggtaatattgaagaaatatttaatttataaaattcattaacattatcaccattactcacattaagatcaataattaggggagtatttttacttcgaaaactcaatctttaggggtgcatttttcccgaaacttcgagcattttcgcgaagctcgaagtttcccgccccggtcccggtaacgagctcaaaaaacgcatttctgcattaaaaattttcgattctgaggtcattatcggtcactagaaatcactattttggggttttgtcactaaaatagttaacaatcactattttggtgttttgccactatttaattaaattttagttttgacgtgcttcaaagttgggtatttgaaaaaataatatttttagtaaatgattaatttatgtattctattttacattatatatttgaaaatcaataaaattacatttgatgaagatttgaatattttcttcaatttattccattatctttaaatttaaattgattttaataacgattcctcagattagattattttaattaaataaacactttaaaaattgtgattttactgatgaaataagatttaattattttcttgattgtttgaaaattgaccatgagacatgaaaacatttcaacaaaatattcgcgaactgattaatttgttttcagatttttgtcataaatattcactttctcatcgatctctgctaatatactttttaatttcatatttttatactattcatcaatactgcatttaaaaaccattttaacgatttatttcatttaaatttatattaaaatctatttattaaataaaattaattgtcacctcaataatattttttatcaatgataaaatatgaacatagacatgtaatatgttttaaaccattcattttggataattttgtaataataaattttttaagcattcttttatttaattttaattttattgtcttttttaattgtgaatttcaatgccttttttcacttgtcttcttcgaacatgtcgacaatgttttgtgtttcatttcaatttacagttattagcggtctaaagacatgcgcaccaattaatatgctttttaattcatttgtatttgaaggaggtaaatacttctggtattcattcaatccactttctaacctgaattactaatttaaatcattatttagtttgataattatacacttaatttttgtaatctttaattcatcgcaaatttgaaatattttatttaaatatatttatgattattttagactatttctttattttttcgtaaaataatcaaatattttttaatttttgaatttttccaattcatattttcaccaaactcatttttcaaattaaaattatcgaagcttttctagatattttaatacatcaataaaaaatttaagaaaatacacctctaagaatttataaattttctcaaaaaataattaaattttcctgtgaaagtaaaanaattttagttttaaaatttttccttttggaaa

SEQ ID NO: 8610 - DNA, 1563 bp, Heterodera glycines
agtagttagtactgccacaccgtcgtagcgcgcgaagatttcgcgcactagcgacagggtattgggcgtttttgcggcgcggatcaaagggtttcgcgcgttgggcgtagggtttggggtgggtgtcggcgggctcaaaggggggtttggggggttggtcggggaccgtcgtagtgcgcgaaattttcgggacaggtggtcagttaaaattcgaggacatgtttgtgctggtgggggcggatggggagcgtggtcggggaaaagcgacgccaattgattgctgaccaccccctccgtttttctctcctcttccactactgttatgacctccactcgcaatgcctcccctccttcgcttgtgatgccgaaggtcattatgacccccccccccccatctgaatctttttttttgttttgtttctttatttcgtagtttttttatttttttgttttaaatttaaagatggatgatgaaacgtgcttttgcagtggcgctctgtaccccaagcctggtgaggcccccgacgggtcgagaatggtggttcagctaaactgccgctgcacgggggcctaccacttggggtgcatcgccaagcacctcatcaagcgtggtggcaaatgccccacctgccgcaccgagacaattacggagaattgtcgtccaacagagcgctgggtgcagttgatgcgcgatgcaggagatgtcagcgagcaggaggaggacatcgtctttttagacggtgagtttgatgaattaaaaaatatttttaaaaattcaaaaataataatttttatcaaattgtagaggtgctacagccccaaacaccaccaccaccagcagcagcaaatgatgtggcggaaggcacggcgcaggcgagggggcgcgggcggcggacattgcgcgacaattttcggtaagccaagaaaatttttttaattttcgaaatttgactttttttaatttaaattgatttaattaatttttttttaaattccccaacagctatcggatctcggccatcgtcaccagcagaaaaagcctgagtgcgtttctcgcgaactgagggtccactgggagggattttccttcgagcaggattcgtgggaggacgaggcggccatccgcgcggtaagaaatcattaataatttaattattatataaataaataaaaacaaaataaattccagcaagcgccattgatatatgtggcgtgggaggccgcccacgacgcggggcacacaccggaacacaggagggtgttcccggtgcgccccgcgtcgtggatgaccaacgttcgagtgcagagggatttgggagaggccgaaagggcctatcccgggcggcgcacggcggtgcgacaaatttttggtaaaatgaatttaaaaattaaaataataataataataacaaagtagcactggacgcgaatgccgggactgaagcggcggcggcggcggtgccattgacagagggagatgcggcggcggtgccattggtggaaggaggggaggcattgattgatgcgccagcaccaccaacagcagcagcagaaaccgacgca

SEQ ID NO: 8611 - DNA, 2191 bp, Heterodera glycines
  unsure (1)..(2191): unsure at all n locations
agataaagttttgaatgatttaaactgagttccaattgtcggctgtgagtacgtttcagggctcagatggcttcggccgcgccgcccctcggcccttctttggggcagcgaggcgtaaacgtggcgaacttctgcaaggagtttaacaatttgacttcgactattcgatttggtgggttttcgcgtttgtgttttcctacatttgatttataaggtacaaatttgcctgtgtctatccacgtcaaaccggacagaacttacgaaattgacattagcactccgaccaccgagtggcttctgcaacaagcggcggggatacgacgtaaccggcaggaggaaggtgggaaattcaatcgctccgttctttccctggcaaaccctttcaatgcttttcaggagaaatcgtcggaatgatttcggtgaaacacgtatacgaaattgccaaagtcaaatctcaagacaaatctctcattggagtgccgttaaaagtaaagacagccaaaagacaaacttgggtaaattagccgatcttttagaaaatttgtcaattggtcattgagagagcggattcgattggcatcaaagtgcaaaatgaagatttagacccggaagaatataggaaattcctggaacatcgtcaggaagttgtgcaaagacaattggaggaaatagcgaagcaagaagaggccaaactggccagaacatgatcggattttgattcattgttttctttttctcttcagcttatgaatgaacgtcaagttgtgtaattacactcattcgttcgcttccaaattacccttttgaatgacttttccgatgagtgaggggagcggagagaatggtccttcccaaaagggtttcttccgcccgcgcaattatccgtcaccaattagcgcattgggttgccatcgcatgccaccaatcctcacaaaatcctcctcctccaatggaggcgtcacttagcttttccgtcttgcttcttccattggcttttttctcgtcaaatgccttttttggtgggtcccctttttgcggtgctcctccattccctaggcccgtgtgcgctcgctgtttttgctgtcgcccgtgagactgtccatccctatctgattttgcctgcctcccttccaaaggccaccctttgttcgttcgtgctgctttaattgtcagtctccgccggtggtgccgttggcccctgccgtgccctccccctgctccgtttggcatcccatcgcccgtaggtgctgctgccccggcgccgtttctgttcctttgccccaacaattcgcgcagcatcaactgatcatggccaatgagttcggtggaattgcgccagcgccgttcgcagtgggaggcgaaagggccgcgcaatttccaatcggaccgatggaagcgcagcatcaagttcagccaatcatttatgtgatcgaaagtgagttcgtacgaaagaaaaaaaatgccaaaaagtgaaatagacggaaagggcggacaagtgccaacggaaaacgaaagcgcaagcgaagggacaacgacacaaaggacgacggaggaaggaaaagcggaggaaaagggaagccaaaggacgacggaggaaggaaaagcggaggaaaagggaagccaaaggacgacggaggaaggaaaagcggaggaaaagggaagccaaaggacgacggaggaaggaaaagcggaggaaaagggaagccaaaggacgacggaggaaggaaaagcggaggaaaagggaagccaaaggacgacggaggaaggaaaagcggaggaaaaggaagggccaagcagcgaagaatcggctgaagaaagtgtgatgaaagaaagtacaacaataaggacgacaatggaggaagaaaaactattgggggaggaggaacagagcaattcaaagcggacaacgaccaaaagagcgacagcgaaaggggcaaatttgaaacggaaagtgcccccggggctaaagcataacagacgaagggtcacaatgagaacgccaatcgccgagggaaagcgccaaaaacaattcgatgaaagtgggggagaaaccggtttacctcagttcggccccaacgtgtttttcaactataacttttttctatgtcattcaaatccaacaaagttgatatcattcgaaagcttaatgtatttagaaactttaacgaagctattgcttcgcgnattagac

SEQ ID NO: 8612 - DNA, 1412 bp, Heterodera glycines
  unsure (1)..(1412): unsure at all n locations
cggaggaaggaaaagcggaggaaaaaggaagccaaaagcacgccggaggaaggaaaaagcggaggaaaagggaaagccaaagggacgacggaggaaggaaaagcggaggaaaaaggaagggccaaacagcgaagaatcggctgaagaaagtgtgatggaagaaagtacaacaataaggacgacaatggaggaagaaaaactattgggggaggaggaacagagcaattcaaagcggacaacgaccaaaagagcgacagcgaaaggggcaaatttgaaacggaaagtgcccccggggctaaagcataacagacgaagggtcacaatgagaacgccaatcgccgagggaaagcgccaaaaacaattcgatgaaagtgggggagaaaccggtttacctcagttcggccctcacggttcggccccaacgtgtttttcaactataacttttttctatgtcattcaaatccaacattgttgatatcattcgaaagcttaatgtatttagaaactttttctaagatattgcttcgcgattagacaaataccaaaaaaagttatacatgaaaattgcgaaaaactcgaaattttttttccaggcttgaaaatcttttcgctttttgtaagactaatagagcatgttaagattattggattacaaataaaaaagctatagtggaaaaacacgttggtgccgaaccgtgggccgaattgagcgagtccgggagaaacacagaaagggtggataaaaaaaccattgttcagtgaaaggcgaggcacaagcactttacgactacgaagaggcaaaaagcggggaggacggactcacggggaaaaaaagcgccgcttcaaaacttttcgaagtggaatttttggcatggaaagacaaatttttgcgtgggctgaaagtatttgcaggcacttttcaattatgccgaaatattgcagattatttaaaggaaaggaaacgaaacgcacgacaaaagcgaattccgaaaggcgagacgaaagaatgcaataacggactaatggcacaaataatggccagtgccattattgaggacagttcaatatcgaaaaggctgatcaaaagagcactcaaattttctttcccagaatcgcagtttgacatcatttgcgccgcaggaggtgccctttccctttttaatggagcagaaaaagacggaacttcaggagtgctcagttatgccatttatggaagaagacattgccaagtgaaacggagaagtgtgacttgtttggcatttgaataataacggtcagtagagatcttttgtcaataatataagaaaaatgcatanaaaatgagacaaaacttttcaatcgtcgtccagcacaataatctcgggaaccgccttatcattacacattttcttcgcttccgccttcatttttct

SEQ ID NO: 8613 - DNA, 2858 bp, Heterodera glycines
ttctctcattatttcccgccgcttttttgtttcctgaacattttaacatgaacaatcaaaaattcacttcccatttatttatttgtgtaaaaagcaccttctgaatgccttccatgttctttttgtagaaggaattgaccatgtccgctgttttggtcccgatcagttcagcaacaattttgcaatccccgccaaatcggatcaatgcttgaatattgtcatttgcattagcaattagacgtcttcatttgtccctcccccactctcacctttctttgtttccatttcttccatgtccgaccaatgttgcgtttgtctcatgcgccgtcctttgccaacaatcggtgccgtgccccggacgaacttacgcgcttcttccatgatgctttggtatttcttgttgtccgtcatcgccaattgccttttcagtgcacatgcctccatctgaagctccttctgggccttcgacacgacccttagcaaattcaaatgataaatttcgcatttttattcccccccccattcttcgtttgctttctcactttattttctgttcacaaatggtctcgttgttctgttccacttgcacttcgtccaatccatcggaaatgtcatcaaattgttcgcccatcaccacccgcgccatctcctcaaattgttccgcgatatttttcatttcaggaggacaaattgggattcgtttcttttcttcgatgggctgagcgcacacgcggtgtttgttggttgccctgtaaaagcactaacattttgaagcagggaaaacatttatatttccaaacgttacttaaagtaatttttgcatgctcggcagagctcaagtccattggcactgtataatttgagcacttcgttttggcaaccctcgcaaattaatctgtgcagctccgatttgatttgcgtttgtccctcctcgtcacttaaattaaatgaaaaatgtattatttttgaatccacaaaattttaaatgtttgtgttttccctgtgcactttttcacctttccgatgttccatttttgccacattcattgtccataaagcttttgtagttttgttgttttttggtgaggtaataatgttccaccagctctgacaaatttttgtgggaaagcatttggtggattttggcgaagtttttgccgaaacatttgtgggcctctctgaaagcgaattcgtcttctacggaaaagcgcttcttcacactgtttcttaaagccaattccgacttggctctttttagattgtggtcagactttagcaagatgtaaagtgcctgaaaattagtgtaatttttgcatatttgtattatcccaacaaccgactgaccctatcagggccaatcccataatgatttaatgcgtcacgacaaaactcaacaatttccgtgtcgcccaattttccttgattcttcgaccacaaacattcgtctctttcctcgtcgattttatcgtcctttcttatttttttgttacactcgggcagcataacttggtaaccactgccaataatgatctgcttgctcttgtaactgttcattaccggactcttttttgctaaaggtatttatttaagaatcattaaaatcacggctctattgcagtttacacgagcaggaaaaaatttggcaactcttacaaactccaaaaaagtatttttctgatattttgaaccataaatttttgaatcattgagaaattttttttcatccttcgtagattaatagaggactcttggagctatcaaatgacaccaagaataatttctggttctattgcattttatgtgtccaattagttttttggtatcatttaagtgcaactacctagttgccttgcggtttgctcttaacaaataaaaagccattggattcataaagtccaatagaaccaaaaacaataatgtttattcattattttttatgaattgaatcagtttgggaagggatacctaaacaattacaatacaatatttgatttggttggtcacatgctttttataccagaccgttttcatacgagcacaagtttttggctataacttttttctttgccaaccaaatccaacagtattggtataattcaatagtcctaagtgtcctctacatattctgcaaaatttcaaaaatatcattaaggttcaaaaaaagttattccaaaaaatgttcgaactagctttttgaattcttatggacataacttttttggcgctactgtaaaagttaccgtttttgaaaattttttcaaaaggggggacccttttgttttgcaaaattttttttgtgatagtcataaaaatttattctctggggtttttgggggaccccgatcacgaatccttcaattattttgatcaattccgatttcctaatctaaatttgaacaaaaaatcataattttaaaaattcaaaatttcgatttttattcgggttcgggttagggattagaaattagtcaaaatacatgtcagattcgtgattagcgacctttaaaaccccggataaaaaattatcatggttttttatcttaaaaaaatttttcaaaacaaaatggtccccccttttgtttcataagtggtaactttacagtagcgccacttttttgaaccttaacaaaatttttaaaaattttgcaggctaatagaggacacttagggctatcgaatgataccaaaattgttggatttggttgtcaaacgaaaaagaccccgacccttgtcttttcctaagcttactgttttgtggcacattttttttgttcgctgttgatcgtgttcgtcttgatatttcagattttatcaaagaataaatttgcggacgaattatcgttgaaaacactgaacat

SEQ ID NO: 8614 - DNA, 974 bp, Heterodera glycines
tttattttttatacaatttttcaaaagaaatatataaaacatgaaaatgcattacttgttctcttttttggggtaatattttcacatctctaacacacaaaaaaacatcaaaatcgtaaatgctaccaattttggttatacggataaaaaatctctttggacatttagaatcaatagagaaattaatagttttagcatttttgctgaaaacagcagtttcggacttgagttataacatgataaaagtttgaaagtatcacaacttttttctgggatgtcaaattgcttagcattcgcttagaaaaagattctccttttcaaaaactttttttagataccaaatttgttcagtttagttggggatgaaacgagttatggcagatcaaaataaaaaatacaaaaaaggcatttttcagtgtaaattttgaaatagcgggcaaaaaatttttttttaaacatcgcattcattttaaaatttagcttttattttaagggtaatttaattgtaattagtttctttattgccatgttttggctgaaggtcatcctttataagttaagattggcaatagggaaacggtatcgtctggtcatttggatatcaatcgggaagcaacacggtcctttattatgagaacagatgagaaagaaggagcaattaaaaaaacaaaatgaaaatattttttacatgtaaatattaaaaactaattaataaatttgttaattcgatgctttaatcaaaaaagtaagggcgtaattagggaatggaatactttactgtttagtgaattgataaggaattgaaaataaagcggtttaagcagtcggtcggttgtcctttcctctctcaaatacataaatcgccttttgctttgtttttaattgcccattttattgttgcgcttttgtcgttcgaattggttgttcaaaccatcacaaatgttttttgcaaagggctttgttctgttcggctt

SEQ ID NO: 8615 - DNA, 1113 bp, Heterodera glycines
ggtgtaacttttcccaaaaaaaaatccaaaataatgtaaaattaattaaaatattttgatctttttaaaaaatatagaaataaactaaaaacagtttgaaattaccttttacatggttaaaaatttagcctattaaatatattttttaaaatttattatatatatattttttaaaattccgacttccgagttccgacatttttggggtcggaattccgacttccgaaaatttttggggcctcggaattattgcaagaaacaaagaagatgagaaaaatgctaacaacttatgtcataagaaaatgccaaggaatgccaaaagaagagtgcgaggctccgtatgggatctgcaaaacttgggcacactaaattagcactaatctagcgaatggtatccatctcattaactaagctgtttttgggttaacaaaaataattttccatttgaatatttatccgatcgcgaaccgaacaatacaatatatacacatagtcatgatcagaacaaggacagttattacatacaataatacaatacgatcgaatacatgatcacgtcaatatacaatacacatatgtacatttgttgttcatctgttgcgcacttcagctcagctctagggcttctcagcgatcgccaccacatcgattttgacgcgtccattcttcggcattttgaccacctggcagaggctgcgggcggggtacgtgtccggggtgaagtagcttttgaacgtctcgttgaccgcctggaagtcgctcatgtcagcaagcaaaatcttggcgaacacaactgaaaaaagggaggtaaaattcatgaagacgatgaatcctggagaattgctcacacaccgtgtttgaaggatgatccgccagcctgcagaagttctccgatgttggtcatcgcctgcttcgcctcggctcgcgctcctcccggcaccagctccgtcttgcccggctccattccgatctggccactcacgtacagcgtctggttgctgacgagcaccgcctggctgtaaaaaaaaacaaaaattttttgcttatgatgcgcatccattgtttgctccacctgtagcccatcgcagcaggcgctttggtcgtcgagatgat

SEQ ID NO: 8616 - DNA, 1976 bp, Heterodera glycines
agcgaaatgtgcgaaaacgaaaaggcattttattctggtcactttttactttgactgccccgactaaaaagcacaggggaaacctttcgtttttttttgttgactattttacgttttaaggatcactgaagatgggcatttatttatctcgaccaacatttttgcaaaaaaggaattcccttgtgtttttttcctcgggacaatcaaaataaaaaagtgccgtattttgtaaaaaggtgggagaggaaaaagaaaggacaaattgaatttaacaaagtcgagaaatgataatgcgagttgagttgagtcgcctttatactaaagaaaaaacaaacgtgcacaaacaaattttcaaaaagtgttcggtgaaatttgaacttccttcgattttgacatttcgatttttctctctgtataaatatgcaaccattttcatttgtcgactatcattttgcacttcattaaagtagcaatattttttaattaacaatttcagcgaacaaacttccaacgtcctaatttctgaaacgaccaccattccccaaatggctgctgctccgtccattcgtatcatcgcgacgtccaaggcgcctgctgcgacgggctacaggtggagcaaacaatggatgacaattgagaaagcacaactttatttgcttttctgcagtcaggcagtgctcgtcaacaaccagacgctgtacgtgagcggccagaccgggatgatgccaggaaagacggatgtggtgtcgggaggagcgcgagccgaggcgaagcaggcgatgaccaacatcggagagcttctgacatacgccggctcatccttcaaacacggtgtgtgagcaaaattcagcataaccatcatcgttgatttccgcccctttccagttatcaactgcaacatcatggtggccaacatgagcgacttccaggacgtcaacgaaacgttcaagaacttcttcaccgcggacacgtaccctgcacgcagcttcttccaggtggtcaagttgccgaagaatgcactcgtcatgatcgatgcggtggcggttgtttcgggccagtgaggagaagtgcagaagtgcgcaacagatgaacaacagatgtacattcgtgtattgtatattgacgtgatcatgtattcgatcgtattgtattattgtatgtaataactgtccttgttctgatcacgattgtatgcatatattgtgttgcaccgatcggataaatgcccattgcattctgtatttttgattctcgttagagttcgatcagaggttagcgaagagccattccagcaagttaaaattttccgaaatcgaaaatccggcaaattttcctgaaccattccccgctatgtcaaagggttactctttttttgaagttaatttgggtctccagcaattcaaaaaaccagattccctaagtagcaacttaatatgactaaaatgttgaatattattatccttttatccacctaaaaagcccaaaagacatgagacgcactttcctggacaacggcatttttgaaactgcccttgggcacacaaatacagccatcggcattttccattttacaaaaacaccctcaatttgatggaactcctcagcaacaataaaaacaacacacattgtccttggattttgtctcgaccggtaggtaccctgggaggcatattgaaaaatccgtctacttttccgaaatttcaaaaatcacggaatccgtatgggatctgcaaaacttgggcacactaaattagcactaatctagcgaatggtatccatctcattaactaagctgtttttgggttaacaaaaataattttccatttgaatatttatccgatcgcgaaccgaacaatacaatatatacacatagtcatgatcagaacaaggacagttattacatacaataatacaatacgatcgaatacatgatcacgtcaatatacaatacacatatgtacatttgttgttcatct

SEQ ID NO: 8617 - DNA, 1070 bp, Heterodera glycines
ttcaggaaaaccaggtataggaaagccaatttgcaaaaaaaaatggcctggacctggatccagtaaaaatctatgataaggcactgaacgtgaatgtgtgtggtatttaggggaacacgaaaaatcaaattagataactaattgaaggaccaagaattttttatccatttcgaccccgcaccctgcacaaaaaaatagaaattgtaatcgaacccgctgaaaacaaattttgccaaaaactcacatcctcttacaatggtcgcacattgcgataaaaggcttggccatctcagcactcatttggccatacgcaggggtgacgtgagtcatcaacaattattacacagcacaaaaaaaagaattcaatcgattgcgtgcgctaattgattttaaaaaatcaccaaaagcgtattcgatttgtcaacatttgcttattatttttatttacaccaacaccaatcatggacggtaaaaaagaaaaaaaagcgacaataaatctttttatggataattatgggaaaaaattggcgttctgtcacatttactttttatctttatttctctcacttttacgtactatctcttcattcttaataatgtaaagaacaacatttacttcatcctgtttaacttttttcctacttgttaaatccacaccaaattttgcatatcgctagagaaaaaaattctgcatcgaacgtatcaaatatttttttaggttatacatcccgtttttgtagtagagttcaaaaagtaaaaagttgaaatcagcagtttaggacttgagttataacgtgatgaacatttgaaactcgcacaacttttttctgagatgtcaaattgcttagcattcacttagaaaaagattctccttttcaaaatctttttttagataccaaatttgttcatttttgttgggaatgaagcgtattatggctgatcaaaataaaaaatacaaaacagcatttaccagtgtaagtgcatatactttgtttttgcgtgtgttggcgttttgttttacgccaattattttttggcaatttttttcgttttttaccgtccatgcaata

SEQ ID NO: 8618 - DNA, 2355 bp, Heterodera glycines
aaaagccgatcattagggggtgtaaaaaagtctcggtctcgagtctcgaaagtctcaaagaccgagaccgagactgaaaacccgagaccgagactcgagaccgagaccaaaaaaaccgagacttttctcgagttgagactcgagaccgagactctcgaacatcactagtagcgactaatcactgaactgctgcaagcactgcttaagcagcgtatagggatcagataattgtcgggacattggcaggtgctaaaggaatatgttttcaacaatttctgaagaaataaacatgctttgtattaagttcccggtcccgggttttgaaaagctcaggtcccgatcccggtcccggcaatttgggccggaaaaacgggactaaatttcattaatgaaactgccccaaatttgaaaaaattaataattttgtggcgaaatgtctttagttcaaagtttaaagatagaactgagaaataaattcagattttgatacatacataccattattttttattttgaaatccttaaaatgtattttagaaatgaatacatcaatctggaaaataggtttatttgaaaagtcaaaggatggcaaaatggcggaatgccgagaatgtaaagaaaatggaaggcccaagtatgaatttagcctctctgactccagcaccaaatcactcaaaatccatcttttttcaacaatccatgctgattcggaatatgtcaaaaatttccaacaactggagaagatgaaaaaggagtcaaaagaaaaagctgataagaaacagccgacgatcgaaaatctaatcggcacgaatttgaccagcagcggtagttttgtgttagtaaattttacggattttggtttttttaggcattttgtctgtggctgacaaacgaattatcagcatgataacctgtaacaatctgtcatttggtttgctatctgatccgacttttaaagctcagtgtaaatatgagctgaaggatgaaagcgattatcggtaaaagtcaaagcaattaaaaaattaaaaaaataattttttaggaaaagagttctcccggaagcatacaaactagtcaaggcaaaaatactcaaggatttagatgattgcgccaatctcagcttcacaattgattgttgggcaggtccatcagacaattttttaaggtaattttaggcttcaagaagcggtatttcaaaaaataattaagcttgactggtcacggcgtcacaaaaaattgggtgcaaaagaattttgtactcgctgttcaccattttcccggccaacattctggcaatgccattgcgtgcaatgtccgtaaattattggatagctggaaaataaatgacgatcgagtgtttgcttttgttataatatgttttaaccaatacagaagatgacgcaattttttcgattttttactcaaaaattcaaaaattttgaaaaaatcccgggtcccggcgggatcccggcccaaaaattgggaccgggaccgggagtcccggaaaaacgggagtcccggtgccgggatcccgcccgggtccattttccaagtcccggtcccgatcccggtcccggcaatttcaaaattccgggctctagtgttgaccatggtaaacggagttcaaaagttccatttccgtttgtcgtcctaaagttaacaaattctttctaattgttttttaattttatccatctgttaccttcttttttcgctgcttctcttctttcttctcaacctttctcggttgttcgttcggcttcttaatcaaaaagagtaatcccaaaacaacatccaaattctcatatttcctgaaggatttattcatctggacccggaaaatctttttaaaaattagattttgatatttcgaattgtaaaacatacaaataacaaatacccaaaaacgtttttaatgcatttattaaacattggacccggaataatcattagaatttttatcaaatatttgtgaaaaattgatatttctgcttctaaaaattacaaaaaaaacataaattccccaaaaacaagaaaacttttaagaaatcgctgtaaaattcgcttttttaattagcatcaaagtgtcggtaatcctgtattttattggtcccataaaaagagattaaaaagttgtttttatgcatttcggagtagtactcgggggttttcgggggcgctgatcacgaatatgacatcaattttgacctatttcgaatcccgaacccgaattcgaacacaagtcggaaattaatttttcaccaaaattctattgtccaaaatcgattaaaattcactaaatggccttgaatctatagtttctattatattccgttcatttgaataagtttggga

SEQ ID NO: 8619 - DNA, 2932 bp, Heterodera glycines
  unsure (1)..(2932): unsure at all n locations
ggaataataaaaaagagtaatttgatggtttncatttaagtgtatgaaagctgctaaaaatagggcccagtaaaaagataaaaacagataaatgaatgaatgtaattcccaccgatgtatgatgggttgggtgatttgtggtgtcattgtttatttattgttttgttgtttttggcccaattatgtaacgatggtgacaacaaaacaaattattgcaaattgtgggaagaaaattcagaggccaatgagctttcagcagatgaggttcaatagcaggagacaacggaatatgaaaaaaatggaaaaaagtacgagcgaaacttttaaaaacggaaaaagggatctacctaggggtcctatagccaccatgccattagtgctgatcgagacagaaaattccccgatactcgagaccgagacgaagaccccgaggaagaaaccgagacctttctagagtcgagactcgagaccgcgagtctcgagcagcactacatgccacaattctgatgcctaccttattttcaattcggaccaagtcattgcatgaaaaattgaaacaaaaaatagagatttttgatgccaaagtccagtgcggcacgaaatttaattgtgatagaatttcaaatttgtcatgtcacaaaaaattatgtcaccaaaacgtcgaggaaaaccctaaagaagagctgctgctgctactcatatcaaatgtgaatgcatttgttttgtcactgctttttggtccattaaaagtgtcgttcttcagtggtctttgaacccttagagaagaaagaaaacaaaaaatatgatggccaatggacaaccaaccatattttcatctaggcatgtaagtatatacaatagcattatcgtgttattgcacaatttttgttgtgcaataaccatttatatttgtattatgtttgataatcaaaaaaaaaataaacctatgtaattagtaatttaaaaaaattaattaaaagatttggtgacttttttgggttatttttgagatatttcatcaattttttagaaagtttaaaattttataaaattctcgttttaaaatttttcaataaaggtcaaaacgccaagctgtgtttagccgttaaaatagagatttttgaaaatgccgaaacatggcagtaaaatgtggacaagtgccaaattatagatgaacaaatgttgaaccaatacggacaaatgggataaataacccgtaaaatccgttgtccgtaaaaacccgtatttgtctaaaaatacggggtacgggctatgggtccgtaaaaacgcgtatacggaatggcagatatacaaaaaatgatgtaaaaaaatcacaacaaatttcacaatatgtggtgttcaaaaattccacctagagcagcagcttttggccgtcacaaccaatgaaaagccgaaacataaaagaggaggaaaagtccaacagctgttagagatccgtccgtcttttgctagattatttttcaatggatgtgtgcatatccatacataaaacctcgagacttttctgaaatgtgtgtgagggatggggaacacataaatctgatcactccagccggggagggatgaatatgtgggcggtgaataagcatcaacaacacgaggaggggagggggggggataaagccacggatgtaagccgatctccgtcaaaaccccgaccctgatcactgaagttgacctgactgatcagccagtcatttcaaaccgagtaaataaaacgtgaagaagggaggggcgacatttgtgaaatgaaaagcatgactcattttgctttgaggtaaaaagaatacaggattaccaaagtgtcgagatcagaatgccgaccgcaaagcccaattttgtcgggatttataccttcgagcgaaatttttcccacgccgatttctgcggtgttttttgcggcgcgtcatgggacgaaatttgttgagagaaaaccggatcgtcaacagccaacttaatataaataacttcgatccgattttacttaattttgaataatttataatttccacattatttccaatcgtttttttaattcttccactggcgctaatttaaaagagggcctttttgaaaaattttacacattttttggtcttaaatttttccaaatttttttcggtttaaaaagtcatgaaaccaagtacccgcgggtttcgaggtcgctgatcacgaatatgacaattatttgtgcctattccaaaccccgaaagcaaattgagcaaaaagtcgaaaattcaaatttgtttttatattagaatcggaaccgggattccgaattgccctaaatggatgcaatattagtgattagcgacctcgaaaaccctcgggtattcatcattatgtgtaaaaaacaaaaaaaaatgcaaaaaaatttttaaatggcccctttttaaactagcgcacaaattcccatattttctggcggatttatcacatcttggacccgggaaatctttaaaattttcaaaggcggtgccaatatggcttcgacggtaagaatttggtattttttaacacgatttttaactttgcacaaaaaatacaatagttaggaggttgtcacccgcttttccgggattttgattatgagtaatgtatataccttctcggtggtttcctttgccggagtcagttgctgctgaacttgctcctgtgccgatggcacatgcttttgcgtttggtcgattgagtcgtagtcggactgatttggttcaagaggaaccggatggccaaccacatactgaaagcattttccacccaatttgactaattttggatgactcgtaaaatacatttggctctttgaggacgggcggaagcggcggttttccacgaggcggcggggaatagaaaggccgcgcgaacgcctgacaaagggcaagctancgcgaggagcggagacttctcg

SEQ ID NO: 8620 - DNA, 2666 bp, Heterodera glycines
  unsure (1)..(2666): unsure at all n locations
cccaagggccaacgggaaaatgtagttaagtactccacatcgggcccatcccaatttcaaaatcatttcgcatcagacggtattgcaacgatctcagatgagtaaggaattcgtcatcgtttggatccgcaagcaaatcaaatccttcgactaggtttcgcagggccacgtcattgtccctgtaaacctttattcgttcacggagccgaattccgtttgtgggatccaactcgtattgtcgaagtttatcagcagctatacgttcctccttcttcaatacagtgacgagcctacatttactaggattaccaaagggagcaaaacatttggactttgataatggcgggtgtacactagtgaactgtgttcgcaaggccaggtgaaaaccttcctgtgcgttgtttgtacgtcccatatcttgaattatactttcatgatgattccaagttgcaataggaaacaagggtccatggccagcatgaccatgtacatatgttctgtgttaacaaatattatatttgttaacccatttatgtaccttccaatatagtcaaaaactgagattggttggcctccatcttgaataacttgaacattcaattcttgagcttttaagcgaagaaaatattggatgtgccagccgcacgcgccgtttgtttttcactttgccaaaacagccggcgcctttgctttccgaaagatgtgccagccgcacgcgccgtttgtttttcacttcagcattactttaaattcttaattcttacacaacacaaaaagtattttgacaatgacataaaatgaaaacgttttttctatttttacattcctcttttcgataattttttgatgcattaaataaatattttaatgcagaatgatggtaaacaaatttattaaactatttgttttgcttcttctgatctctcccaccaatgaaaagccgcatcagaaaagagccttagtgacaattgcattgattggcgccttagcacaattgaaggcgtatttattagcgcacaccggagttatattaacagcatcaatgataacagcacttacaacattgtctctcgctgtatatgttaagctcaaacgtgagatattgtttttaaatatttagaacttatttattttctaaattatagattgccgatgtggcgatctgttaaaagatttctttcccataaccttcgtcctgaactcgtacgagttctctgtgtcagtggaggaatttacacccgacaacatttttgaaaaaatttcaaaagagctaggccggaatgttcagcaattttgctttggtttgttttaaattggtttaaattattatagaaagatataataaattcagcttctccttcggaaacgactcgaaagattaaaaaaagtgatgaagacatggggcttcttttatgcaacccgaagccaaggacggctggaaatcttcgactgcccctgattcaggaggctggaaatcttcgactgcctctgtttcattttttatgatatttcccgttggcccttgggaaaggcattttctttttttcaaataaagaatcaacgactttgttgccttgaaaagtccatattaaattaatttaattaaaaaataatttttttttgaattcaaaaatgatttttctaattattttaacacgattttattaaaaaggtgattcgcaagtgtcgagtccgcaattgtcgggtccgcaaatgtcgggtccgcaaatgtcggggttatccgcaattgtcgggtccgcaagtgtcgagtccgcaaatgtcgggttccgcaaatgtcgggtccgcaaatgtcgggttccgcaaatgtcgggtccgcaaatgtcgggtccgcaaatgttaaatccgcaaatgtcggatagccgttcatccgggggataaaaattggtggaaaaattattgggcagtaattgcggacattctctccatttggacagaaatgccagaaattgtgttcctttcggtggtaagcaatggcaaaatgtacttaattatatttaaaaaaaaatctaaaattttgaaagaatttattttccacaaaaaactgatccatgccaaaactcattcaaatcattaaggagtggaaaaaaaggaaaatgaccaaaatgggaaaataatggcccgaacaaaatattatgttgataagaaaaaggaaaaaacaatgaaaatctaattaattaattaatattttgagcaaaaatattatttaatatttgaaatgtgtaaataatgaaaattgtgggggtaaaaaaggagggggtaggaaaagaagattagatccgtccagctggaccatactaggcgtgtccgtgggatcgttgggcctacccctgaccgaagtcaggggctaggcgcgatcccgcctattgagtccgagttggctttgtaatagccccttttattaaagcacaaagaaaatgtgaagcaaaagaaatcggatgaaatcggagaaagcaaaagttgatcaaaagatctcaaaagtgatcgctttctccgggtgttggtccgatggctcccacctnaacaattttcgggcggagcaaaagaaggagagaaaagggaacagttggcgtaattagaggaaagggaaaaatgtgattggcaatttgattgattgngcacagaatggaagagnncaaagaattttg

SEQ ID NO: 8621 - DNA, 1124 bp, Heterodera glycines
ttaagataaaataataaatgaattaaatagaccaggaaattggggtatttctactgcttttcaccatttcaatcaaatttttctctgtttataagaaatttatggttttccatttttttttaataattactttacttaatttgattattcttattgaaaaatatttaaaatggaattttgaccaaatttgctaacattttactataatttttataccccaagttataaaaataatagtaaaaaataatctaatccaagaatttaatcaaaaaattccggaagtcgtaattcaggacccaaaaatgttgagagtcgagtccttggttgggcgtaactggattttcaattacgaaaattcgtaaaccataattacaacgatttaatagaaaaattggttaaagtatgtaaattattcagaataaaacttacaaattagcaagatttatgaggcgaaaaatgccaaaataccggcctaaaaaagcaaactaaaaagattttgccgagtccggcggtgccgaaaagcaacgccgagaaaactttggaaaatcttatacgatttattcacagactttgcgtcaaaatgtgctattacaaaaaaattaaaatgattttcttttttgtcatttttcaaaaagaaaaataatatttgccaaaaaactcaaaattttttatgcggtgacttttaaaagattttaaaaaaatagattctgaagacgcatttttttaacagtaatatttgcatttttccgggattatatcccaaatattgaatttatctaatatttataatattttttcttaaataaatcctttgttttattccattaagagcctttttattcacatcaaagaggctcaactctactgaatttccggaaaaaaatctccaatccaatttagttgaaaaataatgatgattttcttccctaacaaataagatcacatttatttaaaagaaaaaaaatttaaattaaataatttgtttttttctattctactgttcaaaaaaaggaaaaaattaaaattttttttagcaaaataatgtgaaaattcgaaagtaagtgttaagaaattaatgttgaacgttagtggttcaagcattttaatttgagtagagccgctga

SEQ ID NO: 8622 - DNA, 2718 bp, Heterodera glycines
agagatatttagagaaagagagaaaaagatggaattgagagaaaggaagataagaagagattatttgagaagagaattcgaatacagcggggggggggggaagagggggttttttgccgatgttgttgggtcatcgaaagactacgcaggtggatgaagaaaagaaaaaggggaggggggtcagcgaatgttctgcagccttccatccatcgattctgctcaccattctttgttcgttcttccgtcctcattttcttcaaattgcgttcctcccaaatttttgctgttcgccttttttctgctcttccgcgcttttccttcgcttttcctccgcttttcctcttccttttcggcgtttgttcagcaatggtttgttgttttcgctggttgttgttgatgatggtcgttcattttcctcttttagttgttgtggtcgtcgtcatgtgtctcgaagctggcgtttgcattgacattggcattggcactcgccattttgatgggcggttgtgcggaagttctgattgcggatgatgttgttgtaggtgggtcgaaaaattgggaagacgagaaaattgagaatggttttcgagaatgaatggaagagagagagaaatacggagatggagagagagatgggagggcgagtgaaagagagagagaatgagtgcgagagggggtcaacaaagggcgaacaatggcaagcaattattgatgagtaattagacggtcaattacaaagaaaagatatttaaatattttgaaaatgtgtcgagatttcgcttaaggcaattttgtattttgtgtttttttttgattgccttaggctttctacataaaagaatgagaggggcccggtcctccccactgcgcctcttcgtcctcctttccttcatctttctctcgcgcttctccgtgcgggaacagttcgtcggcgagctctgaaagcgcgtccgcggcctggagcagtgacttgcggattttgtagatagcttcctccgcgcgttccagtggcatccctttccgaaacggcgcgtatgtcttcctcacggggctcctctccgcgctgcgtgtcgtaaactgcggcactggcgctggagtcggtcttcttttaagcatttcgcgatttaatccctcgggtggaatacagggacggtcatttactgtcccgacggccgatttgagcatgtttgtgaacaagcgcttcccgctcattcccaagttcctttctctgtcccctctttcttctcttcctcttagtttcgacgctgagtccaattcgctttggcactcaaagcgcgccacggcgctggaatagaaaggcctgcgctctcttggcggctccggggggttctcaaagcgctccttctcctttcccaactcctttgcctcttcttctcccatttcttctctgggtttccctgccagttttgccgtcaattcctcaattttgtttcggatttgcctttgcttggcctcctcttcgaggcccctgttgttttgctcccacagcattttcagctcccatagctattttcgatcagccattacagcaattgaccatttttgatcaagttgtgatgatctggtccaaaatgccgttatgtcatcccttttgtaaagagagcgggctgcatcttccggcatctgacgtgctaatgcctttgcgatggaaagtgcattatttcgttcgtgacagtcgctcatccatttctctcgcgcattttggatttttgtccgatgtgtcttccatcccaaataattaagacgagaattttcgtggtcaagattttcttccttccaaagtttttccgactcttcgtcatccgggatttccctttttgtaacgacagtggtgggactttcttcatttggttcatttgggagaacaaatggagttggtgtcacttttatcgtcggagaaataaaatgccttcctcatcagcttcttcggccaatcctctaagctcatcaagaatggaatgatacgacgcagtggtcggagcggtgtcatccgcactctttgtggtgtgaggagagacggtgtttggtgtagccgtggtaaagattaatttagttggcgtttgaatagtggttgtcgggattgtcgttgttggtttgattataatagggctatgaatggttgaagtcgggcggattgttgtaggaatattagtagtagtaattggtcgaattgtcggtggaatatgagtagtagcaatcgggcgggttgtgggtggagtgtgtgtagtagctatagggcgaatagacggcggaatattagtcgtagcgattgggcgaatcgtcggaggaatattagtgatagcgattgggcgaatcgtcggaggaatattagtcgtagtaattgggcgaatcgtcagaggaatattagtagtagcgattgggcgaatcgtcgaaggaatattagtcatagtaattgggcgaatcgtcgaaggaatattagtcgtaataattgggcgaatcgtcggaggaatattagtggtagcgattgggcgggttgtcggtggagtatgagtggcgattgtgggaattgtcgatggaatacgcgttgtagagacgggacgaattgtcggtggaatattagtggtagtaatagttggacgggttgtcgtggcgatttcagcaatttgacctcttccaaattcggccttcttgttggttcaattctcagcacatttggttttctttgtccaggtttta

SEQ ID NO: 8623 - DNA, 2168 bp, Heterodera glycines
aggttcggcaaattccaaattttgttcaagttcgggttggtcaacttgaccttcgagaaaatggtcaatccgctcgggattttcttggcaatttttcggacacagtttggtggtaaatgtttaaatttttgacaatcgaaaaaatcaattttaaaattttgtatcccttttctgattggacttatggacttattatttaatcaccggtttgttttaaatatttatcacaaaataaatcacaatttgtcaacaatggatcacagatcacaaaaaattatcactgttgtccgtctgcggaagtggttgctcccgaattgtccacttcttttgtgcctgtcggcaaaccaaatgttttgcggatgaatgtggccgttcgctcttgcgcagttaggaaccgtctttgatgcagaaggttattctgaagtttctgtgcgcagatgacggtcttgtcgcgggcggcccgagtggcgtaggtagtcgattggactgttttgagtaattcctcgaggattttcctgttaaaatcctcggcacgaatcgcttttgcgaccgattctaagatattattggtttggagttcgaccgatctaacccttctttcttcttgctttttgcactctttgaccgcgttcgaccaaatttctgaccgctcgtcctcgagcgtagtcagtttcttcaaaaaaccgttgtcaatttcgggggagaaattgctgtgaaaattcggttggtccggggtgttctcacggattgagttgaattttttgactgcgtttgttgtttggatgaggtcggcgttttggttggtttttacggtttgttcaacacagtcaattgcttttttcagttgtttggtttggactttgatttcggatgctttcagttttgccagtaatttttgggtctcaggcgagagggtgaccgggtcggatttttcagaggtgggggtggacccaaggaattggacttcggtttgctccgaaggcgaatgagtgcgaatgactaaaaaatggatatcggtacgatcagaaatctttgatcacttttcttcggtggtgtcttttccttcttttcttcttcttcaacttcgtttgggtttgtcggtgcacgagatgccgatcgggttgttcttttcactgaatgggatgggtattgattgatttgtaataggattttgggtgtgtttgtcggtttttgttcgagaaaaatgactgttttgtgtgtgttttggtaggttagggttttatccctttaaaaattttgaattttttgagtgtggggattggttaccctttatagcaaaaatttttaaagttttctcacttttgaagttgggctgcggcacgaagagttttcgctgtttcagtagtttgacgatttgttgtcgaatgccggatcgttgttgtgcgcagggcgttccgggtcgtcgtgcaccactttgtcctttccgcaatcggtgatggacaaatgggggggacgggatgaagagcgcgagtcggggagtcggtcggagattgagcggccggtactgaatgggtgtttgttggctggcaacggcccggatttggcgagagctggggcgattgggggtggacgcttgacggtcaatcggggatggtggaattgctgggggtcaagtgaggcgggaaagcgattcaaaatgcactttattggaatcctcaaacttgggtaattaaaccgaagggggaaatgggggaacggcacaaaatggggggaaaatgggggacggcacagaaatggggacggcacaatggggggaaaatgggggacggcacaaaaatggggacggcacaaaaatggggacggcacaaaaatggggacgtcacaaaaatggggacggcacaaaatgaggacggcacaaaatggggacggcacaatttggggacggaacgggagtggtcggctcggcacacgtcaacggcacgggacgggcggaattgagcgggcggtgtgttaaggcggtagttgggcacggcagggcacggatcggcatggcacagaacagtcggcgcacgaacggacagggccaagagtcgacggcacgaacgggcgggcggcgcagttgtcggcggctgttgtcggcacggggggaagggaaaaaagggggggaagggaagaggagggaatgcccctcggaaaccgttggtgta

SEQ ID NO: 8624 - DNA, 1781 bp, Heterodera glycines
cttgggtattaaaccgaagggggaaatgggggaacggcacaaaatggggggaaaatgggggacggcacagaaatggggacggcacaatggggggaaaatgggggacggcacaaaaatggggacggcacaaaaatggggacggcacaaaatgagaacggcacaaaatggggacggcacaatttggggacggaacgggagtggtcggctcggcacacgtcaacggcacgggacgggcggaattgagcgggcggtgtgttaaggcggtagttgggcacggcagggcacggatcggcatggcacagaacagtcggcgcacgaacggacagggccaagagtcgacggcacgaacgggcgggcggcgcagttgtcggcggctgttgtcggcacggggggaagggaaaaaagggggggaagggaagaggagggaatgcccctcggaaaccgttggtgtactgatttgtggggggtttgggccctccttttataccggcagttcctgcttgaacgattgtttgccaacttggcatgtccaaatttctgtccctaacatttgccaatttttctaacctttttcattttccagtttgtgccactttagccttttctaattttctaacattttactatttctttaatatcattcacaatttgtcccattttaatatttgtttaaaatctgttatttcttttaacgttcaaattattcataattaaagtttaacatttgacaatttttctaatggaaaaattgtgactaaaaatgactaatgatttttctttctttcaattcattcatttcgttcacatttaattaattaatgtttagctgtttaatttaaaattaatttaaatgttttttgtttttaatgtttttattttttaaattaaaaatcctatttcgcgtattcgcgacaaatataaacaggagaatttggtgagaatttaatcgcttcattacaatttgaaaaccgagcgaatcattccaaaaaattcgtaattgttgctcacctgataggaattaaattgccttgcatagaatttttcacttccaaatataaacaggagaatttggtgagaatttaatcgcttcattacaatttgtacaccgagcgaatcattccaaaaaattcgtaattgttgctcacctgataggaattaaattgccttgaatagaatttttcacttccaaatataaacaggagaatttggtgagaatttaatcgcttcattacaatttgaaaaccgagcgaatcattccaaaaaattcgtaattgttgctcacctgataggaattaaattgccttgaatagaatttttcacttccaaatataaacaggagaatttggtgagaatttaatcccttcattacaatttgtacaccgagcgaatcattccaaaaaattcgtaattgttgctcacctgataggaattaaatggccttgaatagaattttttcacttccaaatatgaacaggagaatttggtgagaattcaatcccttcattacaatttgaaaaccgagcgaatcaatgcaaaaaaaatcgtaattgttgctcacctgataggaattaaattgccttgaatagaattttttcacttccaaatatgaacaggagaatttggtgagaattcaatcccttcattacaatttgtacaccgagcgaatcattccaaaaaattcgtaattgttgctcacctgataggaattaaatggccttgaatagaattttttcacttccaaatatgaacaggagaatttggtgagaattcaatcccttcat

SEQ ID NO: 8625 - DNA, 3001 bp, Heterodera glycines
  unsure (1)..(3001): unsure at all n locations
tcactggtttctatancaggagaaaacatgagaaaaagcttgttgatgatgttgtttttggtggagtgaaaccgcgcttttgtgggcttttatgtttcatttttacactatttcaaagggaaacaaaacgccataaaccgtctaaaagtgcaatattttaaatccattcatcgcgtggaattttaaaattttattgagcagtaggaggtaaattgattcgaactcaattcagaaaaaacatgagattttgaaattagaaaccgtggaaattttttaaaaataaaataaaatttttcggtgtcaaaccaacacaacagcttaaacgttcaaataaataaattaaattccttggaaaatccaaaaataaaaatccatggtccaagggattttggcgtttccgtttcaataaatgttacgtgaaaagaagaaaaaaacaaacagcagatgtgtgcatatgtagaaataatctgtgttggcgcttaagaggactaatagttgtacatataattaattaattatacattttgttgccccaggcaatgttttttgttgttgtgattaaaagggcctgaggggggaagaggaaacagcacataaaacaagcaacattaagcataagcaagtagcactatgtgcacatgaaggaaggctaaacacaaaaacattgttgttggaccaaaaaattcaggataatatggaaacaaaatgggcccccggggggagtccaagtgttgttggtggtccccccactccttaatgaggaaaggagttgaagcccctcgaggtcccacttttagggggagggtaaaaattatattttaaaatgagaaatttatttcaaagttgtggagcaaaaataattaaatggaagaatgtataaaacattatctatctttgtaatttattaatgagaggagttgaagcccctcgaggtcccacttttttagaggggagggtaaaaaaatattaaaaaaaaaagaaaatattttatcgttggttatctttggtaatttaattcaaaaaaaaagatgaaagattaaaaaaattttttttaaaaaagcctattaaaaaatacgtataaaaatgtctctccggcctcccaaagggttggaaagaatgaatttttatttttttcactgactctccgattgacattccggacccttccttgtccatccccgaaaaaaatatttatttttttggacagaagggctttaattgggaggaaataaccagaagaaccccacggggtcaatcaaccacatctgccgtttatcattttgcttatgccttttttttgcttgttttgttttgaagagtgccgtggggggtggacacttcggggcggagaaattaaggggtgaggctcccaaatttgtttttgacgaattttggcggcgatgggcaaatggcccaccccaaaaaatggataattggataaattatggggctacatacatatgctcagaatttggtgatgaatatggtcagcattttaatggggaagagggaataaagccgggagtggacagaatttttatccaaggaattcataaagcaaaatactggtttctcatcaagggcatttttgaaataatgatatattgcataaatttttattaaaattcatttaaaaaaatatttaaatataataattagggcaataagcaaaatagaagaacaggcttcatactcaaaagataaatctctcaagaaattgtctacgaaatttctgcaaaaactcaatgtctcaaaaattgaaaaaaaaaattggaagaataagcaaaaagagttggggctgtgtggcagatgcagcagcttttagaaaaagataattggctttatttattggccgcaatttcggcttaggaaaaacaggaatttggggggagaaatgagaggaagtggaggaggaaggttgaaatcaggcgccgattttgccatttcatctgcatataatcccacaaaatcttttttcatgggaaacaaaaatgaatttgaaggggttcggcatcatcaaaatcagtgccaaaattgaaaaatcgaattttaatggacccaaattaaaagccaacaaaatatgacataaaaactcgaaaattggctaaaaaatttccaactttttttttctttggaataaatagtcaccattcacacaaagattgttatcatttctccactttttttcagcaaaacatttattctttcccgtgaataatcgtgtggttcagtgaacacaaaaataatgggcaaagggcggggggaattgaaaaaaaaaatcggtgatgaatcggagggttggggggggggcgatgagatgggttggacgaacgacggaatgattgttgtgaaacaatccaccaaaatgttttttttgggggggggagaaagatgactaaaatgatagaatagatgggaaaatgaattcacaaacagtcaagaaatatacgtaccgtctttcctaatatagagaccccggggatatgtgtggcatacaccctcagaggatgggtatatttcgacggcttttcttgtatatgttttgcagccctgtttattatattgtaaaattttaaaaagttttgttaaatttaaaaaaaaaattagtttttgatctgagaaattcaaaaaccaacccttttttgaacatttttcgtcataactttctttaaacttaatgaattttttgagtaacaacccggcaccaaatgaagaagctgggctggctggttaaaatgcagaaagcggggattaataaaattcataaaagggttttaggacattcgacggttcaggcaaaaaatccgtgctttttaacacaaaaattttcatccctaatccatatttaaaatcactaggggcgtagaattatatggatataaaatcccaaaatctggccataaaaaattgacaataaaccaccgaaaatatggacatataaatgcgaaaatctctaaatatggacataaaatggcaaaaatatgggatataatttttccaa

SEQ ID NO: 8626 - DNA, 1710 bp, Heterodera glycines
atcggagggttgggggggggggcgatgagatgggttggacgaacgacggaatgattgttgtgaaacaatccaccaaaatgttttttttgggggggggagaaagatgactaaaatgctagaataaatgggaaaatgaatttaaaaacagtcaaaaaatatacataccgtctttcctaaaatagagcccccggggctttgtttgtcaaccaccctcaaaaggagggctttatttcaaagggggtctttttttttggggggggggctttattttaagaaatacgttatatataaatgcggtgaagccattataaattttgttagaaaaatttttgtttcactaattagtggtgttcagagtcaagaatcaatttctggcagccatttcagaaactttttcttcgaggttgtgaaaaaattttctagagaaagtgagtaatccattggaacgagcacaaaattctctaacgaattatgtttattcattttttagttgtccaattttgacactctctaactcagcggcgataagtcggataaatcgttgacccaccattcaaaaggcaattacgtagaaaatttgtgtttttgcaatgggattactcattttctctagaaaaaattatctatcccaaagattttttctcgaaaattttcgcgatttacgaattatttgaggttatatgtattattttcacttttttactcaaaatatcctcacttcattgaccaccatcactaatttttgaatgaacattttgaaaataaattcatttggattcgttatttaaatattaattttaaaatacaaatcagttaaataaattattaatataaattaacaattaaaaccagtgtcaaaacattcataataagcacgacgatatttgtcagggaggatgacggtgttccagccttttctttttaaaatgaagttcatggcaagtgcatccgtttccatccaaaaagggtgaattttggcctaaattcatttcttgcattgttatttgagagagttatttttattaaagtaaaataaacgaaaaattacaaagcattgactaaaaacacgaatattagaaagtgggtccttttatgaaacaaaattaattaaggtatattaaattgtttagttaaaaccgaaaaattaaaacttttagcgaatttgtcaaattaatataaccaggaaatcattttcgttactatcagaaaattttagaattttaacttacaaatgtgggctgtttttatcattgttataccattttatagtgagcagtggccgcaaaagtggcaacgtcatttgtttgggcgtcttcagcattgagccattccacaaattccgccattttcccaggcacttgcgcagcagttgcttccaccttctgtccgcccacagacacttcgaccaatctgtattgccccggcgtggattccttctcccccgacatcacattggcatggagaactttgatggtttcaaaattacaccgattagaacaatgacgagaagcggatttaataattattttttaaagacaaatcatacatttactaccatcaaaggatcacggaaaatgcattagagttctgtgcagtgaatatttttttaatcattttaatttttgaaatgttcaaaaaataacacattttccaaaatctattaaaaacaaacataacatgaatggattattgtaagtttatgaccattta

SEQ ID NO: 8627 - DNA, 1439 bp, Heterodera glycines
ttttactcaacaattcatcgcatacaaccatcaaaacaatttaattcttggaaagttttatccccttttcttttgcagcagaaatattctacttgttcagaaattatttttgggtccatcccttcggtgtccaagatgtacaagaagtccttgtcatcatcaaacgacgcggacacatcgcgatcgcgccgcatgccgccggcggtgttccgtcccgcttctctgcctctttgtatgtccactgctttttgatggtcctcgggggtgtcaaaatagtcctctgggggcgttggtgcatcttcgctgctctcctcttgtggcatttgtgaatcgtcgctgctcattttgtcggaaattcttcaaaaaattcttaattttggatacttagatgattcggatcaaatattgacaaatctagaacattatcattttttggcacaacatgtacatatttggcgtttttagcacataaacccgggccctatttatggagagaaaaagaaagacatggaacaaaataagaaaattgatattttatgtcaaaattccaaccgtttcatccaaaatttagtcaaaaaagtcgaagattcaaaattatcacctttgttcttaaattgaccaaaaagttaatttagccaaaaaccattggaacatcaaaaaatggtattctgtacaagtacgaacataaaaatgaattttgaaaattttaaattttcggtttttttcgaattcgggtccaggattcggaattgaccaaaatttttgacgctatatactactttcagaacaaattagaaaaaatcagtactttttttcacactcaccaaaaattcatatttaagcacatttattcctcactaatcatcattagaaagccttaaatattttataatatcatgcaaaattttaaaaaaaatttttattttcaagaaagttatgacgaaaaacgttttaaaaattgttattttttttagtttctcaggctataacttctttgaaacttaacagatttttctgaaattttgcaggatattagaaaaaatttagggctatttaaagatattaaatttttaaatttgattgcttttggacgaagttgtgaaaaaattttctgttcaaaaattgtcatttgatggtttttcgggtaacgcgacctggcaccatcactctttcttctagcaattcgtctgatttggcctctgacagttctttcggctaatattttcgaattttatttttataaaatgcgaaaataaatttacataaaagatatttaaaaaaagtttttgcactttattttaaaaataaatttttgataatgtaaattaatttcatcataaattccacttaaagatgcagctaaatcattcaattaaaaaatacttttaattgaataagcaagcacctacgcaattagcattcgccagttagaaataaat

SEQ ID NO: 8628 - DNA, 857 bp, Heterodera glycines
ctcttttctctctccctctctcttctctttcttcctcccttcctctccctctcttctctttctttctctctcacttttctctttctttctttctttctctctctccctttctttacatctctttctctccctctttcctcttccattttctctttcttctctttgctcttctcttttatctctctctctctcttttctatctctattattttctctctctttctctctctctctttcctcttctctttaggtaaatgcgcatttagtgaaaaatgaagttccaatctttttttttttggagtttttagagagtttgaaattagtcgaaatagatgccgtgttaataatcaataaccaaaaaaaccatataatggtgtgttttttgctttcaagcaaaaaaaaacatgaaaattatttatgggcctaaactacataaaaccaaaatttttttaatgaaaatgatagattaataatataccaattgtttttgaaatgcttacttcttccgcgatttctccaatcttttatttaattatagttaagccgtataaagttaacaacaaaataccgacatttatgtcgaaaaaaaaacaaagaagcataattatttttactcattatctgtaaaatttattaaaattggttggaaataataataaataaaaaatttaataatgtctttcatacaaaaaatagatttacaaaaaaaagtggtattttatttcgaaagattaaggaaaataatggaaagaaaaatgtgtttacgctaaccatattagagaaatagagaaataacgaaattttgttttgttagttacagaatcaagtgaacatttattaaaagaaaagacaatgaa

SEQ ID NO: 8629 - DNA, 2518 bp, Heterodera glycines
atgagcagatcattcgccgcgctcagcctgttgtcctcgtgtcggttgttcatcacgtcagaaaggaatgatttaaccaactaaatttttgatgaaatttctcactcaccatcgtcgagaccgaagccaccggcgccttttgatgtcgatggtgtcgtcatcagctcacaacgtgccgtggatgttgacggcattggttcggcttgttggtcgtcgtcggcaggagttgaagggtatgacacatcaatttccaacatctccaccgacggcacgtccatttcctgcggtgtcatcggtgttggatttgatggtggtcgtccgtcgttgtcccgcgccggtgcctctgatgtcgacggctcttcttcggatggttgtggcgtttttgcatgtgttcggctggggagcggctaaaaatttggaaaattaggattttatgaaaaatgaatggaaaaactcacttttcttggcccatcggccttatctcgcctttccgccttctctcgtctctcctcccatttcgtccaacgcttttgggccccgccccttttttgctttgtagcttgtttattacattttttttgccataaaatctaataaaaatgaaataattatttattataaatttataacttttgatttggactatagacaaaaacgaattcactatagacagatgcagaatttttttttctctatcaatgtgcaaaatttaaagaaattctgttaatgtaaaaaaaagtttcttagagcgaaataaattttttttttcacataattaaattgaagagatagtacgccaaagtgagagaaattacaaagaaaaagagtaacgtcgagatagtactaggcttttctctgcacagtggagttgacccatagtgaagataccacttaagcgatttttggaaatttgtacaattttaactattaaaaagataaccaaaatgccacataaaatatccaaaattgcatttttttcttgaaaatctcttaaaatgaatgtaaaatctacaaaacttcgccaccggccccaaaaaggtcgttgcattgctggtgtacggacatttcgcctactggacatctcgcctactgacatttcgcctactcgacattttgcctactaacccaaaatcggacgtttcgcctactaatccaaaatatgacatttcgcctactgacatttcgcctaccaacccaaaatcggatgtttcgcctaatgccttaaaagagacatttccatgaagaatttctttctaaaatagatttatatttagcttatatttataaaagtacaccgaagcaaagaaattttataaaattcaaacgaaatatagaaagttaaaaatattaaattcataattcaatttgcatcggcatcatccatttcttcttcatcactctcttcatttccacggatgtgaagtccctcaacaaatccctgcattatgagtccgagcagatgcaaaatgttggccaatccttcagattcaaagtcggcctcgtcaaggatccgcaccacattttgttctttgataatgtaccgttgcggtcgttttctacttttctggagctgttctgcgcgtccgatgtccagttaattgtcgatgtctttgatgaacgcagcaatgaagtcactcaatgatggattctttgttctataattgatgtgtactatgtatctttatttatttgaatttttcaacctattcgtcattcgatcgagcgcttcgtttgtgccgagtaattcaaaggtttcatcgtcgacacccgtcctaatttgtgcgcgcagcctgttgttctgcgtttgtcctctcaacattaattacgctgtcttcgtttgctggcatccgaggccttttggttggcttttgcagactctcgagtatttcgcgaacagttggcatcttattaaaaattttttttgttggtttgggctgaaaagggaactttgaataaattacagaaaaatagaaatgaaacaaattatatgtttgatgcaaaaacaacgcattttatactctatcacactatttttcttttctctttagcatttttccagtaggcaaaaattcataggcaaaacgtcagattttggcttagtaggcaaaacgtccgattttaggtgagtaggcaaaacgtccgattttaggtgagtaggcaaaatgtcgagtaggcgaaatgtcagtaggtcagatgtcgagtaggcgaaatgtcagtaggcgaaatgtcagattttgacttagtaggcgaaacgtccgattttgccttagtaggcaaaatgtccagtaggcgaaatgtcatcgtgcctgcattgcttggcctattcccaagctaaaatagaagtttaccatttttaaaaattttataataaaggtgcacaaagtttgaaaacgtcccggtcccggcggggtcccggcccaaaaactgggaccggaaatcccggaaaaacgggagtcccggtcccgggatcccgtcacggttcattttccaagtccaggtccaggcaatttcaaaattc

SEQ ID NO: 8630 - DNA, 2417 bp, Heterodera glycines
tggaaatggcccagccaatgcccttggaaatggcatcatcggtgcccgtggtaatggttggatgcccgttgaaatggcacatgacaatgttacaataattaaaatatcagccaacaccaaccaaaatcgtccagccaatgcccttggaaatggcccagtcgatgctgtcgaaaatgagcctgccgatgccgttgattatggcccagtcgatgccgttggaaatggcccagtcgatgcagttgaaaatgagcctgccgatgccgttggacatggcccagtcgatgccgctgtgctgaaaatacgacgaaaacgtgtcccggcattactattggccgccgtaccgctggcaaaaaaatttgctgttgctcttttggttgctgctggaaaagaaattgggaaaaatcttttttcgggaagtaaaatcaaagacaatccagctgctgatggatatagtgattcgaaacaattttatgtttcggaagaatgcaagagggattttaattgcacctttttcgcttgccacccacatcctgatgcggaaggcgacagtttctgtcgcaagggcttcacgcgcaaatgttgccaagtatttaatttaaatttttaccaaatggaattagtaggtgaaccaatgaaattttgtatctttttgacaaaacgaatggatctattaaaagtccatgaattttatctgcctaaacaccaatcactggacactgtttgtcggcactatttttaggttgtgtagtataagcaaaagtaccatttttacaccagacgatctaattatttaatacataaatttgaattaattaacttcattttaggaatacaatgatggagaaaaggtaattgttcgaggaagattataatgcgagattttaatggctaaaaaaccatcaaaaagggcgttataaaaaagtaaaagtgaaaattctcaaaaaacaacccataattttgctcaaacccaactaaaatttaattcttgatatcatttatagccaaaaaaagttcactattagcctgcgaaatttcaaaattggaaaagagcttctggactagtcagctgacggcaactcagccgaagacaactcagaatgatgacaattcggcttatggacaactcagccgtacaataaaaaattacaaaataaagcctaagcctaggccttgccaagccattgtacgagttgcgtttcaaaattctcgtaaagctgagctgtccatgagtcgaattgtcgcatcagctgagttatctgtcagctgaattgtcctaggctgagtttttatttacaagctagtagaaaactcttagggctattgaatgatatcaagaattaaaatgtttgtattgagctaatttattgtagtttttgttgaaaattttcatttgatggcttttataacggcccagtgccctaatgattgattatctattaactttgataatgataaaactcactcatttttagaaattggacgaaaaactagtttgttttaattaattatgaactaaatgaacatttgaaatatcttttaaggaaaaatgtttttataattttccgatatgcggagaaagtggatgcgttagtgacagaaaatactataccattaaaagcaaaggcggaaaagttgagattatatctcatgcaaaaccaccgcctgaatgcgcttttgatgcggtattacttttttatgcaataaaaatgatgctaaatcatttgaagcaagcgtcgatggttggggtgaaatactattatccatatgactacggagagggtgttcagggggtaatctaccagcatatagtagtattctagtattcaaataataaattttcttgaaagatcgtcaaaacttacgtatttatgtacgacgatgacaaaggatgtaaagagtgtgggtggcgcatttgcttcaagaaaataaatgttattgaagaatttgtgtgtacctgttgtgatcaggcatctttttctgggtgccagtgggtatgtatttttatttgaatctcagagtgaagaactcaaacattggaaaagcatagattttttttttaaataactgcattttttgtttttattacctttttgagtaatttttcccaaagataattaaacaaataaaattcacaaatgataaaaactcaaaaaaatgaattttattttgttttaaaatcacaaatcaaacacttgagttatgaactacaaatataaagcccactcataaatgagttttatgcaaatttacaagaattacaaaattaaaattgctttttgggggtttcccaaaaaaaatatttgatatttttttatattatttttcgtttatttagcaatggactgatatctgccattaccaaccggacaccgaatctgacagtgacactctcaaatgcccaggtgcaatggaaaatc

SEQ ID NO: 8631 - DNA, 2813 bp, Heterodera glycines
  unsure (1)..(2813): unsure at all n locations
ttttaaaccgagtccaggtcctgaaaaatccaaaaaaaatctttaaaattttttcatgaaaataaaataaaattttcatgaaatatatttattttacaaacaaactttattttttgtttttaactcgctttttttgtggcgctgttttacattggggcgggtgcggggtccggcggtgccgataggcgccgccggaaaaaaaaatttgaaattttgagtgagatttgttaacagaatttgtcaaaaaatgatctttcaattgaaaaattgaaaaataatttaaagaaattataaaaaaaattctgtaccgttggggaattgaacccaagagaaaaataatgaaaggaagaaggtttagccaccagaccatatttgaattgaacctatccaaaaatagagaagacattaaggaaggagaaaaagagatttatgatttttttcgcgtaaatttgaaaatttttctgattgctcaaaagttcaatctttaggggtgtattttcaactctcgcctctcgtcccaaaaaacgagagacgagaggcgagagtaccaaaaatggcgagagttggcgagagacgagaggcgagagtaccaaaaatggcgagagttggcgagaggcgagagacgagaggcgagagttgtcccacccctgatagggagtatgggtttgtcccccccccccccattttttgaaaaaaatattgtttgttttcaaatcatgaaaatatattataaagggttttcgaggttgctgatcactaattcggcatcctttcaaccaattccgagccccggacccgaattcgaacaaaagtcgaaaattcaaaattttcgattttcatgtgtttggtttcaaacttgggacaaaccctactatttattacccaaaaattcttaaattcttcattcagctcattcatattccatccgcatttatttgatatctttttttcagttcacttctttttaaattctgtttgattaccaattcaaacaaaaaaaaatgtcggacaatccgaagaaagcaaataaagaaatggagaaagcgatgtaaatacctctctaaatttgaattttccatgctaataattttgcttttccattttcagcttcatctctgccgactgttggctgaaggttttcgatttgctgccacctgttcaacttggtcttggaattgctatgattaaccgccgatttgactattacgtcgacgaacattttaaaacgcgcaaatggacattggacaaaatggaaattcgaagcaaaattggacagaatggcacaaaggaaatggaaattgtcaacaatttcaatggaaaagaattgccaatccctcattatccgttgccgaacaaagtcatcggattcggaagcatttttatcctgtaaaaaaaaaatgaatttttgtaatgatttgtgccaatcacaatttcatttaattttcagcttcatcgaccaaaatgtgctcacttttcttcgccgttttcaccgttttttctccgtttgtgcaacaaaattgtacattctcactgagaatgttcgtattttggagttccttctgctcagaatttggccaatgttcaaggacaccattcattggatgtgtttgaaccccatcgcttttcgtctaatccgtcaattggccccctcattgctcaacgattatccatcccttcgttttgtcaatttctttgacggcatttccctcgaatttccgcccgatgatagtgccaatgcgtcggatggccaagcggtggccaaatggctgttcacgcctcgtcccgacaatttgatgatgatctcattgtcagcattcaggattcagcgatggaacagcaatggttggcaaccatggaacatatcaaagcggtgattaattgatttttccaatttaattccttttttccttctttttcttgtctttttttaggctttttccgctgcttcttctcctggtgcatttcgcatttctgtttacttttcgctgccctcttcactttcttccgttgtgccatttgaattgaccaacgaattcaccggggaaaatttgaaattgtccaaagaagaggaagaagaagatataagtggcttttccctcattcgttgtccaattgggcccgatgataagagacagcagcaaatgaataaggaatttagtaaacgaaaccgaattgacatttttattggagacgacggagtcgacgatgggtaattaatacgattaacaattttaaaaatccaaatgcttatttttgtttttcttttcagtcttctcgacggttcgcccgggccgagtgatgatcactgatcagaacagcggaaatgaattgattgattggttattgatgcgattatgtgacccaatgttggcctttgctatttaaatattgttgtatttgattgttgctcataaattcataaaaaaacgagttaggcttaaccaatattttgtaacgtaaaaacgcaaaggaaatgactgtgctaacttataacactgggatggatggattaattggtccaaagctgaagaaatagcatcagatttgttgacaccccaaaaatggaaaaattattaattttcgcatggaaaccccatggcctcgcattttgaggagacttagattttgttgtgattacctatgtgatcgaaatgttggttctcagccatttaattgttgttgtatttgatttttgcttacaaatccataaaacgaattaagcttaaaataagtttttaccacaaaattanaaattgctgttttctgctttactcatcccatttttgtcattccacaaattaaatcaaatataa

SEQ ID NO: 8632 - DNA, 2778 bp, Heterodera glycines
atcaggtctttgggagtattgtctaattaccagcacacaaattgtcgcataatccgactgaagcggagagagaaatggaaaaagcgatgtaataatcgaaatttgatttttattttcatggtaatcattttgcttttccgatttcagcttcatctctgctgattgttggcttgaggtgttcgttttgcttccacgctctcagcttggctttggaattgcgatgatttcccaccgatttgactattttgttgacgaacactttaaaacgcgcaaatggaaattgagaccaattgtaattcaacacaaaattggacagaatggcgcaaaggaaatggaaattgtcaattacgatggaaacgaattgccaatcccacaaattccattgccgaaaaaagtcatcggattcggaagcatttcgatcgggtaaaaatgaatttgtaaatgttttgtaccaatcactctttcttatgttttcagctccatcgaccaaaatgtgatcacttttcttggccattttgaccgctttttcgccacttgtgcaacaacattgtctatcgatactgaaaatattcgtattttggagttccttctgctcagcatttggccaatgttcaaggataccatttatcagctgagtttggacatcatcgcttttcgtcgaatgcgccaattggccccgtcaatgctcaacgactgtccatcacttcgctttttcaatttaagcaacggcatttccctcgaatttccgcccgacgacagtgccaatgcgacggatggccaaacggttgccaaatggctgttcacgcctcgtcacgacaatttgatgaacaatctcacaatctacattgagaactcagcgatggagcagcaatggtcggcaaccgtggaacaaatcaaagcggtgattatttgattattcactttttaaaatatttcttggtatttttagtcattttcctctgcttcttctcctgtttctttcggcatttctgttttaattccgccgtcctcttcaattgattccattgtgccatttgaattgaccaacgaattcaccggagaaaaattggcactgtccaaagaagatgaagaagcagatttaagtggtttttccctcattcgttgtccaattgtgtccgatgataagagacagcagcagatgattattgaattgggcgaccgatggaaccaaattaacatttttatcggagacgacggagtcggcgatgggtgattaacaattttaaaaatccaaatgcttatttttgtttttcttttcagtcttctcgacggttcgcccgggccgagtgatgatcactgatcagaacagcggaaatgaattgattgattggttattgatgcgattattatatgacccaaatgttgggcaaagatatttaaatattgttgtatttgattgttgctcataaattcataaaaaaacgagttaggcttaaccaatattttgtaacgtaaaaacgcaaaggaaatgactgtgctaacttataacactgggatggatggattaattggtccaaagctgaagaaatagcatcagatttgttgacaccccaaaaatagcaaaaattattaattttcgcatggaaaccccagggcctcgcattttgaggagacttagattttgttgtgattacctatgtgatcgaaatgttggttctcagccatttaattgttgttgtatttgatttttgcttacaaatccataaaacgaattaagcttaaaattaagttttttaccacaaaattaaaaattgctgttttctgcttactcaatccaatttttgtcattccacaaattaaatcaaatataaattgttcaaattggcacacgaattttcgcggtctttccacttaagtgccgccgtttcgccaataagcaattccatcggggaaaagctcagcggaatcgctgaattcagcccagtgagaccggtgagaagtgtcagcgatgtgagacgaagcaaattgtccaactgatcgcaatagtcaaatcgcaaacggtgaatgttttttgtaaaatgggccaaatttgacgggcaaaaacatcccaaaggggctggacatccttcgttttgaatgccacacattcaaatgcaaaagggtttttccggatttagtaatactcaccgggtcataccatcggaaatgttatccaatatgaaaagcaaaacttatttgctcggatgttcataaagcacatccttcgttcttttcgtgtaccagagtatataaagctgacaaaatccccttccagtcatattcttcattcagcccattaattccatccccatttatttgatccttttttcagttcagttctttgggaatattgtctaattaccagcaaaaaaatgtcgcataatccgaaagaagcggagagagaaatggaaaaagcgatgtaataatctaaatttgatttttattttcatggtaatcattttgcttttccgttttcagcttcatctctgctgattgttggcttgaggtgtttgttttgcttccacgctctcagcttggctttggaattgcgatgatcagtcaccgatttgactatttcgttgatgaacatttcaaagcgcgcaaatggacaatgggaccaattgtaattcaacgcaaaattggacagaatggagcaaaggaaatggaaattgtcaacaatttcaatggaaaagaattgccaatcccacaaattccattgccgaaaaaagtcatcggattcggaagcattacgatcgagtaaaaatgatttgtaaatgt

SEQ ID NO: 8633 - DNA, 937 bp, Heterodera glycines
  unsure (1)..(937): unsure at all n locations
gcaaatcaaaatcctttcaatgcttttttaaaaattttcgaatttagcatttttgataaaaaacggtgtaaattatctcttattngttggtgaaggatggtggctttcattttgtttacatgtatttaaaccggttttgaaccaaaaattctcaattcaaaaatttggactttcgtcttttggtcgaattcgggtccgggattcggaattcagatttgtttctctgacgcattttccgggcacggattttttttctccttttcacaacaatcaaaattttctcgctttcgggccacctattcctttatatatggcattggtaaattaatttgtaattggctgatgaatcgatgcccaattattatggagacggcggcggatcagaaacagcagaagaaagacgaaaatttagaccatttgaacggggtcaacttcattcttcttgaaaatgctttgggtgagcagcaaaaaggaggccttaattttgtaacggacagacagtacagtatatatctgtacaatactttcccagaaaaattctcacaaagggtgaaataggcaccaaatgccataaaaattgcctaaattgcttagaatcacattttagtatttttaaaattaatttttgatatatcatttaaaaaaaattgattttttagggatacattttcacaaaatttctataaattttcaacatatgtaaaaatgaaaatatgtacgaaaaattgcgaaatatgtacgtaaaagtccaaaagatgtataaaaagatgtacatatgtaatacgtatggtatttccgggttatgctgccccccgccccccccccctcaaaaaaattccaaaattcgtaatttggggttttcaaggtcgctgatcacgaatatgatatttattttaacagctgatgacttttaatcatagatttgacaaaatatcta

SEQ ID NO: 8634 - DNA, 2875 bp, Heterodera glycines
tctctatttattggtacacatctcgttttttcggacgtttcctcagtagtttatgactttagttataacctgataaaattttgaaactcataacttttttctgagatgtgtttgctaacaaattagcattcgcttagaaaaagattttccatttcaaaatccttttttagatactaaatttgttcgttttggttgggtaagcgagttatggctgatcaaaataaaaaacagacaatctgcggaggatgaacgaatggtttttgaacgcactcaatcccagctaattgcgaagccattctcattcggtcgcgcaattccccccccccccccaccccctccaatcttcggctcataaatccatttaccacacaagaaacattggccttgaaccaaagaacactctgtccatttgaaaaggaatctctttcttcctctgagagtttgcttcgaataaatataatgaaacaattaattattctgtgcttctcctaactatcaatgcgtctttggctattcgttctctcaataattcttcggctccctccccatttttctcaacacttccgccgtgctcacaaatggctgtgtgacggttgcgtcggcagtcgtcccgcgcaccgcaagcggcggagtgttggcatacaaatcggagaagagcgcttccggaggtaaaactgaaaaaacaacaaaataaggtggaaacaatgaagcgccatgccttcgtctgaaagtgcgactttgaccgcctcgtccacctcctgacgcactttcttgtcaatgtcctgcggggatggaatgaccattgatttgtgtattcattggcttgcaaatgctttcctccccccccccccggccacagctcgtccacctttaattcctcctcagtgacaagtcccgccgtgacaatgcgatctttgaaactggtgatggggtccctgctcttccgcacttcctgtatctcatcccgagtacggtagctgcagaacacacagttacacacattcacagtacgccatttcccttttcattcattcacctcgtcccggggtccgacatggagtggccgtagtaccggtaagtggccaattccatcatcagtgggccattgcccgcgtcacagtactccttggcccagcgagtggcctcgcggacggtcagaacatccatcccatcgacccaaatgccaggcacatagtcactgggaattggagaaacgcaaacatcgtttacaaaaacggaaattaatccatttggccgttcccccatttccccgctttacccccgcgtgtaataatcggtcgaggcggaggcacggtccacgggagtgcccattccgaactgaatttgcaagacattcccaaaatgacgacgacaactcactccgttattctcgcaaacgaaaatgcacggcaatccccacagtttggccatgttcgtcgcttcgaacagctgtccctggttagccgccccatctccgtaaagtgtcaaacagacgtttttctggctgcgatatttcatggcaaaagcaatgcccgccccaatcggaacttgtgcgccgacgattccgtttccaccgaagaagttcttggcgtacatatgcatggatccgcctaaatgaatttttgtcaatttttaccgcctataaaatggctaaaaaccttttccgtaaacattcccagcaatgcgtcctgaaagtgaattgaacttagaaccagtgctactctcgagactgacctgtcagttcggccaaaatgtcctggaccgtcgcgcccatcaaataagtccatccgtgactgaaataaacgaagcgataataaatgatcaattaattattcatgtgagtggttgcagttctctaatcccggccaaccgaccatcggtaagccgtgatcacggcatcattcggatcagtcgctgccaccatcccaacggcacatgcctcctgagccaaattcatgtcatttgttggccaaggacaaaagccaagccaaccaacttgtccggagtaaaggtgacagaagccacggatacgcttttccttgtacaaattgttggccgatgtcttgaagggatgcctttgtccgttgtctcccattttgcattccttttcccccctccctcacctccatccgtcggaccaattgcatttttctgtaataatccaacgcctcatcccgcgtcagtcgcacctccgtcgaaggacccgaatctgtgacaattgaaaatgaacataaaatggaaattaaaaaggaaatgctaccgagtttgaacagtttgtagggacgcgtttggagggtcacttcgttaacagaagaaaagaaccgaaaggcagcggactaaaaggggggaaaagagcgacacgaaaaggccgaacaaaccaacggatgtttggaaaacgaagtcaaaaatatcatagtgttctgctaaacaaatgctaatgaaaaacgaaatgaaatcaaatgaaaaatatccagacgaggaaacaaaggaaaaagtaagccaaacatttgcaaaattttgcgccaatcaaaaaatttgttgttgtaatacgcgtaataatcaatcgttcaccacaaaagtaggttctctttttactttttctgttgaccattcatcatcgaaccatttttacaagttaacaatgaatgaatgaacgaagacgaaatcgatgagagagagaaaggtcaaaagagggggaaagaacataatacaaaaaaaaaaacaggagaaatcggtcacaaaaggtaaaggcatttgttgaagtcaattattcgtccgctttcagttgcgactgtcccttttttcctgcacccatttcaaaatacgcgctttgagttctttttctaaacattgccaatgcataaatcttggctta

SEQ ID NO: 8635 - DNA, 3034 bp, Heterodera glycines
cccccaaaattaggaatttacccacctgagcaccaattttaagtgaaatctcagccaaaatttcgacttttgaggccctgtaactcttgaagaaagcaaaatgcaccgttaaaattaaaaattcacactagaagtcgaccctgctctatccaatggtatatcatttatatgcattttcctagttacagctcggaatgttcccttggtttaacatccccacgaatcccacccggtctcagttcgtcggtggtgagtggttgtcgggtgaatggatttgtcgggtcgctgagcaaatggcgcagaatgtttttgcgatcgcaaatctgtcccgagggcagttcgaccgggtcgctcatcatcgtgtagacaagcgcatctcaaaaaggcgaattattccggggaatatcactcgcgccacacctttgaactcttcgggcacttcgtcttcgaattcctcctcgaacatcattttctctttgtacgctgcttctgcctgttccgccaaatttgcaaacaattccaagtggttgatcgtaagaatgttcctcattttaaatctttcaattatcgtgctgaatgcttccggggtgtacgaacgctaaattggggagatcagagaatgtctaattgcaatttaaaaattcatcttttccttttttgggggattgcgtcccggcaaataaaaaagtctgaaataggtcacctcatcctgcgcaatttgcttggcgaacatttccgagcccaaattgatgtagaccttcacaatttgctgtgtcaatgtgcgcgggtcccattcgaagcgatttattgcgtcgtgcactttcagttgcgcacatttcggtccacacaactaaaaaagccgtgcattgtttgggctttctttttttggcttttcccttccctccccctccagcccacctggacgaggttgtggttgagcatcgccgcaactctttccccaagcgcttcgttgcgaaatatttgcggcgcgtcgctggtcagcgtaacgaatagttccatggtgtcagtgccgagttggatccacattttgacttgtcccttcgagtctctgagttggtccgtcttcagctgctgctcctcctgactgagtttgtcccattcggtctcattgctcataacggattcaatgtcgtggatcactttcaatttgtcaagcgattcgtcgagaagaaaagttgtgtcgttgagcaccatgttgatgaaacgaacaaaactcggagaaaattcactgaatggaaaaataaaaaatataaacaaaaaaacagaaaaaacacccggcgtattggaccattctgtcgcgatgcgacaaatcactccacatgcatttgaaaatgacttgaatgttccttctgatattaaacttgtcgaaaaattcagtgtgtgaacctaaggttttgggagcataaaggagaagaaaaaagaaaatcggaccagttgtttcaacggccgaataaaatttgacgagggatgggaacagtccttcaacagcaagagaatcactgacaatttgacggtaaaagacggatgcatcatggttaaccaaagggcacagcatgaaaagcaaatcgacgacctgaaaaaatcagaggaacagagcaaaatgttcagaaaagggaagcgggggttttacctttgaaccaatgaaagggttctttatgctctccaagttgagaagcaaatgaagaacttgcttcggaaagtcggacaaattctttaagaaaatccgactcattttggacttgctaaatggaaaagtaaaaagtcgaaaacaaaatccaagcaaatacctgacgagcaaagtgagaaactcgacggcaacttccaaataggtctcggggaaagcgaagaagcggtcaaagtccggttggaattcattttgaccactgaaacaaaaataccaaattaaagcagaaaaaaggaaggatccttacaaaacaggcataatcgggtggagaagcattctgagcagtttgttggtgaaaagcacacacatttccaccaaattggggtcgtgcaacaaacattcgtagcaataggcactgagattgaattgctaaaaggggcaattgtcaacaaatgtcagtaaatcagcatcaatgttcgttgccttcagcatttccttggcccttctcattgcgcttttaatgcgtgtgacttgcgccgggttggcactgtttcccaatgcgttcattcgttcctccatttcctgcactctccgccgaaggtccgaaaggtaaaagcgtttgaggcgtgaaaatgcatttgacatggcatttacactaaacagaaaagcaagagaaaatgccgaaaaggaccaagagccaatccatcgctttctcaccttatccgcatgaattcaatgcccaaatagaaacattcggtgttgaaatttggcacatatgtcaattccgctaaaccaaaaaaaaaaaaaaatttttgtaaaaaattggctgtaataaatttacctaattctttgcgataactttccaatttttccgaatccatattaatacgtgattcgtcggttgtgtcaatgcgacacttcggatggaaaaggtaatcgctttgcactttctcaatgacaattttgtcggatagcaaaaggatgacggagaaaacgttcagcacggaagtacaatttgcaagttgagaaaagtccgcgtggagttgggacaatttgcgattggttgtcaaaatgtgaaagaagtaatccaaagtttggtgacgcgtggaactgttgacgaccaacgcatgcacaacggagtggaggttgagctgaagcggggaatagcatggcatcgacagaaggaaacggaccgaacggccaaccaaaggccattcgacggaaagcccgaggggaggggggggggggggttcgacatcatataccgaactgccgatacattcacagtaatttcaacaaaaaaagaatgtacaatatctcacaacaaatacaataatacgtaacaattttataaaagctatcctttcaacaatgctaaacacatcaaaa

SEQ ID NO: 8636 - DNA, 1241 bp, Heterodera glycines
ctcctctcgccaccctccactcgtcgaggtgccttctccctcccctcaccccacaaagtcccttcaggagaaggaaatccgatcggtgatgaatggccaccattttctcagccgcctgttcgccctgcgccgcttggcactctttccgtcgccgcttggccccggcggcgcttccgtccccccgcgcgtctcttcgcccgcttatccgtccgcttcctcctcccatcgctccgctgctttttctttgcttcccatcgcttccgttttcgccactctccgcgttaataacagtcaaacgtttggcgacggagtaaaactgttgagaatctccgaattgagtcagaacaaacggagacaaattgacaagcaatttgtgtggacgggagaagaaagcgatgagaaagtaagcggcgaaaggaattttcaaagtgtcggcagacactcccaattttaaaatttgaatttacaatttgaatttccaacttgacctccgcctgctgaatttccctaaattattgcgttgtacctatctttccccccccccctcagatgaccaccattaatttcgtcgatttggacgcctccgctacggtcccccaattgttttatgagcttttgtttggccgtccggaacatttccgtgcccctttctttgctcaagccctgtacagcctccgtctcagcgttccgtcctcagtttcccggcccgggcttcagcaagtgttggcccggatcaccgccttctcccctttggatttgcctctgaattactctctcctgtcgcccctctcggagtgtccctttagcgtcgtcccttccacgggtccctcccccccccccccttctccctttctttaactttgacttcccattttaggtgatattgtcgtcacccatcctttgcttaacactttttctgtcgaatattgtatgaatttggtggcaacagacaaaaaagggatgcaaacgcgagtgcccatacaaattgtgttatcagaagaggaacaatcacaaaatgggggaggcggaaaagtcggagggacggagccaaaggaatgtggcgtatttgaagaggacacggaactattcaaacacgaattcaaaaagacacaacgccaaaccaccgacgaaacgaccggcgggggaagtgcggtggacgggaagacgacagaaaaggaaacggaagagagtgagaaagccaagcgaaaggggggaaaagccaagggaacgggggggggggg

SEQ ID NO: 8637 - DNA, 3619 bp, Heterodera glycines
ggaaagaaagaagaacaacggttatttataaaggtcgagaaaacacaacaacaataactgatcatttgttaaaagcaattgcaaaaatcgcaaaaattctctttgtgtcgcgtcacttccgaaaagtcataaaggcggaactaaagaaagaaaataggcgaaattttgcaaagggaggaggaaatgaacgttttaggctgattgaacgaagtgtcggctgacggagggcttaaacaaaagcaaatggcaattagtgaccggaaaagcgatggttttaattacccgccaccgaaaagcgaaggcggactttgctggccggcgagttggccaaagcctgcggatttattcgcaaagctaaaagtgccaatgaacaaccaaacaaacaaaacaaagaacccacgcggagaatcccgaactgagtggtgccggcgcggctccccccgcgccaatccctcccccgaacatcgatttgcctccaaaagtcgttccgcccccgaagggactcgcaccgaagccaccggaaggagggtttggggacgaaaacggagagacactgccgaaggacgcaccgccgccaaaggcactcggcgcagcggcaccgccagcgaaaccgccgccgaaggacgatttgggagcagagggagaggaaaagggagaagcgccgaaaggggaagctgaagtggaaacagaagaagtgcaagcaaagaaagcagcagaaccaccagcagacggcgaaacggccaaagagccgaaggtgggcttggaggacggagtgccaaacgacgccgaaccgctgggagtgccaaacgaagtcggaggggtgccaaagagagagcgccccgaggtgccgctgccttgggccgaggcaattgacccgaacggattccgacccgcaccaatcggcgtggacgaacccaaaccagacctgtggaaatgttcgaaacggaccgttcttggggcagaacgtacttcataaaatcgaaggtcaccgcctcgcgtgccgcatcagccgcttcgtcgtccattccctcctccgccacattcgctttttcagcgctttctcccgtcggttggctttccctttgcttttccgtgccctcttctccccccgtcaatcccttttcggtggcttggctttgtgaaagtatcgcaactgtttctggtggcgatggtatcgctttttcggtgggcggagtggccaaaggcattgccactttgccgggcactttttccattggtttttccacaattggtgtctcttttgaaaccgcttctgttggctttggagacagagttgaaaaagacaaaggcgtcgatgagattggcacggcatttcgcagcgattgccccccattcttcgcagctttcggcgtcgatgtctttttcaacggggctccttttgaaaagtgatttaacccaatcaaagtcacactaacacaaagccagccccgagtacttttcggtgtcttttctcgactttgggctgcaaaatcgggggattggacgccaacggagaccaattggggcttcggcggagaagccgcctcggaaatccgttgggccaatctttgatcagcgaccgattgcattggcactgtttggacagcctccgattcgtccggcattttgagagaaaaaatccgcttcacttccacctcgtttggtcttttctttaaaaatgtcattagcatagctaattaattgcaaatgctcaccattagatagtctcgcaagttgttttgcaattgttgcaaattgcttttcgtctcgcgaatgaccaaatggggacgaccatttcccacgatcggcagttttaattgttccaattctaacgcacaaaaatcggccaaagggatggaaatttgagtcaattttttgggatcagtcgccgacgaggcgaatttccgcccgaccgagcgacgtatttggtgaagccgtgaattcagtttggcactcattttcgcgatgttttcattaatttggatgatttttcgttgttcaattggcccaattgttgtgtcttccgatgttctatgaattttcatattttcagtttatataagcctccttaagcataatttttttttttgcttttctgaacccaaaaaagttttaactttttgttaaataatttttgaacttataagcactatgtgtcaaaatagcatgtttagtatttttcgccaaaattgccaattgtgcattttcaggtcaaaatttttgaaaaatttgagggatttagtcgtccgatgcctttaggcgccgccggagaaactttaaatttataaaaagttagctatttttcatttgggatgtgatgggaattcatcccttctcccttggttgctggcgcggtttatattaataaattcacctcgggatttgctttttgcgacacccttcgaatctgtccatcatttttcgcgcttttttcattttttccataatattttcgtattccctctcaatcagatggagccgtctttccttaaacagttacacgtccacactatgcctgacaatggtggctcttaccatgtcaaatgacggtttgttcagttcggccgatgtctctccttccctcagggccgccaatttgagtccattcagaaattccattttgtcatttgtttccacacaaagtctgtccagagaggaaaggctctgtctgaaggagtgcagcaactccgtcttgatgttgtgcagttcaacgagaaaccctttaacggtcgtttcttttctcggtgttttcttggccactgactgacccgtgtccaatggactcgcacttttctccgcttcgcgtcgcaattggcccaactgcgcaattcgctccgtctgctcgttccgcttggccgtgtattcggttacgcttttctccaacgctctttccaacgcggcgattttgtccctttcgcttttcagtttcattttctctttttccccattttcttcctttccgagtgttttttcctcaattcgatttacgcccctctaaaagcatttgtcttttgattgaatgaacggagaaagccaaacaatgtgttcctcctctctttgcatcgtttcgatattcttcgtgggcatggaattcgcctgtgttgtttcgtcttttgattgttggtctgtggctgttttttccgccgaattctcaccaattggcgatttcccaaactttgcatttttcatttcaatttgttcaggtgctcttaataagaagcgtgaacacttgaaatggaaataacgacaaaattcaaaacgaacgaatcgaactttgtgagcaaaggcctttcattgttcagcgaaaggacggcgtaaggtaacaacgaaccggaagagttgaggaaatggacgaacggaggagcatttcggactgatttttcactcccttctgaatcagagggaaaggaatccatccgaagcattttgaaggaacctccgatcggaatgggcgtcgtggaagagaaatccaaagcgattcccagcggaaaagtgtctttgttgttagctgtgagtggcatttcgatgtcgaatgtgtcgagttcaaatttcacccatttgtcgcctcggagaccaaaaacgacaacagagggcgattcggcagagagaacgaacacct

SEQ ID NO: 8638 - DNA, 2240 bp, Heterodera glycines
ttttagcatatttaaatcagggacccttgggtttggagttttttaaaaagttagggtaaaaaaatttaaaggaattaattaacaagtgtttcatttttggtatttggattttatttatttttatacattattttgaaaaatctaaattatataatataatttagtttaaagaaaatttatatagacctaaaatatcttctaaaaatgaaactttaactgattattaatttatatatcaatttcatatttaggggtgtaaaatcgtaaaatgttaacaaaaaaaggtacaatattaagccaaatcagtattgagataaaaatttgtaaaatagaagtaatgtcaagaaaataaataaatcaatttggagacgaatttgagagaaataattcatttcatggtggtgaacgataaaagataaatttttggagtctagtttgaaatgggaagtcttgataatacaaaaaaaatttatccaaaaaatgggggcattcatctttacctatttccgccaattttattacttttgggttatgataatccaaagaacggaagcgaatgtccgtaatatccgaatctccggttgaatgcgtctccaatttgtgaatatgcgaacaaaaacacgaataaattttgttttgtgggccgacgagaacacaaatgccataacgggacgaaacagcaatccatcgtttcgattctttgaaattcccaagggtcaaagggtcgaagattttcgtgcgacgaagcgccctaaactgaaggtcctaaaaaacatgtcgtgtaaagcaaacctgtaaaaaagacaacctctatggtttcgctgagctgctctgccatacgaacaaaaaaaaattagaattatgttgattaagttattgtcaatctacagtataaaatagttatgtctaacttattttacttcggttacatttctttacaaataattaattaaaattagaaggcattgggaccttgccacaaattacggcattattccaaagtttggttgtgaggtatccttcattttatcgactgttatacataatgagcaaatggattataaaatcagaaaagaggcgaatataaaggttatcaaggtctttcggcaccttccttcacttggcagtgagttatttgattagtgcgaattgttaccatcggcaaggtatgaaaatgccgaaacgtctcacaatcagactatttaggtggagaataaaaaattaaatcagaatttagatcacatcacgcaacaaatattttaacatgacaatgagatttatgagttttcatccgagagagaacttctctaaaagattaaatttgccatttgtaaaattctccaattctccaccatcaattttataacatataaaaatttttttggtatctcttgggttttcaataaaaataataatctgtacataaaaattccaaaaagggatgaaaaaaaacaaaaaataaagtcaattagggatgtattaggactgaccattggttctttttgagtatatgtagagagagagagagagattattcaatgaaaagtaaatcaaatagaaatctcatactaaattactaaaacatttaactatacatttttaataacatgatttgttgtctaattgtacggttgatcagtttatcgcccctccgcggctgttgaattcaaaacgttgcggtggggaagggctggtgccgctgtaaatggcctgtgctggcgtagaaggcgtgttgccgtaaggcgtgtttgagctaatctgttggctgtgagtccacaattgggcgggactccgttgggaatacgaatctgatgaaagttggtgatcagcagaagaagaggggtcgaagctgagagaagccgaggtatgttgagaagcggagggaagttggttgtgagcagagactgaagaggaggaagcgcagtgcggcaccgctgccgagtcatttcgcaagtgcccatgggcggcgaagtgggaagacccgctggacctgtcgagagggagaaggcgtcaagacattggattcaattctctgttcattgtcagtgcccccaccccaatcaaaaacctaaatccgagacacgcttctggcgccaacctttggagagatgggacaaataaatagctcgagagagcagaagtcggttcgttttgtttgcccagtaggaattgtctcccaagttcaggctgaatgatgtccatggacggggaattggccgagggcgaagtcgacgagggca

SEQ ID NO: 8639 - DNA, 1757 bp, Heterodera glycines
aaattggtcaaaattagagtagagcgggaccgggaattttgggcttaaccgggaccttttcgggttgaaaaaccgggaatttttggctgggaaaaccgggaaaaaacccgggactggtcccggtcccggtcaaaaccgggacctcggtactcagttgtccgtattttggtcccgatcccgctctactctagtcaaaatatgtcggtgggggtcggtttagtacggccggtttagtacggccgttttagtacggccgttttagtacggccgttttagtacggccggtttagtacgagggtcagtttagtacggccggtttagtacgagggtcggtttagtacggcaagctgtttttgtccaaaatatattctactgattttttccgaaaaaatgtttaaaattaataacctaatatatttatcaataggttaacaacgaaaaaaataacaaagcattgaaaattacggtcgctttttataattagcctaggcttaagccaaacgcttaggcctactctaagtaatttttcgaattgcctgtgtatgagttgttatgataattatgtttaacatagagtgccacgggaccgggccaggaatccccggtcatccgaggtcccggtcccgaaaaaaaatcgaggtcccggtcccggcttctcaggtcccggcaagtcccggtcccggttttggcaaaaattcccggtcccgtggcactctagtttaacaacgaaattttagttaaaaaagattactgaataccggacaaaaaaaataggtttcctcttagttatttggacggctaaaataccacggaccagggatggcacggatctggtttccgaaaattttttgagcctcaaatgccatccctgccatggacacaaaatgtaatggacgcgtaaaatgtcatgggacgcgtaagtgtcgaaagtactcagtgtctaattttttagagcatggagagctggaaaaaaatatgtatttacataaaattgacccctacccatgagtataccaaaaagaaaaaacattttaattcctgtggagggattgaaaaaatttaaaaatttttcgagataaagattttgacagctttcatggttgaataaagatttgagcattcgttttggcccttcggaaaactgactcttttgactttcatgttggcgcccatctctctctctctctctctctctctcctctttctctctttctttctctctcttcctcactttttctctctctctcttctttctctctctctctttctccccctttctctccccctcatcccgctctctttctccacctttctctccccctcatccccctctctctctcttctctctctctctctttaatcttccctctctctcttctctctctctccgttcactctctcgctcctgcctctctctccttactctctctcttctctctcccccttcactctctcccttctcgcttaaaaaaccccgaccctcacatttgtctcacaattattcgccatttttttttgttgcttattcaggctttgcagcatttttggtccaaaaatcaccttaaaaatttattattcgtatgtacaggtttcggatttttttcaaacattttttgtacatatttagcgttttctcacatataatttgcagcactaatcataatattttctcaaaaaatatataaaatattaataacttttcattaaaaaataaatcaattcctattttttttaaactttcggatcaaactggcatt

SEQ ID NO: 8640 - DNA, 1533 bp, Heterodera glycines
gaatttgtagaacctttttttcacaaattttttgaactaatcctcaaattaacattttttagcaagagctaaataaaatagatttattttcaattttctaggaaatatcaaaagaacttaaaatttcatgaaatattttgggctcgaatgggctgatccggaaatttgtgacttattgtgagacagttccccttaaatttgagattaaaaatggaaaagtcaactggaattctaattatgcctaattaaccagtacagaattggtcgaatcgaataaaagtattttatttatttttttggcgaaaacgtttagcagatgtgaatttgaaagcctaatatttcctagagaagagagctaatgctaatttgtaagggctgccatctttaatttttttttcgaaattttactttctccaattaatattttttaatagctaaattaaattgatctaatctaaggtgttgttgcgcaatgaatgtgctaatggtggccgaaagcccattttggcggaggcaatcgccaaaattttgtccaacggaaaatgccacactcggaaacgcatgacacaatttattaaaattaaatttaaaccaattaatttaaatatttttcccattttgccaggatggaacggcgcctgctcagtgtctgagtacaaaaatcgtttaggggcaaacaggccaatttccggatcacttccacctgtgggtatgtgatgtgtagttgtgggggaatctctttttgcctattttaggtacatatttataaaattaagtgcctaaaaatatgatcaaaatgttattctacagtcatggtcatatggttagcacaccccacaaattttttataaatttaatttggcagcatccaattcattggaacacaacggtaaaagagtctcgaagttatacgccatttttgggaatcatctagctcatttttctcatgtatatccctttcatttagtgtggtatttacagtcccagattaaaaataatatctattcaaagtgaataccattcccagattaacgagcatttgaataaggtgattttttgtaatttcaaatttttgtctattttaaatttttcacgtaaattttcacgtaaaatgcgtgatggcttaaaataaaaatttttttcgtgctcagcgcataaaattaccctagcaaaaaaatttaaaaatttaagaaccattttttctaggataggaaaatgcgctgattacgaatctaagctcagattttgcaaaatcagtgattttgtctgatttttcatcaagtacttgattttctccaaaaatttaaggaaattggcttaaaaacccatattcaaatattgtagagcttaaaaagagctttcgaatgagctattgaatgtcttgagaattcaactttttaattttaaacgattttttgaaatttaataacgcctttggggtcatataagatggggggggggggggtctggggttcgatcccgcttgactgcagtttattttttatgatacttggtgaaaaatcatagacaaaa

SEQ ID NO: 8641 - DNA, 932 bp, Heterodera glycines
ggagaagaatgctgcttccacgagacccaccgcgataaataccactaaccccccaatttaaaaaaagagaaattgtatctctatgtatgaatgtatatattgtatgtccatatccctgtggcattgtcttgctgaatgtaattctcccacaaatatttgttgttctatttatctatgccatatatatgtgtattttaataattgtaatatgtttgtcctgtttatccatgttttatggtcatttattctcattgccgaataaatacatttatatgaatgaatgagtacattttaatatgtgaactttcgattttttgttcggtccgggtctatgaattggtcgaaaaggatgacatattcgtgattagcgaccccgataaccccataaaacatttttggattgcaatttaaaaaaaacgatgaaaaatcatagacttgaaaaaaagcatagattagatgatgtcatatgacaattctgatctcatattcgtgatcagtggccccgataacccccgagtaaaggaataatcgtaaaaaaccgcctttttattccttttttatgggaccagtaaaagtcagtattaccccaaattttccatttccattcagattgaaaaatgaatcctgatcttcaaatagctcaaaagtttttcttgtgtaaagaaaacaaaaaaaaatgtcgcaacgatttttctcgaattgcttaaggttggtatttgaattgctgtttattgtgttaatttgctgctgtttctttctcttttctgcttcattctctcatcctcttcctcccgcatatatcatcattttgacaaaaattgcctaacattataaaaaaaaaatgagtattgaaacgagggcgccaaattcaaaaatctttttattcccgactgatcaaatctaatcaaaagactgatcactgattttacctg

SEQ ID NO: 8642 - DNA, 5400 bp, Heterodera glycines
tataacagcaaaaatgaaactttaaaggaatttttttccccccacttttcttttttgtgtgctttttaatttttatcgctaagttttgctggtaaaagtttcacctcaattggcccttgaaaggatgagaaatggtaaaaatttgtgtggcgatttaaatcatccaaaatgacgcttatattttggcgagttgattctcccccgccccttccgacgggcttttgatctcgctaaaacaagctcaatgcaatcgtcggagcggctgggaattcgcttcccatttgctctcttctgccactgactgtgggcggagaacggggagaagcggacacggggcaccgcgcgctcttcccccccccccccctccaaggaggacagaagcgcgacgagccgcgccgcttcccttgtacgatcaataaaatgtgtgccgtgggcagcagcgagcaaagcgttggatgagtgagtgagtgccgcctcgaggcggcttaagcttcccagcggcgatgtgctgtcgccgacgcccgccgcagcccaaaacagcgtaaagcacacacaacaaatacagcctttattcatcatcaatccattgctctcatctcacagcccatcggcagcagcagagcaccacggccttttaggccaaacatatcatttcgcaagaaccatcccccgaaaaggcaaaattccctcaaccaataaaagtcggttggctttgaattaattaaaataaatgagactcagtcgttcaattatggaaaggaaagaattcttcattggattattaattatttgctctcattgtcagtctgatgaatgccgtgctgctgattttctcatgccccactttctttgtttgagccaaaaatcaaattggcataatttttaattaagatttattcaaaattattaataattttatttgtgcacaattttttgaatggatggatctctccggcagcatcagcatggacagcagcaatagaaatgtgccggatcagcccggcacgtcggctggcggtggcagcgacgcgctgtccagcacaaggcagcccagtctgatctcatcactttggtcattaattatttgggaaacaataaatcaaccaaattgattggactattatgaagttgggggaaatggtcgaaatatttataaaatgctttttgctgacattttttctaattttgcctaaattttcaggtcaatccaagtgcaggttcgttttatattagcgaaatttttcaaaaaaataaataatacacaaaactttggatttctatttttgtacgttaattaaaacaaattgactttgtgaggcggagggacgaaggacacacccaatttaattttgggccccatttaataataaagtttgtggcaattgaattttgccattttctgtgcttatggcaattcctaattgcctcccccctcttagcatgaggggtccaactcggacttcccaatggagtccccgaaggggtcgttgcccgaaattgtgcaagcgtcctcctgctgccacttccagtcggcccccggcgggcggcccaatgttttcgctgcacaacaaacgatcggtgccggaggggacatttccgcagatcagcaccagcaactgatcactgctggaggcggtgcagctggggctgatcactcgctgttgtcctctttccaacaccagcagcaacagcagaccgcctcctcggcgggagtcggcccaccggacggagtcggctgttccggctttcacatgttgcctccgccctacggcaacagtccgtccgtgttgcgacccgtcaaatcgctttcaggttcgaattgcgccacccccccccccacccgacgattcacaagaatattttattgatccttttttttgaattgttagactaagtagcgctttgaaatgataaagttttggcaaggaatgaaaaagtcgaccaaaacggcacaattcgtcgaaacatgaaaaacaaaatttaattggttaatttatgccccacgagcaaatgttgaattgcgggccattatattgcaaacttctaaattccttattcttttacatcaaattgttcgtgtttttgtccagatttgagttcgttggctgctgccggtggtggccaaatgtgctcttcgcaaccgtttggccaaatttgtccctattcgccgccatgcgctggccataataatgcaactgctaacagtcaatatggcacgatgaacagcagcaacagacggctaaccgaaacgggcattttgtacgggggcggactcagcaaacagcagagggactcacaggtgatggacaagacaaatggaatgggacaaaagacacaaagggacaatcgaacggagggacaaatggtcgaaaaaattggaaaaacaaacgctgataatgagacaaaagaaatggaaaggaatcggaaattgaaattctcagggaattgcttttaaaaattatcaactgacaatgaaatcctttgggttttaagcctttttaggttagtattttgaaatatatttatgcaatttgaaacgaaattacaataaattaaaaacacttccctatgaagcgacacattacaatttaaatgtttatattttttgtgaaattgtacagttaagtgaatattgtaattccaaatttcgtttccccggcggcgactttcggcatcatctaatccctcaagctcctaaacttactttaaaaaatatttctaaacacaaactttagtcattttgttgacaaaatctgttagcaaattgcgcacaaattttcaaaatttcactatcggcgccttttggcaccgccggccttctgttttttaaattttaatttatacatatcattggccatttttataatgctaaaatgttttcgtagcctttacacagtgaacattttccaattccgaaagaaactaaaaaatttatttcgtactttttccttttcgtttttcaattttcttatttaaaattcgatttcggcggagtcctttctcttcatttggttcaaaattaaaaaactttccactcgttttttttagatttgcgattggcttcagacggcgatgatggccatgagagtgggcgaaggcggcgccgaagggactggcggaagcgaaagtccgcccgaaatgggcggcacgcaatttggccagccgaggccaacggcacaaaagggggcggaacagcagtgaattggaagaagagagagagggcagcagagagaagggaaagaacacacgaaaggagagggagagagaaagagacgacaatcccagagaaaacggaagaataaaacccaaagaattaaaaagcacaattagcagaggaaaataactcattcattcattcattattcattcattgttccccattttgaggggaatcaaatcgctgacaattttagaatttttgattaattaattaattgattaattgattgatataactaatcattagggctgccaaaaatatgcacgaaaagtggccaaaatatgcgcataaatatgcaaataaagtcgtgaaatatgcaccaaatatgcacaaaaatcgcaaaatatgcaccaaatatgcacaaaaaacttgaaaattaggggtgcaaatccaataaaaaatttttattcctcataaattttatcgggttttttttgcaattgaaaatcaataatttctcaagattttcggcactaaagctcatcctattgtctgccaaaatttacttaagggatattcaaaacggaaaatattttacgaaaaatggcaaaatatgcaaaaaatcggaaaatatctacaaaaaatggcaaaatatgcaaaaaaatcggaaaatatgcacaaaaaatggctaaatatgcatgaaaatgtaaaacaagccaaaatatgcaaaatatgcataaaggcccaaaatatgcaaataaaagtcccgatttttatacgcaaacacaaaaaagaaagtgtttttcgtactatttagagcatggagaagccaggaaaaaaatatgcatttgcatacttttggcagccctactaatcatatattatataataaacaaatgctaatcataaagatttgctccgagtcggatatcaaatgggagggggggtgtcttctaaagttatggaaattacgaaaattttttagaaatatgatttgttagagcgacattgggatagggagttttgggaaaaaccgtggccggatttaacgggactaatgtagagttgcacggtaatcggtaattgtaaaaaaaaccggtaccgctactgaccggtaatacaaaaaccggtaccggtaccaacttttccaccggtaacggtaccggtacaaaccggtatttccaacgtaaaaatttctggacaaaatttttcaaatacaaaatttttattcagttttcgcgcgagtgcctgttttttagcattagaattgttcagaagtatatgtatattgagggtgaccaagtttttttcaaattcaggataaagaacactaaaattcagatgtagacctcaaaattcagattattgcaaaacaaggggtcagcagccaattttccaattttgcgaaggggtctctggtcatgtaaattaatgtaaatcaatgaccttttttgctttcaacaccgcttttttcgcggcacgtttttctcaagacttttggggaacaaggagggccggcggtgccgataggcgccgccgggaaaaattttgtattttttaatgcgatttgttaacagaatttgtaaaaaaaagaccaattgaataatttttgggtttttaggatgcttaaaatgaaagaaaaaaagttggaatattttttttaattaaaatttcaatgaaaataatggtaaagaaaatatgaagaatattctatcccagtggggaattgaacccaagcgaaaaattatgaaagacagaaggtttaaccattacactacatatgcactgataataaatgaaataaaatttaattttttctcaaaaatttcttcttcttcaccaatttcctactcttttctcgaccagacccccattcttaccagtgcaaatttttaccggcggtaccggtactagacaaaccggtaccggtactttgatttttgaaaaaaccggtaccggtaccaaaaaaaccggtaattaccggccagtaccggtaccggtaccgtgcaactctagactaaaggcgtggaacttggttttcaaccagaatccaagaaattttttagaaataattagttattttataaattagaaaattaaattaaacaaaattgttttcatttaattaaaaaagcaaaaaatcaaaaaaaaatgtaggaaatgaattttaactaaagcttcgagtcccgaattaatttgcggccgcaaaagtacttcaaattatcattctttttcagttt

SEQ ID NO: 8643 - DNA, 899 bp, Heterodera glycines
tataatttttaaagagtaggatagaacaccttttcttaggttttcggggtcgctgatcacgaatccggcatccatttcgaaccccgaattcgaacaaaaaataaaaaaaacaatttttaactaaattcacattttttgcataaaagcgatgcaattcgaattaggggctcgaactgggtcaaaatgccggattgtataatatagattatcattctttttcagctggttatttgccttcaaactcgcctcctcagggcgaagttctgattcacggggccaatgtcgcgttgggttacttcaaaaatgaggaaaagaccaaagaggacttcgtcgagttggacggaaagcgttggttcgccaccggggatattggagaattccgtaagcgatcgactccaccaaaagcattgacataatgatattattcatttttaggcgaggatggcagtctctgcattattggttttagtgaataatattgtcgatttaccttccattttaagaccggaagaaagatctgatcaaattggcccacggcgagtacatcgctttggggaaggtggagacggcgctgctgaccaatccgaacgtggacaacatttgcgtttatggcgaatcgcacaaggactatctgattgcacttgtggttccaaatctcaaaaacctgcaagtccttgctgaaaaggtaccgtttgaaatcagaagcagtttccgcttctttacaatgataccccagcgcttctcccctcttcagaatgacgtcaatgagccgagtattgagagaatttgtgccaacaaagaaatgcccaagattctgcagaaggaactccacagctttgtttcgggtcttttctttcgatcaaacgttgtcctatcaattcatttccaggcaaattgcg

SEQ ID NO: 8644 - DNA, 1921 bp, Heterodera glycines
  unsure (1)..(1921): unsure at all n locations
agggaggaaatcnncagaaaagtcatcatttgtgcggagccgtggactgccgattcgggaatgctgaccgaagcattgaaactgaagcgcaagaacatcgagaagaagttcgaggaggaaatcaggcagctttatgaagagaactgaattgacttaattgctcctcaagacatatgatatcaattattaaaatggtattgatgaccagtcgataaattttatcacctccgacaatttttgttgccttagattttgaaaaggattgtatcccataattaagtttctttacgccaccaattattcaaattgttaattctctaattgaaatgtgtgataccaatttacttaatgtgcttatatgaacctatgttaattggataaaaacattgtttactcattggcacttcaattttaaccaaaacagaaaaatacatcacatttataaaataggaatggaatacaattttcatttgttgaagaatttgttgtccaatgaacatcgttcaaattcacttcctcccggcctcaaaaagaacaactgtccgtcgctgctcagagtagcggaaacaattgcggtggaatccgagtgctgaaaaagattatgtaagacaaatggacaattacagtgcgtagaaaagcgaaagcgttaattggctcggtgtcacaaaaaaacaattgcttaagttgttaataaatactcaaatcccattattacccgtgaatacacgtgatctaatattgttaacgtttataaattcgttttgcaaacaattgaaaatttcgaattttcggaaaataatcacttagtttgaaattggagaaatttcgggaccaatgattgcagattcaaatatttagatggaaaatacctccgaaaattggacgcggtattgtcgttttaaattggaattggtggggatgaggaatagttctgctcggttggtgctgaacacaacgaatttctcggggcttctcgctctccttagtctgctcctcaattggacaatcgccggttttttattcggctcccctcagcggccgtaaatcgcaatttggtggacggccttagcccgggcacagtgaacgttcgaatttgttcttcggtgagcagaaacaaacgaccggcgcccgtcggattgctcccctcggccgcgtataaaatgccaacaatcggcgcttggtgttggagacggatttccttgaccagcggacattggagcgaacggtgatccgacgcatgggacacagaagaggagcagggggaagagagagagggatgaaaggcgtggatgaacacgacgctgccgtgggtgccgacgaaaaggtgccgcgaatcgcaatcggaagacgaactcgaaacatcgcactgatggaatgtgacgactttgacgagcgaagtgggagtctgaccacctaaagccaatccgtacattcagtttatgtgacttattaatctaacgatttttatcaagatgcggtactatttatcgcaaaaaaaaaattcataaaacatttcaatttttttttcttaattacatacagatattttttggaaaaaattttatggagtgaatgctgggctgggatggagaatcattgttagttcacccataaaaatagagcaatttcatgaaaaaaggtcattttacataaaaaaaaacatactcaaaatgtttggattgaccggtctttgcgcaatttccctttctgctgggcgaaaatttttgatggtcatttcctaaacaaattattttttaccaaaaaaataaatttatttcttatgtttcacctcatttggacgtcttctctttcggaacgattgtctgattgacttttttacacttttgaagcgagacaaaggcccatccatggaggacaattgcatcacatcttaaaaatggggagggcatttgtatggttc

SEQ ID NO: 8645 - DNA, 3470 bp, Heterodera glycines
attgaatataaaagagcaatggcaacaaactttttaagcagacaaaaccccggggggtaattggccggcacattcctcgcttggattggcgactcggagggaagacggccggtaagtcggagatgggcggcatcctccgatgacgtcatgtccagcaacagcacttcattccttggcatatccttctgaaattcatggttttctgcttgtctctcaaaacaattacctttgaattcggcagcccttcgtaaaccaacaattgtcctgctgttcccccgacggcaatttcgccactttgggagtcgacgaatactttttgcacggccaaccgatggtcatcagaataggggtcgaataagccagcctaaatgcaaatgaatctgtgatttctattagcagaaataactcggccgacctttctgacgggtggcaaacaaaaattggcattattttcatcggaatttgcgtctgccggttcctttcttgttaattcttcgttggaattttgcagtaaatttggggcactgtcatcgataaagccctcaaaatcgcgcgcagtgtttagagaaatccagggcttgaatgaaaattcagaagccaaccaaacattgatgacaccattttcatgcctaataataaaatggaaaatgaggtattaaaaagagaaaagcaattgcaaaaacagacccagtgacaaccaattgcaggtcatttgccgcgttggtgttgttgattcgtctccgttgtgcaatttgtccgttttttagtgtcaaattactcctcgagaaaatattcgaagcatttcgctgcaaattcgctaatcgaccaagcaaagtttgggccttttcggacaaagaattgactgtggtaacacaagtcacaggggaagagtgaattggatggagaaaaggaaggggaagcattcgccaaatgggatcaagcaaatcaatcgcaacaatttcatcctcacaaaggacgaacaaaatgtgggaagaatctgcaacatgttgggagggaaaggggaaaaaaatggggaaaaaattactatcattggcgcaaaaaacgcaaaaatccaaaatggcactgtcaaaatccaaaatgagagatttgtcggcacagaaaacggacagcgtaaagcgattgtcgagctcatcgaggggaacaccgccggcgaaaatgacaaattcatcgcaggaactgaaaattgacattttgaaaatgcaaaagagagagcagactttggtgatttcgaagaaattattttggtaatttttgtgcattttttcgttccgaatggccttttgcgctcaatttcaaaccctttctctgaaacaccgagaaatgaataagcgccatcggcatgagaacagagcaattttgtgagtgaggaaatcgtcgacataaacttaacaaagttaaaggcttaactgctcattgccgtttgttaccgtaattggcgtctccgatttgaacgtctgcaaaacctcgtcggaagtaatgtcgtaaaaaacaacaaatgaattgttgaagagaatgtaaagcttcgattggtcttccgagtgaacattcactccgttcacttgcttttgctgagaatcgaactcggaaatgcttaaattggaacatccaagggcaaataaattatataattaataggcagtaaatgctaattaagtgttaattactctttgagagcggtgtcgagaaaaacaacgtgttcagtaagttccatgttgcgcaccaaaagtgcataaatgttgccgattattgtgccttaattcaaaacacttttccttttcaaatatttaaatatccatggaataccaatcagaagggcggactgcccatcggcgaggccaaccatctcacagcaagtgatccgcttcaaatgcctttcattgttcaaatgggtgacagtgagctgatcagaagtgatttgacaccgtacaaaatgctgagcatttgtggaggagtcattgcactgaatcagcaaagtgttcgcacctgcgacaaagtaaagcgcacagatcggcaatttgctgccaaaattggcggacaaatgttgggcgccgtttgaacaaaatctgaaaccaaaacgaagaaaaactagtccagcttaaatataagtaaacatttttagtagtaggaagttagaaaatttcgggagtttaaaatacaaaatgatggaccagaatttatatgtttgggaaattttttcatcccgtgaaattccatacaaaaaaccgaacccatcatttaagtcaccccaatgccttctcagttaaggaaaaacttacatcaaaagtctgccgtctttcgtcccaattgcgatatatcccaattgctcgtccacggacatcgaagaagccttctgagggaagccatgggtcgtcagctaagggaggaaaaggcatttcaagaataaaacgaatgacaaatttatgcctttatcactcactttgctgaagtcgacgaaatcgtcaaaatggtcgctcttcacttgatacgaactgccaatacgagaacgaaggtaacggagcatagcgaataaacaaacggaggaatattcggatatttttggacctaaagtgaccaatttaaaagttaagtgatttaataatgaaaaagattttaaaaaatacaattcacttattcaacaaataaataggtaattaattggttaattagactaattagcataaaaacaattgagctgcaaaatcagtttgcaaagaggtctctttgtctcttttgttttgttttgctttttctctctctctcgctcctctctcgctcactatgggtcaactccactgtgcagagaaaagcctagtactatctcgtcgtttctctttttctgtgtaatttctctctctttggcgtactatctcttcattttaattatgtaaaaaacaacatttacttcatcctgtttaactttttttctgtttgttaaatccacatcaaattttgcatacctatagagcaaaaaactctgcacatttttaacgctcgagttttatttttttacgctccgatccaaaattttaactcaaacaaaattaataatttcttttcctctccttttggcgtactattttcatgtctctaacacatgaaaaaacaccaaattcgaaaattctaataattttggttataagggtacaaaatcactttgaacatttagaatcaatagaaaaaagaataaatttagcattttggttagaaagagctgcctaggacttgagttataacatgataaaagtttgaaattcccacaacttttttctgagatgacaaattacttaacattcgcttagaaaaagattccccttttcaaaatctttttttagataccaaatttgttcagtttagttgggaatgaagcgagttatggcagatcaaataaaaaatacaaaaaaggcattttccgagtgtaaattttgaaatagcgcgcaaaaattacgcca

SEQ ID NO: 8646 - DNA, 2044 bp, Heterodera glycines
cataatgatggtttttaaataatgacatagcaccttcattaccgtattcagattgatttgactgagttccacgggctgatcggccgaccgtctcaggtgcatgccaatgtctccattctgttggaagcgtttggcaatgaaacggcggcggacgacgaattggcatttcatgcgggtgccaacattttcattcaccacgttcagctgttgagacaacatacgcagcatgggaagcagcgaagtggcgatggcgaagtgccaattcgatcggtgaagcggcacccggagagggaaataatccgactgttgctgggcgagaggatgaagccaggatggtgggccagggaagggggcaggggctaattagaatattattttgagaaatttttgacatttttaaatgtttaatttacaaaaataaaaaagaaaaaagcattctaaaataattttagaatgaatagaaaaaagcatttcaataataaataaaatagaaaaaatcttttaaaattatttaaataatttaactaatttttaaaatataaatattcatttcaaaaattatttaaatagaaattaacatgttcgaatttttctttttttatatgaaattttgccactgatttggcatcaaaaattattggttttgtcaaggtattggcttgagatggaattgcgcagcagaatttgccagtccgagtttgaaggtgctcactgctttccggacccgacaacacaatcgtcggctggcagtacggtgccggacggggcggcattgtttggcggcttttcaacaaaatttgagccaaattttgcgcgcacttttttgcccggctgggatgagccgcgctttcgcaccacattcaacgtcacaattcggcacttttcggatgccaaggtgttgacgaacacggcaccgatttcgtcttccccgccagcaggtcggcggacaattcaaatttcccgaacggaaatcatcgagagtcccatcaatcggagcaggacagcagaacgtcgccagacaatttttcgatcatagctttttcatttccaaccaaaatgaatcattcttgatagggttcgaaagcgcttctattgaatttcccggaggcgcctatcggcaccgccgggcccccattttacattattttttgaaattttgacctcaaaatggcaaaatcactcccttttttggcgaaaatcggctacaaactcctgtttttttctctccggcgctgaaatttttaaaataacaccggagataagttttttggcccgaagagcaaaaaaaggtcttaaggttcgcccctccgaaatttttttctggctacgggcttgggaccgtccatcaatggtctcaactttcagtccctcctctgcctttctcgagactctcgagcgtcacacctaatcaggtcactgtccccaaaagtgcaggcaccgcttgcgtcacccgttttgccaccactccgccgatgccgttgtatctgttggcatttgccaccggtccgttcactggggtcgaggtgcgcagttcgcgtgccaacattccgctgaccgtgtgggcagcgccgcaggacatgttggccgctcattttgtggccaatttttcgccaacaatgtttgaacgccttcaggaggattttggggtgagcattcgttgaattttttaatggattttataagaaatatttaaattctttattcctttttttaaattttttggcacattatcttaataggtattaaaaaaatatatatctttactttttatttatttaatttaaatatgctaaagaaaaataacaatttaaattgattcttttgcattcaataaagaaggttaaaattgtcatttcaatttagaaaaaaaaaaatttctttttaaatatgtatttaaaaacattttaatttaataattaaacatatttaaagaacttttttttatagtttaaacatatatttacaaataaaatttgtaacaacagaaatacattaattacatttagaattcactaattataaccataaaatattcccaatttat

SEQ ID NO: 8647 - DNA, 2325 bp, Heterodera glycines
attcgctaaatgtaagctaaacttctcaaaaaagactcttttagaaatcaatttaggagaaaaaggaaaaaaaataaatccaaatttataatattcctaaataaaaccaactaaaaagcgaaactttttcatttttgggtttttcacataaatttaacaattactagaattagtttttttaaaattaatattcttgagaaaagatgctctccttttgatttttataaaattatttttaattcaattttccatctctctcaggtcaaatacccattgtccaaaatggacattttcctggccccaaaactgccggtcggcggcatggagaactggggcctggtggtgctccacgcggacgctgtccgcatttcaaccagcgacggaccgttgccgctcggcaccgacgactcgtcgtcctcgtcacgtgccgcgtcacgcgaggagcgggcacgcgagcaaaagcagcacagtttgatgctggtcgaccgccgctcggaacagtaccgggccgagaaggccatcacacacgaattggtccaccagtggtccgtttttacgttggaccttgttttttgatgcttggagttggaaatttctttaaaaacctaattgatttctggttcatacaataattgtagaaatagggattttgcttgttgactaaaatttcctgaaatccaattttgggctcaaaacccaccgtaaaacgaaaatcgccaacatcttttattctaaaaaaaattaaaaaaaaaaaaattaaaatatggaaaattttgtggttcaggttcggcaatttggtcggcatttgggaatgggaagagctgtggattgccgaaggctttgccacttattttgtgttcgactttctcaacgcggccaaccatcctcatctgacgggtgagggagcttgcaataaatgctatgaatctcatggaaaatggcattttttggaaaacttagcgtcgaggctaaagcgagagataccaaagagtgttaagatgccacaatttggcaaaatgacttcccagcattggatataccataaccgattagttgagtaaattttggatatattttcgaaatcgaaatttgaatttaatgaattttttaattaggcaaacaaaatcaattaggaattaatttgtttattccgcaatttattttcgtagagcacgagtattacctacgactaattgagctgatccaacgtcagtccactgacggacgttcggcattggtacgaccacttcggacagccggccaactctaccgactgtttgacggcattcatttgtacacaaaaggtattaaaactaattaccaaaacaactaatgactaattaaggcgataattgcctaaattaaaatagaattttaaatttggatcttgatcaaaatttttgagaaaagctgaatcattttgatttgtaatttttgttttttcaattcttttaggaaaaaaaaaatttaatttttcagtattttttaaattaattttttcatactattatcattaacctaaacccaggtgccgtgatggtcaaaatgctgaaggacttggttgggcctgccgagttccgtgccggcatcacgcgcttcttgcgcgagaactccttcaagtcggtggaccgtcgcgcaatttgggccgcgtttcccaccgtcgctgaccacggcgttgatccggtacggctgaaggacgccatggagccgtggcttgtcaaccgcggcgtgcccgaggtggaagtacagcgaaactatgaggaccaatctgtgcggttgaagcaacggccggccgatcagaacagacacattgtgtacctggacgacgaagcaatgcagcagatgaggatgaactggaaggatgaggaggatgaggaaggaggaagagagaaaaagggggtcggaagaggcgcaggggatgaggaacatgatgaggaagacgtaggagaagattggtggaagatgaaaaggatggatgtaagggatggaagggaccttaaggatgcggatgatcaggatgaagaagggggaagaacggaaagggttgaaagaagtcaaagggatgagaaagacgaagaaggagatgatggatggaaaatgaaaggaatggacggaatgatttatgaggaaggggaagaagaagacggagggaagatgaacgatgatgctaatgaacgatggaggattgaaaaaggggaagggaaaaattacattgatgaggaaaaacgaaggaggaaaagggagggaataaatgatcagccggaagaggaagattgggaaattaggggggccagaagaaagctcaaagatgacgagcatcattcc

SEQ ID NO: 8648 - DNA, 1054 bp, Heterodera glycines
acggaagagacgacaatggcatcaccgcatcctactgtagcggtgagtaacggtaggatgagtatttttgggcgccggcggggaggacgggggcctgaagcgcggcgaaagcaccaccactatcaccggaagaagctgctgaacgcgcacagatcaaaaagctttcatcaacagcagcagcagaaaaagcgccgtgatcggtggaaaactgctgatcagcagcagcgagggcggggagtgttcagcagcagcggctatcggatgaggaaaacggctggcggcacagtgccggttttttcctcatggacggcaccatctcgacagtccaatgtcgacactgatcaacggagtgcccctgtcgcattttcggtgattaataacggcgatggtgccgaatcacggcagctacaacagtcgaaaacgcggtcttcacgtggtgaccagcaaaagcgacgtgccgacgatgcgcaactgcttggcccgctttggcccgtcccattctcgtactcattcggttcggcacactcagtaaggggccaaacggttcgccaattttggctgctcaacgaaacgctccgctttgtggatgtcggactggacaggacacagcacatgttggcaaacccccactggtaggaattgccacttttctcaaattaataaacaaattctcaaaaccatttaaaaattgtccagacttctttttcgaaattcaagaacatttctttaataagtgtaaaaaagtttcttataatttttacaatttcccaataagaaatgttcaagcacttaccgttatattcctcggaaatttcaccatttttggtgcaaactctaaacaatgtcacaatgttttgaaattccccggcggcgcctattggctaacgaggtgataacagatgaaaatttataagattatgaccattatttgtaacagattaacagataacaatatttatgtattatatgaaaaaaattccctgaacaccccttcgaattccagaaaaaaaatcgagacctctgggaaaagccattctcgacagatttttttttt

SEQ ID NO: 8649 - DNA, 1001 bp, Heterodera glycines
taaaaaaactttttaaagtcagtgcaaataaaattaaactttattggcataatttaattgaaaagaattattttctcgtcaattcattaagaatatcgcggctaaatgttagcttatatcttttgtgaattttctgaaaataaatatccaagtttttttttttgtcattttgggtccaagaaaaactttttgtactgcctttttttgtcgcaacgcattggcatattttgtcagccaaaaaattatgtatgcaaattgaattattatattcattttatgccgattttggccatcgcaagccaacagcagaagcaaatgcaaatatggccttactttttacataagcaattaaacataaataaatacatatgtgagaaagtaataaaaaatatgtattaaaatcgaataaatatacgtaaattttgcgtttataaatttaattttaaattatttattcgttttaaaatgatgtttaaaagttatatttttattgcattttagcgtaatatttcactcttttcgccttcctccgccctcgtctaaactcaattttgttaaaaagaatggagtgaaaattttcggcactttgttgcagtttgtccattgaattctaaccttcgtgggaacggaggggatttttgagcggattttgtgaaactgaggcaaaaaaaggggtgacacacgaaaaagagaggcaacaattgcttttccggtgccaaaaaaggctcaaaaatagcattttgatggatgcttttaaatttgctaaattggtttagcataaaatgaaagaatttcaaagaaaaaaaatgccaaaaagttaattttgaaacaacagaaattctttgaaagtcaaacaaaaacagtttttttttaattaagcaaaataaaaacgcaaaaagcagcgaaaaatgtcacaagaaatcatttgtaagtgcaatattttaaaaggagctttccaaataccgctaaaggggcatttcgcatggattcggaagtcaaaa

SEQ ID NO: 8650 - DNA, 1611 bp, Heterodera glycines
  unsure (1)..(1611): unsure at all n locations
atgccattcgcgtcgcctccccccgcccctccttcggtctttccttactttttgccgtgtctattaacaattggctgggccttcgggagcccatgccagaacgaattgtgacgggggtggccaaaaacattttcttcgttattgttgtcggcaccggcaatgcgatgattggcccatagggaatgagaaactgacgaatgcaatcgcaaattgagattaattagagagaaaagcgacaatatacgacaacgacaacgacgatgagtggtggaggttaattaggtagtggcgtaattatagaggacgaagatatgttgctaataagcataataataataatatttgtttgaatgtcatgaaattgctatgtatgtataaaaatgaattaatttataatgcaaattgttgggttgttgaaaagtaacaaaatttcagaatggaaattctcctttatttaatgctaaaaaacattatttgaatgaaaaaaataaataaaatagagtgataatatttatttttatgtaaaatgcttcaaaattcgaaaatgatcaaattaatcttgaaacatttttttaatgtgcaattgtgggcaaacgaagtcaaatcagcaaaatgaaaccaaattgctgggtaatcgaattaatcagcttattcaatttacgaaaatggctaattgtttttatcaatttgctagtcacatcgaaaaattgtaaaaagttaataaactcataaaaaatgacaaacggtgccaggcaacaacaacgcgaagcaattaattggatgatatgtaaaggaattgcgcctgcttttcgcgcattcttttaccggaaaaaggatgaacttttttattagccgtatattcattgcacgcttcaataaaatgggttggcccaattaaaatgcgcatttattttgttttgccggagggggggggggggaatgacgcttaaatgtgactttcattcatttgatttgccttttgatcctatcctttttctcgctgcttttttggcagcggcctttgcttttgcccaattaaacagcgaaagtgtccctttatcaacgggggggggcaattgtcgtcgtccattaaacggtgaaatgctgaaaaattggcgtgtcgtccgtcggtttggtcacccaggaaaaaatgcccagggcaaaaaggtgacaaaaaaattagaggagagagagcaattattttcatcggcacacgaaaatattatgtgccagagaattaaaaggaaacgctcaaaaagttgcatttttggattttcacttttcagggaatgaaagaattattgacagaaaacaaattaacaaaacatatataaacaatcggtcgattagtgaagtcaatgagaggggaaattattattgaaatgtcccttccatcaaaagcagacaaaatgtttttggccatccgttgatctgtcgccaaataggcgacgcgagagctgaactgtctgtcatcattggtgttgatgccatttaatgtgaatggaagtgaaaggaatgaaaagccgcaataagcagagttggccaaatggcaaagancaaaatcagcttaaatgagcaaaaataaaccagaaaaaataatgggcataataa

SEQ ID NO: 8651 - DNA, 2002 bp, Heterodera glycines
ggttttggcccggataaacccgacggttaagtccatccattattataaaattttgtgttcgcttgagacatcgaaaaatttatatataattttcgccatagtttaacaaatctcacatcccatttacttcctaaatttttacttgggtttaacaataaaataattgtaaaaaatgaattcaaaaagaatgtaaaaagtagcaaaaatgaataagacattttacttccatgttaaataaaaatacgaaccaatcacagatgggtcagtgtcaggtaaatgaaaacaataataaaggagaaagatggaaatgatcacaatcacagcagtgaaatgacccaagaaaaacataaataatttacactgtattaaatactggtcgggttgttcggtctgcgcattttgtggtcaaaaacagaaacattatgacaatgcgtggcgatttttggaatttctaagtgcgaatccttaaggggtgggggacaacaaaaatatacacaaacaaagggcacagacccacggcatcatacagtgtggatggatggacaatttatcaaaaacaataaatatgttgtgtaatacccatgtcaggaaatagcattgtttacagacattagaaatgaaatgtcagtcagtcggtcaatcggcagagatcggactaattcaaaaaggaattttgtgaataagcaaacgaaaatcagtttaattttgagtgtttcctatttagtcaaatctctgaaacaatcagtggagggatgacgagttgagcaatggcaatgaatgccgagaagtgttcattatggtgtccgtcaaattagccgttgttgtcgtttccgctgatgatggcgttgacaaatgttttagttgcgttgcggcggatgttgagaatggttgtgctgcaatggctgaccagcactgattgaggaaacgagcaaaaagaacgcgggacagtttgagcatgacgagggtgccgagttggaccagaagcattaggtagacgacctgactggtctaaagggaaaggcatcagaaacattgccttatattaaggagggggtggggttgttaaacgaattttagaatatataagaaaatgataagatttctaaaatatttagtccttctattcatagattaccgtccaaagtccatccatcgttttcccctcaaatgctgaatgggcggagaccggcattgaatttgcgctgtaaggagcggctgaagtgctgtgcaatggcgaaagggttgtgcccatcattgcatcactgagaaggcatgcttaaaaacggaatggcatagcccgattattttaaaaaattgcccctttttcaaattaaataattatgtaactcttccccaaagtggttaatgttttggtcaatttctcaacatggacacaccttgttcgcctctgcagtgcgagtcgcttgcactgtacccgtgcatgggggaaagcatgggccggtagaaaaaaccaccggtgccagtcgcttggacagttgtttggacagattgaagctgttgggagagacggcgtacttcattttgcaattcggtgatctgtaaaacccaataaataatatcattaaaaatatttttggtataataattaatagaaatatatatttgagaggatggaatggtataattatgctccgtatttggccaaccagctaccttctgtttcatctccgtctccactcggttggcctcctgcttggccatgcgttcggcttccttggcaatgccttccctttgctgtttcaattcgttctccgcccgcgccgctccgttcacacagcgcctgctcagctcaagcaaatgctcactgctcagcgacatgttctgctccaacactgtcagtcgcttgttcagtttcatgaacaccgactctttgtgtgttgaactggtacccggcataggagtcaaattaccttaacaattatgtaacatgccatttcgcccgagaaaactttaaaaatataaaaaatctaagttcccttat

SEQ ID NO: 8652 - DNA, 499 bp, Heterodera glycines
gatttgccttttgatcgaattcctttttctcgctgcttttttggcagcggcctttgatttttgctcaattaaacagcgaaagtgtcccttttatcatcgggggggggggggggggtaattgttcctgtccattaaacggtgaaatgctgaaaaattggcgtgtcgtccgtcggattgtcccccagggaaaaatgcccagggcaaaaaggtgacaaaaaagtgagaggagagagagcaattattttcatcggcacacgaaaatattatgtgccagagaattaaaaggaaacgctaaaaaagttgcatttttggattttcacttttcagggaatgaaagaattattgacagaaaacaaattaacaaaacatatatagacaatcggtcgattagtgaaagtcaatgagaggggaaattattattgaaatgtcccttccatcaaaagcagacaaaatgtttttggccatccgttgatctgtcgccaaatagccgacgcgagag

SEQ ID NO: 8653 - DNA, 1317 bp, Heterodera glycines
  unsure (1)..(1317): unsure at all n locations
ctccatctccccctcctatctctccatctccctctcctatctctccatctctccctcctcgtctcccctctcacgtatcccacttattctcctcgccctccattcatttcaatgtactcacttgtccggagctctcaaaactgctgcaatttgtgcgtccgttccttttcccttggtaagtacaaaattatgatccaattcaatcggttttccgtctttcgtttggagttttttctcttcccgaaagtcgaattctgtgcctgaaacggtgagtatttctccggttggaatctgatcagaagaagtcggcgtgaactaaaggaaatggtttaaaatggatttgaaatgggcaaatcactcgcccaatcggcggccaatttcagcgaatgttcgcggatgtccccgtggccagacaaattgaaataattgtgctggacgatattcacaggacagggcaaatccgaagtggcctcaatgtcctggccaaatactcagattatcagtggcacagttcgcccccctttttcggttgaatttttgcaaaaaagtgaatgtccgttcatccctcctcgtcattttttagccttgtctccattttctcaccattcgtaatttatttgcggtcagccgataagtgacggacactcgcaaatttccggggaaggtgccctctccgtcggcactttccaaagagagacggacgcccgagggccatttggccgcggcattgtcacacaacggttccatcttccacacctttgttgagcttttgctttctcatccaaagtcattggtccccgtgaaaatttacaaataatgcttttgattgacattaacttatttttatttaaaattttaatttaatattattatttaaagtcatacattgagattaattacttccttttaatttgccattgcccccccccgtacttttctcccaaatgtctctgtccccccgtgcaattggtttttcccttcgttcggtgtcagcaaaaattcctttccatcaaccgtgaatctaaatgacttttgttggtggctgctcatttccatcctgctctgctgctgatcactctgctttttaacctcgctcttccgattcgattcgccactcttcccacaatggcaccgaagaaagggctgtgctcgacgtaattctctaaactgtcaaatccgaggaccaccgaccgcagctgatcctgaggcgttggcaccagccaatcgcggataattgcaccgaagctgatcactttgacgaccactccgctttctgagcggagtttgcactcgaaaacatcttggncttggaaagag

SEQ ID NO: 8654 - DNA, 3715 bp, Heterodera glycines
gtgaaaggaaagcgaaaggggagggggggggggggaaggggacggacactaattaatcggactgattgaatgagttaatgaattgttttgtttgcattgagggagaaaaggggagtggagaagcaaacgaactgtcctccgaaattgaaaaatgataagccaaatgaatgaatgatgttggaatggaatgcgagttgaggtgttttcctcccttttctcttccctttcccatttcccccatttttcttctcttttcccatttctcctcttcctttgtcccttattttattcccttccattttctatttcatttcttcacttcctccacctttaactatttattttctcatggacaaaaatgccgaaattggtccatcattaacaaatggccgcatttctttggctgtcccaaattgcgtatgcattcgtttttgttcctttctctccctttctctcttctgctgattggtttggtctcgcccattcagctccatctgtcctctgctgcttctgatcactccgagtcgtcctccgccactctgtttttgagtctgatcagttggttttgcgccctcgggggccttttgcttggctatggaacaagcataatcagtgacagcttgcacttcatgacagccgaccttcgtctgaacactttcaggcaataatgcttagatttgcttgcttttccaatctaagcaaagtcagggcattaccaccgcttctcttttggttggcggcgcatttggcgcattggcggggggaaaagcggccgatttggtcggccgacgacgtgccatggtcacattgtgcttcttgttcatcgtcggcaatttatgctcttcgttggctccgacttttcccgtattttctttccttagtaattttgagcatccctccaaaattcaaaagttgcttctctccgcccgcatttttctcggcttttctctcggcggcttttcctctgtcgtcccaatttttctctctgagctttctccgtcttcaattcgtgctcaagttgtcacccgtagcactttgaacatagtcgctggtcaattgctcgcttttgtcgtcggtgcccttttgggctccgtttgggaggaacggtaaggcgacggattgcgcggaattgcctaaattgtcgtgatttttgccaattccccgccccccccccagattggatatttggcgatggatgaacgctgtttcgctgttccctgcccttctgctgctctccgctttgcttctgttcgtccccgaatccccgcgttggttggtctcttccggacagatgggcaatgcctttgtcgttctgtgccgaatccgtcacaacgcggaagaagcacgtgaagaattggcggagattgcacagagccaaacggagaaaagcggcaaagaaaagctcaccttttcggcatttttgtgggatagatggcttcgaaattgtgtgatgatcggtaagaaaagccaaacggatggacaaatgttaaccaaaaagcaaaattcgattaacaggccttggaattgcactcatccaacaaattgtcggagtttccgctccgatgtattacggcacaaacattttggaacggtgcggcatggacatcgaattggcaatgattgtcaatatcgccatcggggtgcttcgtccattccacccattatagctaattactgtgctaattatgccaagatcgtttccttggtgtcaatggcatttggcatttggctgatgggccgttgcggtcgtcgtccgatgcttttggtgggaatggtcggctcttcgctctcccatttactggtcgcacttattttttggcttatgcccagcggaaatgccaaaggcgtagtggtgctgcttttgctgctgctcttctgtgcttttatgcaatgcgccatcacttcggtataatccgccgatggtcggatcggaaaccatggccaattagtttcggacagtgcaatttaaaaatagcgaaattctaatttattatgtccaaatggcaaggattttatgtaaaaatactagagtgcagcgggaccgggaattttgggcttaaccgggaccgggaccttttctggttgaaaaaccgggactttttgctgggaaaaccgggaaaaaaccgggactagtcccggtcccggtcaaaacggggaccggtaaattggacaccggaaaattggacaccaagcggaaaattggacactgtcggaattttggacaccaaaggaaaattggacactaaattcctcttttaaaatataaacccaggaatttaaacactcaatatgcacaataattgatcaaatgtggcaaaaaagtgtacaaaattagacgatgattgatcaagatgccaaaaaatgtacaaaattgcgtgatgattgttcaatgtaccaaaaaatgcgcaaaatgggaactccataaaaataaaaacttttttcgttatgaagttgtccgtgtccaggtcccggtcccgctgcactctaaaaaataccaaatcaaaattattttaaaataattttattttgatttggcactttttcatgctgctcgagaatcttgaactaatttgccttcgtttctttgacatcactgaaatttttagccatacataattttttgcggatattttactgtcggaaacatttggcacttttaaattttaaaataactttttctttctgtttccactggttaaggtcacttggtgagtggattgatttgattcccttggcgttccgttcggccttttgtcaccgcccctccccaccaattgccattaattaataattaaggttcattctcgcggagatttttccgctgcgtgtccgtgggatcagtgagtgtttgatcaattgcgatcattaaaaaacattggcattccgtctttacctctcttagccatgggtttgtgcagtgccatcgtttggatgaccaaattcgcttacggccttttcttgcccttggcaatggatttcctcggcatttctgctacctttctgctgcttctccttttcacttcactttcaactatttttgtgtggctttttctgcctgaaactcgtgacaaaacattggaagagatggagaaacagttcagggaggaagattgggcagcactgaagaggaaagggaggaagagaagcaaagagacacgagagagaactgaagacggagagagcggagagagaagctaagagacatgagagagaactgaagacggagagagcggagagagaagctaagagacttgagagagaactgaagacggaaagagcggagagaagctaaggggagaaaaagaacgaaaaagtgcaaaaaggaagagaagaacaatagaattaacgtccatcccaaaaattaattattgtaatttgttgctaatttaaattagtttccttatggcattctgccttttaaaaataacgccttaagcaatgaacgaagcaaatggacaaaagcagaaaagaagaggaaggcacaaaaccgaatagatccttttcttcgtataaacaaagtattgccaatcattgagcatatgtttcagcagagaacaaagaaagagagcaaaggcactgatcgattaatttcgatcggtcggtcctttgattgctttatgcccttccgatcttccattattttacattccttccattaaattcgcttttttgtggttcaattaaaaatgcctgcaggggaatacgaaaagggcac

SEQ ID NO: 8655 - DNA, 732 bp, Heterodera glycines
  unsure (1)..(732): unsure at all n locations
gatgaaaaagtcttctcattgcaggacaaagtctgcgcactttgaccattgagtcgcgagacgaccncaaagtccaggagatttgccaattgttgttgtattggctgaacgatgagttggcggaggaacggattgtggtgcgcaatttgcaggaggacatttatgacggacaagtgatccaaaaactgactgagaagttggcacaagtcaaggtgggcacgggcatttggccaaggaaattcaaaatggtaaattattggcactaaccaaaaaagggatttgaaggacaatgaaaaaaaaactaccgttcaatgtaaagaaaagcacagattgaagttccggaagtctcccaaagcgaagaaggccaaaagcaaaaatggcgcataattgtggacgcattgaaccgaacgcttcacgagggaggcggaggacagagcataaatcagccggggggacagccaaaatggacagcggaaatgatccacgcgaaggcgagacggggaaggaatgagaacgactgatcagaaccaattaatgatcagagggacgggagattaatcagagggacgacggctcatccaattgtttagagtgattaatggattttatcgccagagagtggttgctcaatgatggttattgaccaaagtttaggacattgtggccatccttcaccttctgatcactctcgcccttcattaccgggcaccgattcgcttcccgaacaatgtc

SEQ ID NO: 8656 - DNA, 3075 bp, Heterodera glycines
agtcgaaatttaaaattctacaaattttatcatcttgactcaagactttttccgccactgtatttggtatcattcgaaagttttacatgtttagaagctgtttctaagctattgcttatttgttagcgattatacaattaataaaaagttataaatgaaaattgcaaaaaaatataatttaatttttgaatattttcttaataacttttttgcatgctaaaaacttttgtttttaaagctaatagagcatttgaagggctttcgaatgatacaaagattattagatttggtcttcaatgaaaaaagttacaacccaaaaacgcgggctgccgccaaaacgacctggtcaccttgatgagttcagactcgctcggtttggccggcacggttgggccccaccatgcttttccactatagcttttttctttgtcatctaaatccaacattgttggtatcattcgaaagctcttcactgctcaaaagttcatctttagtggtgcattttcacatctcgtcccaaaaaacgaggcgagaatcccaaaaatggcgagagttgtcccatccctggtacacatattctttaattttaccgatattttgtttgctccttgggaactgctttatttcatcattgcttttttgcgcccgaatgctttttttgaacaaaaaattttttgcaaatcatttggtaaattcaagcaattggacaaccaacgttttattcgaacgaaagaatcaacaaaaaatttcggaggaaaaacgagaacatcaaatcagtttcctattggtgagatcgatcatttctcaaaaataattatacttagtctatttaagggttttcggggtcgctgaatatgaattatcatttatattgcccatttcttaacattcaactcaaatataaacataaaacagcacaataaaatttaaggcttcttgtgtattcgaacgaaataatcaacaaatgaaagtgagcaagagcgtttctgagagaaaataaatgaaaatgagcatcaaatccgtttacattactgagatcatcgacaatctcacaaataatcactcattccgctgattactgggcccgggagtcgtcgagaacatttcatcgttgctttgacccgcttcttccgttggtggcgacaatggcctaaagaattaagtgcaattttgaattatttaaagaattgaaatgtattgctcacccattgcattttttgtcatataagcattagggctgcttattttatgtaaatacatatttttttcctggtttctccatgctctaaatagtaggaaaaacactttattttttgtgtttgcgaacaaaagttgggacttttatttacatattttgggatttttctacatattaaatatgtacatatttttatacatattttggactttttcgtacatattttgcaatttttcgtacatatttttcatttttttacatattttgaggatttaggatttttgagaatttatagaaattttttgtaaaaaatttaaaatttttttttgaaaatgtatcactaaaaatcgatttttttcaaaaaatgatatatcaaaaattaatttgtaaaatattcaaatgtgattctaagcctattttgtatacatattttatttacataattcgcaaattttcttacataaaattagcagccctataaataaataaatgttcccaatttccaatttcaaaattcatttgtctttttggcaaagtgtttgtcccccttttcatttgcataatctcctctaattttggttattcaacagatgtcggcaaacattgctaagaaataagccccggttaagcagctaatagtaagaagcattgaatcctttctgctgtttgttaagccattgagagttcatttgcattttttcttctaaaattttctaattaatgccaataattttaatcatttccaaaaagtgaaataatttcaaataaatatttccgcaatatatttttaatttaccctattatttcctcaaagtattaatttgccattgtaaacatatgtgcacatataataaaataaatatcattggagaccatttatttcttttttatgattctaattttaaaatattttgaaagataaataccgtaaacagtgactaattactgtaattatggccgccacaattgcgtcccatgcgccccaaatgaaacaacaaaatgtgcagattgctgaagaagaaacattcggaaagacaaacgacgaaatgccaaacggagcacagaagcagcagaatggccaagcgaaggagaagcaaaaagtgggccaaacggcgccggtggcacgtccgctgacagtgaaagattgggactacgacgagaggggccaatgcggaccaaagcattggctgcgcattgccaaatgcgaacatttgggtgccaccttttatcattgataaaaaaatgccaaaatgatttttgaaccctttctcaggcgatcaccaatcgcccattgacttccaactgtccaaaatgcgcgtccatccgctgaacattcacccgctgtgtttggtcaattttaaaaagcctttggctggccagctgatcaacacgggctgtggaagtcggatttattatatgaaattttaaaataacttaattatattaaatcatcatttagtccaattccaacccgacccacagattgaaccgcccgaaatttacggtggcttattggaccaaaactatcgcttcgttcaataccatttccactgggcacagaatgacaatgaaggttaataaacctactattctttatttatgtaaatgattttcaagtttgaattttagaaaaaatggcaaaattcataaatttaaattaaaaaaaaattaaaaaaaaattagggtctgagcacacaatcggtgggctgcgttacccagccgaacttcacttggtccaccagggtgtcaagaatccggtcagttaataaaaaaaaacattttcgacaattaaaaaaaatatttgcccattttttcagtccaaattggccgttttgggcattttcctgaaattggacaacgaatcggagaacggcgaa

SEQ ID NO: 8657 - DNA, 910 bp, Heterodera glycines
cgaattcgaattatgaacacatttaaaaaaaaaattgtaatgataaaaaagtgtttccgggggtattcggggccgctgatcacaaatatgatacagcgatatcatcaattgtatttgaacaaatacttcacaaattgaacaattcaacaaaatgccataaaatgaaattgggtaaaattggcgccgaaatcaattttcgcatgttatgtgatacaaatagaaacgcacagtgtgaatctgatgtttttacgatttctaagaatttgttgtagccaattatttcaactatgaaccaactggataattttacgaccaaaatgctttatgaaaaattggcattaggaaatgatcagtttgacgagtggcttaaagagaggcttgttacatgccaggcgtacgtgtccccagtgtggaaatgaaatgggacgccgccaaccccgccaaaacaggaactatggattgtggaagttcacaaacgcacaatgccgtcgcccggaaatgggcttcctcataggcaccttttttgccggctcacaccttactactaagcaagtgtttgatttgtcatatttctaggcacaggaaatgggaactagcgacaaatgatgcgcgaaatagacataggaggtttccataattagaagcttttgtgaagttgctccataataaatatcattagggcctcaaacaattgtagactggcgtaattttttccggaatgtatgcaccgaatttttcattcgccatctatgtacggtttgttggctgtcgtccgcctctccaattccaaatctgttcgcttttgtccgttggtctgcattttgtgcaataaatgtgaattttgttgaaaatttagtttttgattttttgttcgaattcgggtccgaaatggatgccggattcgtgatca

SEQ ID NO: 8658 - DNA, 1767 bp, Heterodera glycines
  unsure (1)..(1767): unsure at all n locations
aatggaagcgctgaagaaagtgatcgattgnnagcagaatgccgccattgacactgaacattcgctgtcctcaaaattgccgcncaattgttgccaggaaatggcttcttccgcggaacattttgtgtcttcgtttgtccgttacgaggggtaaaagccatgccaaatttaatttataaattgaaaatgttctaagctccctgaccacaccgccatgctccgaaaatgtcacttggacagtgttcactgatccgcttctgatcaccagagagcaggtggaaagggaaagcagcaaaaaaacaaaacaataaattaatgggattaaattaattttaaatggttcaattaaaacgccttcttaaagaacctctaaattcctattcaaaattaattagatctaagcctaagctgtgtaaattttaattcttcttccagcaattatttcgtatatttttctttgcccttttttatttttttaacactttttattacaaaaaaacgttgcttgatttttgtaaatttcagatgtctctcctccgcgccctaaaagactgtaaaggcaatgtaatcgaaaagaattacaggccgggtaataatgaattgtaaattattatttaattgaataaatttaatttagttcaaaaatgttcaaatgatcgcgaagtgctttttatggccgcagcggcggacgattgagcaaaatgtgaaaaaggaaaagcaattcgaaacagaaatttaataataaatgtaaatttgagattagcaagtgaattatttactggtgcttaaatataaatatttctaatagaaaatgaaattttttttaatatttaagttgttaattaatcacgttcgcttaataaatatttttgtaatgaaattaaaaaatagattttgttaaaatattaacttttttctgtattcgaatcaaatcatttagtgttatttataaagctgtaatttttaatagtctttttaaatgaatgccatactttaagtggattcattatttgatttattttcaaccaaaattaacccaaaatcttaaattgcttattagagcctatgcattttctgtttacattacaaaattgaagatttacttttttgtttgctttttctgtttaacaatttaaacatttcattttttgtgtcttatgaatgaattcgactgacagatttagttactaaatgtcaaaaaagtggaataaaaatcattaaaaaagtcaaagcaaaaaaataaataatatttttactaatattttttggtagcaaaacaacataaaaggcctatctaaaaataaaggttaaaaaatgataaaatgtggtcaaagatcactgtcactttcactgtacaattttgaacacattccatcggtgggccaatgtttcgacttgtgcttttcgccaattagtaatatcatcatcggatcatcaccaaacaaattcctttttttccgcccgcttttaattcctcattaatacgaatcataataccaatactaataataataataataatataataataatattttataataataccaataataatgctttgctgcttctgctgcttccaattctgtggtaatgggcgactgttctgtcctgtgatcgatgttttttttctcccattttacggcgtccgtttttcccgccatacaaaagaataaattcgcccaattggccttttcccccattttccaacgtcaaaagtgaattaattaatcaaattttaaaaatgcgaaagaaatgacatcgaaa

SEQ ID NO: 8659 - DNA, 2024 bp, Heterodera glycines
ttgatcctcaaaccaaagggtaagcgaagtacagtgtctttatctgctgacgaagtgtgcatttgttggttctgctgttcaaccccaacaacgttttgttggtttgtttctgattcaaatcctaaaccatcctccacggtttctgacgaatcatcagaagagtcaacgatttcaccattcaaattaagctaaaatactttcttttcttcatcgtcaaattggactcacctgttggttttgcagcgcatcattctcaacaatttcttcgttttgaccatttcttcccaataaaagttcaatggcaacagtcggagaactaaagaaagagaaaactttcattgaaatttgaaacaaacgaatattaattaccccgttgtgttaatcaaattgcgaattgtctcactcggaatttgcggaaacatttcggaaacttggttcaccattgctgcagtctacgaaggacaaagaatgattgtctaaacaaagtgatttgccacctgttcatcattgaatggctcgaaaagataacgcatccaccaacgagcaaagcgattattttgtggcgaaaatgcttcgaggaaaacttgcagcccattgtcttcaatgccagcgatgttttgttgggggcgcgtcaaattcaatgccaatgttttacgacaaattgcacagctcgagtcctgctccaaccatcgacgcagacaatgttcgtggaaaatgtgagcacatggcaattttcgtgcacttttcatcggttgcctattaatgccaaaagaaagcgtaaaaacacactgacaatgaacaacaaaacacaccagcaaatcgtacactgatcattcttcaacaaatcttcctctgtagcagtctcatagctaaaaattcgtacatttcaatgaaaaaatgcttttactgacttgctgttaatgtgccgcatgagttctttttgctgcaaatacttccgaattttgcccgatattcttctatagtaatgctgcgcttgaaccaccaaaaagacgcaacagtaagtgattgccaattgggagtagaatatcatgtgcaagtaattggcaaactcgagacaatcccggaccatttcgtaagccaaatcgaaataatgggcagaagacgaatggtgactcctttgggcattggcatcgactaacatggacaatttgagcagaaggtgcatcgactgcagcagaagcaaagaacactgaaaaagtggaaaatgttaaaaacaggcaattaattgcccaattaataaaagaaattacgtcggctgcaagaaacaaacaatagctcagattgatgtaatttttgatcccgaaaacaaaaaacaacatcagcaatgatgaaacacaaataattgatgaagttacgaagagacgctggcgcacagaattattcgaaatcacattctgagcctcaaaaatgaaatattgtgtaatatggaattgtaaataattgaaagtacatttgccagtcttaaatttgccaattcgaggagaaacaaacacaaggcttgtagcccaagccaaggagtccaaatgctaatatcttcgaacagattgtgttgggaaatgaacaccagaaaagtcaatttagcagagacaaaacggcggaagaatttcctcaaagctgaatcctcctggaaagcattaggtattttttgttttgattcaccaaacaatgtatcaatgaattttggtccaccaaaattttgacactttttatgaggtaaaaaagcacctgatttgacaaagcaccaaacatcaacaatatcaacgactttccaagcaaacagattacagcacagcaggtgtttatcatgaccttaaaccgaaaagaattgagggaggaaatcactcactaacataaaacaggaaccgatgccttctgattggagcagtaaaattcaggaataggaccgtcggcagattatattcattcgcaaatgatccatcgtcacgtttttcaaaatggccaccactttgaaactgttaaaatatgtaatttttaaaaattgt

SEQ ID NO: 8660 - DNA, 1377 bp, Heterodera glycines
aaaaaatgtgagtccaatcccgcagcggtatcggcaaagtcggtttttggcgggatcccgcgaggtctgtgaattgcattttttgaaaattggaggacattatgacaaaaatatcgttaatgcatcgcggaccgggtcagtttagtctggccggtttagtctggccgttttagtctggccgttttagtctggccgttttagtcagagggtcggtttagtctggccgttttagtcagagggtcggttttagtctggcaagctgtttttgcccataactcttaaaatgtttttttgtcaattataaacaaggaaaaacttaaaaatatctatgtttagctacaatataaatgaatatcccaattagaaaataaaaacaaagcgaaaccttcagtttggcaccgcctttttatagcttcaggcaaagtaaaccctaatttttttttcacgttttttctccatagaaggcttcaacgggcttttgcttgtttatatccaactgttttccgcttcatcaacacaattcgatatgagaaaagtcaattgatgcagacatcgcacgatgcatcgcgttctacactttgtttgaagcttctaacatacatttttgtgacttttttcatgactttttacactttttaaggcaaaatttgactttttgtgatgaaaattccgaaaaataaatcaatcttcgggacggaacttaaatttcttataccataagggctcaaatgacgggactgaaaaataaaaaataaaatataatctggcggtataacatttttgaatatttttttccgttaaaattagtcgttttaaattactttcttcgaagaatgtttaaaacggcttttgggtttaaatacatttggctaatttttcaggactttttttgggtttatttagtgcttttttggcatttttatatgactttttgctcattttttcatgacttttttgcattttttgtgactttttggcattttttatgactttttcgtgactttggcgatttttcatgactttttaagtcgacttttttgagatttttcgtgacttaaattcccatccccaacaataacttcgcagaaaaaatatgcaaaatcataaatttataactctactaatcagtaacgtttgggtggcggaatttttcgtcattgaacacaccgagtcaattatggatccctaattcaaaaagtaaatgaatggtatggctgtgcttttggtaaaagtcgggaacattggtcccataaaaaaaggataaaaatgctcattttaagcgattctgagcagtactcaggggtattcgaggtcgctgatcacgattctgatatttatttcgaccagatttcgaaccccgaacccgaattcgaacaa

SEQ ID NO: 8661 - DNA, 2917 bp, Heterodera glycines
  unsure (1)..(2917): unsure at all n locations
tttacgctgtgatggatatactggggggataacaggtctatttgccagagagcctcccatataagccgcccactgatcggagtgaataatgcaataatatttgtttgagcaaatttcgagtgaaataacaaaaaaaaaatttgttcgaattcgggttcggggttcgaaatcggtcgaaataaatatcagaagcaattggatgtacaagagaaaagttgaagcttcgaatttttgaatttctgcatctcatcttcgttccgccatcgaacggttgaaaaaattagagtttaaaacctaatacagaaaaaagacgcggtcgatgctacgagagctgcactgatttgtgaatgaagaagtccgagctttcgttccgaaaggcgcaacgctcaagaagtctgatcaacgcagaataattttaacatgggcgtcctttccagcctcccaaagatcagcgcccaaataatgataggcccaaactcaaaattgctcaaaaaaaaaacggttggaatgatttagaaaagtgagaaaaatgcaaattaagggcgcgcttgacattttcatgtaaaaaatcggatactgaattgtccattttcgacggggactcacttatccattgtcaaaacgaaggtaaaaaccataaaatccaaatttatttggtatcaaaacaacggttttctgcatataaagccatttgagaatggataaaactattttttaaatcccgtaaatggtaaaagccggggctcgtagggcctcggtcgcgaaaaagcccatgtgggatgggctcgaaactccgcactttgtccctctttgcacgggttgttatttccagcccaactttaaatattcgtctcttttaaaataaaaggcacgagaatggcataggcatttcttgcatcttctgctggcatagtgtaacggtggatagcgtttgggctggtttgtagcaacagaaagggcttcccataactccgattttggaggatcagcccatcgttgtcgctgatgtcaccaggaagaatcttgaaatttgggtcgtagttggaaatgtcagtaccttttttagactgtcaatggtcttttctgtctcactttgatgtttttgtttttgattagcctttggacagccggactcaaaggctcgtaaagaatgtttttgtgtttgttgtccaatttgaactccgagagaatatactccactccgagttcctgagcttgtcgaagactgagcattgctcccccaacttgcacaatctttccactcgctgttcgaatgacttcgatccctcaaattttggttgggttaccttttcatttcggttaacactcgaataaaaaagcaaaaatattcgaattataaataaattataaaataaatgctgcatatcgtacagcaagtgcatgccgtacctctgtgtttgaggatttgctcccctgccttaagccctgtgattactgtgccttttgcatcttccattttggtgcccaaataatgaatttttctaatgtattccgtcccggccaaatcgatgcacatcgttgcgctaaacaatgaattaaattcatcaaaaaaggtaaagcacagtgaaagtccaaaaatgatataggccaaaatgatataagttgagctgtgagtggggacgatgtcaccaaaccctaaagcatttagcagaaaacgacgaaattcggtcagaaaaaccaaaataataaaataccgacggtggccattgttatgaaacagaaataaaacgcttcgaaataagtccatccctcccatnngtggaagaggaaaccgccaatggcgcagtaacagaggagcacgaacaaaaccatgaccacgggaatgcgcagttcgtgcggcgtttcgctctcctccacgtccgcctcgtttatttcgttcagatttatgcttcccgctttggtcatcgtcgagacggacgctctttcctctgaatgcttttcgattaagacaaattgcgcggacacttggtcttctgttgctccttttacgagtccaatcagaaagcgaggacagtcagttgttgttggactcataaaggagagaagaagccaattggggggcggggagggcaccgtcgtgggaagaggcggaagcggtgcggtagcgagagaagcggcgcgattgcttacggacctgaaaagaagagaaaggaggccgaaaggggacgacggcaccttcgtcttaaaagtgcggtaggttcggtagagaaaattcagaaaatcggacaagaatttgccaatgtccgcaattgtcaccagaagtaaagggatgccgaaaagtgcaaagcaaatgcacgcgattcggccaaactcagtctgaagctgacaaagttggcatttccatttgaaaagcatcacatcgctttagccccctccccaaattttccaacgataccatcgggacgagatttccatatcctgaaaaggataaatgggaattttttggactaatttgattgctttggaccaattgtcgtgattacggtcgttgcgaagaataaactattcgcataggtccacaacatctcggccccgtgggttctgttcagcaaatgcctttcattcgtaaattgatttcggcatgcggaaaatgagtgggcaattaatttgtcaaaatattcttggccaagtccgttgaacgattcacgcgaaataacattctgaagtcgatgaaaaggtgtcgattgtatgcatttatttgttttagggacctcttctgagtgtgtgagattccaaatggtgtcgtgaaagcgatctctgagcgcaaaaagttcttttatttctcggtccctcgtctaaatttgaccattagctaactttggtctcatttgatggcttaccaatatttcatttgatgcttcaagataatgctaaaatgaagactctagagatcccc

SEQ ID NO: 8662 - DNA, 2496 bp, Heterodera glycines
ttcattttataataaatattcattttgcttattttttcttcattcgaataccgaattccacctaaaaataataaaatataaaatttaaatttaaaatttaaaaaaaatcatattttaattcaaattttaattgaatcacacttttgtcaatttcaattccaaattctttttttccatttaatgaatgttttttggtcaatgtccaactctttcgcaaattgcttctgttttccttttcttaaccttctgtaaatctcatcaattcgttcaataaattcttgctttttcttttcataataatttttatcatttttcttaattttctttaaattaaattcttttttccatttgtaaattttctttcgactaattcccaattttacggcaatcttttgctcaattttagtccgaacttttgccgaatattttcctcttttctttattttttcctttatcacatgaaatttatgaacaatttcgcgtttttgctgatcattgaattgttcgttgttctgatcattgccaattgaatcttccaaatttaattcattttgatcattttgccaatttgagttttgatcaatttcccatccttggccaaatatttcaacaaaagttggccgagtttttccattcaaatcagataatttatgaacacacaaacatttatcggttgaatttattatgaatatcaacacaaaaattaaaataacaaatgccatctctaaaaaattgagatttttaaaaattaaaaaattcatttggttttattaaaagcataaaagaatcttagtaaatattttaataatccttttttaattacggaagtttttaaaaaatatattttgttaaatcataggcagaagaaatatttattttattttcatttacataataaaaatttggataaacatttctttttatgtaaatatgaaaaaataaatttgccaataatttggcattttatcattgaaaaagaccatcatcagaagagtagaaaaattttaaaaaatcaatttaaagttgatcagtcaaattccttcttcactttataaaaaatattttttccccatttttgttcgttagaaaatcataaaaatcaaaaaaattaaaattggcactgacgaatttaaaaaatgtcattaattgatagttagaaaactattaatgtaatctattgaatgatagcataaagtattattaatttggttgaattttagcaaagttatgaaattatgtgttttacattttttgtttgttttcctaccccttgtccggtttaagaaacgcccttagtgggcggaatttaagaaaaggcctctagcaccatagttctaagccttcaggtgctatgacgttactcaaaaaaccattaaaataaagtattttttgataagtaaatttattgaaaacaaccttcaaactcactggttcttaatttattccggcccaatcctgatgatttcaaatttgatgcctggaggtgtataaaaatacggaaaactcataaatgccgaacagatttatttggatacgaaattgaggaagcccccgaccatattctccttcctacaactttcgaagactgtaatcaaatggcaacttacaaaaaatgtgaatttggtattttttatcaggggaaattggtcaaaaacatacaaatatgaaattattggttgaacaatcatggtggaaagttggaatgcaaaaaacagaatcagagaattgtttgttatcaaaaattagtttatttggtacaccagggttagaaacttgcgtttacaaaaaagatgctaaaataaatgggacatttgtaccaggaatttggatgtcagaagataacaatcgtgcactagtttttgacaaaaattcaaaaaaggccgaagcatgcggcgaaaaattgcgcgttagtgcgcaagggtttgcccttacggagaaaaccaaattttaattaaaaaagaaaacgataaatttagttggctttttggatccaattaccatgattatcaaagaaaatagtaaaattcaaacatgcactgaaggacaattcaaaactattttgttaaacaataaattgataaaaattaaccaaatgactggaaaatataatcatatcgaagaaccaactatttacaatatggaccaaaaagtctggaacgaagaaaaactacctattttcccattcaaatattcaaacaactaacacttacaaatttaacaaataaacaaattgacatgttggaaatgttaaaagaatttagaactagtcgtattatatagataacagacccattgagcaaagagaaatttggacgtcaactcaatttcgagattcggcattattccattttttaaaatataattcctaaagcaaattaaaattttcacaatgtaatttattcagtaaaatttttaatttcagaaataataagaaaaatttttaatttttcttcctttttttaaaaaaatcaaatacataaaataaattttaattgc

SEQ ID NO: 8663 - DNA, 2716 bp, Heterodera glycines
tcaattatcaactaattgtgttaaaagaattgaaaatttcggcccagttttctttgccatcagcagaaatcatattcaattgaccattatgaacagagaaggctacgtatttaaacatttaccatcatcaaaaaatcccaaaacgaattcttcttttttttgtaaaaactgagaaaaaagagattaagaaataattaataaggataacggctgatcagttgatatcagccatttaagacacctgctggccaaccttactattctcaatttttttttcatacttttctagctttacttataatgatttacatatcctttttatatatttacataaaatccaatgttttaaaaaattaaaacattatgaaaataataaaattttctgcctatgatttaataatattttttaattcctttagtcttcccataaaaataaattacatttaaaaaagaatgtaaatttaaaaaatgattttgaaaaattccttatttatttttaataattaaaaatctgaaaaatagatttctttagatatggattttgattttcatgttttaattcttatgttattattaataattagttcaactgacaaaaaatttgtgtttaaaaagaatggaaaaactcggccaacttttgctgaaatatttggccaaggatgggaaattgatcaaaactcaaattggcaaaatgatcaaaatgaattaaattcggaagattcaattgacaatgatcagaacaatgaccaattcaatgatcaacaaaaatgtgaaatggttcataaatttgacgcaataaaagaaggaattaagaatagagggaaatattcgccaaaaatttggaatagaattgagcaaaaaattgcgaaaaaccgggctttcttccaaaaatcccctcttttcctattcattcgttgctttatagacgaatttctcgatttcggttcggtatggaaaatttacggctccaacaaataaatttccattttcggcggtccattattttaaggcaggaggaggccggatgtcgattgctgtcaccggtaaattttttgaaatttggctaggtttttaacagataattgtccaaaaaataataaatttgcgtaaaattcaaaagttccaaagtaaaatacttacattatccaataaaatttattattaattttaaaaatcaaacaaagtttggtcactatgcccaaatcggaacacagatgaaaacactgtttttaatccatggcagtcagcagaaaaacatgcgttgacaagtaaagtaattcgccctcacaataaatgcaaaatcaaaaccgaccccgcgaaacaaagaaaattggcaattttacgaaatgcccttgttggcagtttttacgaaaccacctaacaccctttaaaacattgactcggaaagtaaattttggtcatttttgaacaaaatctgttaaaaaatcggttaaaattttatttaaattttctattagtattttattgaatgtatttgatcactttttaataacatgaaaaaaatcggtcacttggaatgacaaaaattttttagtgcctaacttcaacctggacctggagcaagcacttccggcgcgctgactcccgactgggcattcctgagggtaggagtaccgtttgacgtgccgacctatcacaaactattagaaaaatgatttatcgcgggaaaggatcaaaaacttgggtaattaagccgaaaatgggtgggggacgggggggggaagtggcgaacgacagaaaatcggggttaaatgtatgccacaatgagtggtgtggtgataagaaaaggtacaattcttcttccctgaggggagacaccgctataaaaattgatgctttgagtgcaatttgctaacagatttgtccaaaaattgcccgaatatttctcagcatctcataaaatcacttgagcgatgggggcagatatgcaaaatctaaatgggaaaaaatgaacaaacgaatgaaaagataaatggcagttttcaacaaaaagtctttaaatgatcgttaacatccacctatgagagggtattgaacatgagcaaagaataaagaacccacgagaataaagagttactaaatcgggaccgggtagggctattgaaaaagcctggcatccgggtctggacccggtcgggaacccaggcccatcaaaccctacttcacagatgcatttaggtcggtctgataatctcattttttattttttggatattctaaggaagaaaaaagtagaaaatgtatatttattgtaaagtgaagaaagggaattcaactgacaaacatttaatattcccaatctttaaaaaaatattctactgatgatgatgatgtttttcattataaaatggcaaatgattggcatttccttttttcatacttacataaaagccaatggttttacaaaaaataaaatattataatttaataatatgtttgcataaataaaaaatggtattaaaaattttattacaaatactttatttactcttttaataaaactgaatgaaattaattaaaatctgaaaaatagattttctttatagatggattttagtattttaattgttgtgttattattaataatcagttcaaccgacaaagctttatctgttgataatttatgtcaaaagaatggaaaaactcgaccaacttttgctgaaatatttggccaaggatgggaaattgatcaaaa

SEQ ID NO: 8664 - DNA, 1031 bp, Heterodera glycines
tgagaggaagaaacatttgtttggtggtgaatttgttggcccaaaaatgtggcgggcattacacgtgaaaagcatgatcagatgaatgattgatcggtaaaatgatcggagaacatgtcgtgcttcccttcccttttgggtgttggggctaagcgactgatgagtgtctttgttttttcgatggtcagatcggataacgatcaaacaatctaaggattgatcgaacaatatggtttggtgatcagagaaagtacgaaagttatgtttgaccagaacgggaagtgatcagaccttaatggaaagacattttgagagcttaagtcgctgatacaataaatgggagtcaaaatgcgatcattttttgggggttttcgttgatcaaagcggcaaaaactaatgtgatcggaccacagagccttctcattgatgagtgagtgcttcttctagctttttgcaaactcaaaaacgaccagaggtaaaagaaaagtgagggatgaaggagggatgaaggagggtggctttttttgctaatgtgatcagagccgagtgctttcgactttcattcactcacttctcggaggagtgatcagggcggaaataagcgatcggattgggccaaagggatgtgggaggttagaaagtgatcagttgttgttactcccacctccccgccccccgagcagagtaattagttgagaaaatttatctattttttgcgtcactcaattgtcgagagttcaattcttggtcttgggcaccgattcttggaagaaatcaaggtcaaatgtgataatttattgccgatgggatggcctgagaaattttctgttttctaaaacttttgcagatttaaactgttttcaataaaaagcttcttttttagagttgtttcttctcgacctgcaaggaaagaaaagtcgggaatcggggaggaaaatcccccaaaaaaaaaatgtcgggaatggcaagggaaaattttcaaaaatatttaggagcaactcttttgtcgtggaataacttttgcagaaaaa

SEQ ID NO: 8665 - DNA, 1868 bp, Heterodera glycines
ttctgtgtataaaataaatactgatctttttccgttcattttgtcccattaaatatgcgtctcccccccccttaatttgttggtttttgcttttccccctccctccgcacaattaaatggtaaaattggtgtagcgttttttggggggagtgatcactttgtgtgctccttctcctccccactgatcaaatcgtcgtcatccctttttatttaaaacgtaaatgcaacatcaaattttttgtgtgtgccgcccctaattttggcgcgtcccccgcacccccccccctccgggcgtaattgggcattttgcattcattccttgcgcagtgaaatgggttacaaagattaaatggaatccccgtgtagcaaaattattgggacggaatttcgatcaaaaaaagaatttgtgaaattgagcggaacagattgacagacagacggagcgaaaaggaaaaggaacacgggaaaagtgggtgatcagaaatgtgatcttaggacggggaatgatcagcagatttgcaaaagaagtggtcacgattaaaacgaatttgataatataaaaatgaaatctgaaactgtagagtaaaatgctcagcagaaagccgaataaaatgttttttttaatctgagtgatcttatagctgctttgaaacgtgatctgagagtaacgcaaatattgagaatgacttgttaaatgaataataattgacgtataatgtgatgaaaaaatggacaaatttgcgaacagaaatgataaatcaattcgggttggtttggtgacctaaagaagtaatggatatgatcaaaaacaaaacaaaaattgtttaatggtgatcgcgatagataatcagattatctcaaaagagattaatgagatttaaggcgatcagtcagtcggagcaaaataacttttatctcagtgatcatagaaaaaagtattttataaaattttgtagaagtgatcagattaagctcgtcggagatagaatttgttgttcattaaatgatcacgtcagaggggaaaaaaggtggacgtttggacgttaataaacaattaaataaattattcgcgagtctcaagcggttttgatgggtccgaggacacttcgaaacgaggtcccccgaggagacgacgcgaaacgctaatgatgaagatgatgatgatcgcaatagaaaagtggacgatgaaaatcatttgaatggaggtgatcggactaacaaattagtgaaggggtgaccgggcaattaatacaatttagaaaatgggaaggctacaaagagtgagatcagcaaggggggggggggtaattagtgagaattgaccaagctaattagattagcaattgtgatgaaaaaggtcgagagtcttcaaaaattttacgaaaatttccaagattatatgtatgttgttgaagtagtgattaggaaaaattgttttaaggcaaaaggacaattgaacaatttttaaaatattttggcattaacgcgattgtttttttgagaccatccccaattccccaaaattcggtaaattttcacgttcgcacaaactcaaaaatattcccattatatcaaattgctaataaaaaaatggtaacattttgggtaaaaagttatgggctgtatgggattgatcagactgataagaaaaacaatgaaaagtgtttatgggtaaaaaagaccaggaagttgatagaattttgagcaacaagttattagtcagggattctgacaatctgtgctggggaaaacccgaatttagggtaagggatgagtttggtgatcaaagatgaatctgatcagaagatacattgaatatgttaattgattaaaataatcgaaattttaggaaattttgtttgtcatgt

SEQ ID NO: 8666 - DNA, 2116 bp, Heterodera glycines
  unsure (1)..(2116): unsure at all n locations
aaaaaaattcccatgccattgccccaaaaaatgttttttaaatgacagcagcaccgtcattaatatggcaaatggttaaattgggaaacaaaattattttcctctgattaatgacattaatcttctttttaatntaacttaattttatttttaggaattccaaggcaatcatttgtttttaaattatatttaatntagtttacattttaaatttattaataaaattaaattatgctcattccccaccttcaaattgccggcagccatttgctgctgttggtaaatttttgccgcgtgtgagcttggcagattggcgctgatcagcacggcgctggccagcgggaaggaggcggcccggcgcgagccgaacccacacgacgaagagggcgcggaatggggcaaaatcacaatggcagttgcgtcaccttgggaatattgatttttaaacaaaattataagaattttttgaatttcaggttgacaggagtttttcgagaatttaaggccccatcttaaaaaaaattaaagaaaggttaatccaaaaattaaaaattaaagaaaaggttaatccaaaaattaaagaaaaggttaatccaaaaattatttgattttcactttaactttgattaaaaaaatcaatgaaaataggtgtcaggcagtccggcaggcaccacagggaaaaattttcgattaatatttaaaaaattcaaaaatacttaatggaatgtaatttcttcgacccatacgatgaaaggaatattttgataaaatgcctggacttcaaatcggtcgaattgtaatgccacacctgacattggcgggtgcgtgccaatgccatcacgtccatagccgtcggaagaatggtgaacttgatgaaagctgaaatttttttatttgatcgaggcaatttacactgaataagctcaaggattttttcaatttccaaagaaacatcgtcagggcatttcaattggacttcaaaagtcgtaggcaatttaaaaaattgaattcgaataattttttataagattttacttgaggtaatttcaaaaaattttgccatgcatataaaactgccaaattccgcacttaaaattccgtaatatattttcatttgcaatattttatttttgcatttcgccttaggcgtttatcaatattttcatgtgatgaatgaagcattttttgccccgaaaaatgatggcccttcgcccattttcaccgttcactttcgctgtcccacggcctcggcgccgtactccgaacgcactcaattcccatcatttgttcggtggacgacaaaaaaaaatttgagagaacctttgttggcgttgtgttgttgttttttttattgtcgaagcaaaagaagaagacagagttaagatgaattatttgacggtgaaataatttattttattttattgcgtcctaaaaatgaataaatatttttttggcgcgatgaatgtaccgatcgattacacaaaacggaatgaattttggggaataatgaacaaatttgtcataaatttttgtctaatgaggatggaaatgttttaaaaaattcattaggaaaaaattttaaagcgtcgcgaaaattaattttaaaaaagtaattttaaaataataataattattattattaatggaatgatcagagaatggaaaacgagaggattgaaatttaaaaaatcaagagaaagttttttagtaaggaaatgactaggaagtaaaatttcgagaatcgagtcgagcattgagttcgaatccgtgaccaggaattaatttcctaatacccatgagtcgaaattgagagcctcttaaaaacccgagaaattttccggtctgaaaacagaaatcgagaagggcccggtaatcgagaccaaaaccccaaaaggtcgggaatttctcgaaattaattaagtcaatgtttttgctaggaattaaataattttttgggagaaaatcccacaacaaattttccacgccataaaacattttcactttcatttatgtacattttctgccctttctatgaacgaatagaccattattgaatgagtggggtggtaaaacttccgcccccctcgccagtacaacagccccaaaaggggtgacc

SEQ ID NO: 8667 - DNA, 1341 bp, Heterodera glycines
gtttgatgcattaataagggtgttgcaggcggtaggatgaatcatcatcagccgacagcagatgtgatcacacgagaaattgtagtgatcagtgatcatcaccgttcatttcggaattatgaaaagaaatttaaaaatagtatgagataccgatacttcttgagatagttccaaatcagaaggaaaccgaaaatgaaattagaattagcaaaaaataatactgttttttcagtaagtctcccagatttaaagaaatttgccatcttgtcctagaaaatttttgaattttttgtcaatctgagtgttcttactttttagagtaaattgagtcccttcggtagaaaaatggttgaacactataatattgaatttaataatgtggaaaaagatgcaaattagacccaaaactttgcttttgccctcctgtccataaaatgcctcacataatcaatttaatagtggaaaaattatgacaaaaaaaattccctagcgaacaataaaaaaaacatgatttttatgaaaatgaattaaatcggtgaaaaaaagaattcaaaattgaaagaaaattttcatatgcccttatttaggggggggggggtgtaattttatttttattgctttgataaggaatttcaaaaaagaccaataatagaggcttaattattttagtggcaaaaagtgaaaaataatgatttgtaatcaaaacttcagaaaaaaatagttagaagatgactgaaaatccgtatcttagatatcagtattctttactgggcttggctatataccattataaaaaacggtgtaaaatgctctcaacccaacccaccacaatcgacccaacaaatgccctgcactaacctaacccactttttactcgatgcatttaataattggatgtggtggtgatggataactgagatatccttatcagagacagaaatcgtcgaaggattgtggcggaggaggcataataatttctgatttcataatttgggtactttcactttaatagattggatacgatttttgaatgtgaaaattatgaaggttttaaaaaatgttcaattttggttttctgttccttcaacttttacaaacggatgtgatgcgagagcaaaaaacggaacttgtggttgaaagtgggataaaaaaggcacatgggagaatttaaaaaacgatattttagtgtttcattagagcattccatttttggaagggccatgggttcgggtcccaccgggtgcacgtaatcatttatctctacagcagaattgactcattcactgctcatctctgtacatctctggaaggcctagaaaatcaacaaactcaggcaactat

SEQ ID NO: 8668 - DNA, 871 bp, Heterodera glycines
ttttcctaaaaaaaactttctcataattaataaaaaatacttgttggcttattcgctttgcaaaagagaaatgaaatcttcatagcttttaaaagattaaccaaaattcagtatttcctgaatttttgaaaataaacaaccccatggggtttattcaagctagtacagtatttaaaaagatgtaatttttgagtggaatcttttaaaatttcgatttaataaaaatcaaattatctatgcataaaaagctgtattcttttgaaaaaaatatacaaatttaattaactagaaaaacttctttcacattttattaacacaatttttgggaggctttttggcgaaagagaaaccatatctgaaacagaccctgccattgctgcacttgcatgtcgcaagtcgtcgcgcattttgtcaagctgtacaagcagctgaaaatagtacattcaaaattcccttaaaattgtatatttaaataaaataaaaaacttttatccatatcataacagacaataattattaattgtaaaagaaaaaatattataacaaattttatagaggctaaaaaaattccaccatatttttgaactttttggcgtgcgccttaacacctggcgccaagcgcgcccactaccggacgcccaattttagctcagcaaatgagcgtatcaaatataaaaaattaagtccaagatgcccggagaggagaaacataaataaaatatgtataaattgtgttgaacctaaaatattatatgctcccgccggcgggactcgaacccacagaaattccaaatagtcaaatgccttaaacgactgagccacagaggaacttgccaaagtcttaccgtatccgttttgtgcatcatcgtct

SEQ ID NO: 8669 - DNA, 2920 bp, Heterodera glycines
  unsure (1)..(2920): unsure at all n locations
ttcaaattttcataaatattatgccacactaagacaaccctaaaatgcatttttccaagaattccgaccctcggcacggcaatccatatntgacagagcaccttgatgtcggtgatcaaaatggcgagttccaactcctcgtcctcctcacagtcgcgcacacggtcaaaccgttgtgcggctgtcagcagccattgttcggctgccactagattgttggcactgaaactgccgactgtttttggtggtgccggcttttcctttttggcactttcaatggcaactacttgaccaccatctcgttgaattcgccaattgttttcaatgagctcccagctttgtgcaattctaatgtaaaatggaaatgttattttatataaatttatttaaaatctaaattaaattaggtatagacctaaaaattcagaaaaaaaatattattatccttatttatttttcaattaatggagaattccatatttaaatatttttaatttattttataaaaaaaataaaattaaattgaaaacatgaaaattcggaaaaatataaattagccttatatatttccgattttggcagaattccatgtttataatcatttttaccgattttaatattttgggattttgattttttatataaaaaagtaataaatatcccaccaaggatgtgtcggaatgccgattttgccgagattttttgagggcgtcggcacacatccctatatccaccacccaaaatctaatattcagaaagatttcctacactctcataggaattttacgtaagaaaaaaaaaataataatccgagtttattaaatattatttgatttgccgttaaaattttttattttatttgaattatatttattaaatatgtaagtttttaccttagcattatcttctcaatggccaggcatgcattgagcacttcacgtggcctttcttcattgtcagtaagtgcacccaaaattcgaatttgcgcaataactgttgaaccaatctcaaggccttcacgcgttaattcagctaattctacaaaaaatttaaaaaaaaaaaaaaagaaattaaagtctaatgaaacataaaaaagttaaaaaattgctaaagaataaacctttaaatttttatttaaataagagtttttctataattaaaataattttatattctcttaaaagttattcttatttttgggagttaaaagtgttaaaattaatacataatgtaaaaaaaatagcaaattaaatataaattaaattttttctttaaataaatttttgtttactttttttctctttttagatttaaaaaaatcgagcacatcattttattatttggtctagcggttaactctgttcattttgtctgtacaaaattcgctggttcgaatccggttgactgcgaactgtgatgtttgttggaatagttcatctgattgctgattgatgactaattttcgcccctatctgagttcgcaattttttctttttttaaaaatttaataataataaaattgttaaaaatgtaattaaagaaaaaatcagcaaaaatataaaattaatatagaagtaaaaaaattgttttgtaaggaaaaaatggattagaaaattaaaaaaaaaaattaaatttaaagcggttaaaattcctttaaaaataccatcaataattctctgtaattcatctggtgattgaattgctccatttttgcataaacgagaattggccaattttgctaactgtaaatgaaaaaagtaagaaaaaattaataaaacttaaaaataaaattataaataaaaataaatataaaaataataatttaaaattgtattacttcttcatgcttcaatgcgatctcataaagatgttgagtgtctgtcagaatatatccccggattgataattgccttaaaaaataattttaaatttaattaaacatatattttaattgaattataattaataatttgatttaatttattcctttaattacatggaaaaattcaaaaattattattttttatataatgaaattaaattaatatatttgaaattaaattaattaatttttaatatttgagtgatggacctgctcaagcttttccaagccgtggccaatccgtccgccatcgcttcataaatcagaatgtcgtccggctccgtttgttcagtgaccagtttttcagcccgtcccagaagttcttcgacctaaaaaataaatatattatatttattttcaattatatttaaacatttaattaaattcaatttgcctgctcctctttgccaagcagtcgcgcgtaaaggtcctcatggagcagcaacaattgcccattctcgcttggatttgtgccaatttggagcaggcccggctccatctcgtcaatgcgcaattccacaaagccgacactctgtccaaaattcaaaattttaactcaaaattatcaaataaatttttatgttgaattaaatttagagatagacattttcagttggcataaccgagatttctcgcccgattttgttttctcgagctaaaaaatttctcggattttgggggtcttagttctcgattaaattctcggccacaattttcgaaataaagaaatttcacactttggaaatattagtgatctccgagaaccagaaattccaaaggccttaagactctctcggacagacaattaatagaaaaagccgtattttaccctaacaattgcgacaacaattgtcgaatggggttctgccctgactgcaatggtggacattgtggtggtggtggcactgctcgccgactttggcattatgttttgccgcactgttggcattgtggcaaaagaagattccaattcaacnccagccatttatttattattaatggtaaaattaataaaaaaaaaattatattaaaaaatta

SEQ ID NO: 8670 - DNA, 2969 bp, Heterodera glycines
  unsure (1)..(2969): unsure at all n locations
acatgaacaaacaaatgtttaacattttttctaaaatattgtgaattttgatccaatgaaagtgcattgaaccatatgttatttttcaaacanncataaataacaattttatgattatttgatcttaaatgtaaacccaaatttgtctcataaatttaaatattttttgaaatntaaaatgagataatttaaaaaactgaaaaaactcttgtctttttttttgcttaaatgaaaatgatcatttttagaaatatgtttataaaaatgtaaaatgtacactatcattaaaaataaagggcgttttaatgaatttggcctcggtttttggcacgtaaacttcaaaaattggtataatttaggccctataaactctattaaaattaaccatgacattttgtgtataatttttttcatatttaattttttttgtaaggatgcattttgtgtaaatatgaaaaaaatagagaatgaatgcatttttcgtttttattatgtttttgtttaggaatattgtgcaaaaaattgaaaaaatatgattgtgtttttttttcgagccgaaaacataggaggtagaagcaacagtatctaaaaatattttttttgtagttttttgcaggtatttaggaattcggagttcgggaaaaatagagagatcccttaaatagtcgatttaaatttggatacatattagatggaattgtttgtaatgtgatgctcatttgctctctaaatacattttgggacgacaatttgtccattcctccgcttcttcttttcgttgaatgtcccccgatggcaaaaatgcttcatttattggctaccattgctttaaccgccggcccaattgatgagggaagagacagcaaagcagaacgaggagaggaagaagaagaagctgcttgttggagttcaactgatcttttagtcactcacataaagccacagcgggagggaaaagcacacccatcggcgccatcactctttttcttttcctctcgacatcaaacactattccttgagagagtaggcttactacgcccgaggcaatatggagggttgttaatcaatatggaaatagaagccaatttggagagagcactaaacagacagacaggcagggcagacagacaagcagcggataaacaacgccaaaggcaatcaatcggatttatattttattgttgttgtggagattgatcctgaagattaatccgtgtcttatgggtgatcggataaattggaccaaaagcatcttttggtcgaagaataaatggacagcatcgaagttttaatgaaataatggtcttaaattaaaaggcttatttgctggcacgacttttatcatggcttataatagcactattgttttggtactgaatttggcaaacttttattagaaatcggatatgggtcagactcccctatacggtgggtgctaggtcggaccgaatatagtctcagtgtcaataaaatatttaaatctaattattttaaagcaatggttttttgcttgaataataataataattttaaaaattttcaaataacaataatgaatttggaggttcaacttttcttcaatgtttttttcttcaaatattctgctcgaaataaactgcaccattaataaatgcagaataattttgaatcgtaacattagtggaaaaggaagggatgaagaaaaatttatggggaaaaatgcatggaatttctggagaaacgaattaagaatttaaatctacgaaaatattgggtgaaatttcagaagaaaattggtagtttttttttctaaaaatgaaaatcctctagtaagcttacttgccaaccaatttgatggatttaagatttgaaattaaaattttcatttcgatccacactgagaaatattttcggttcgactcagcacgctcctatactacccgtacaatcggaaaattccgacctctatttttattgtatgaaactatataaggtttttaaatattttatcttttaaattttttaaagaatttaaaaaaacatttaaaaaattgccatttttatttccgagtgcgataactttaaaaataaaataaattcattaatttattcatatgaattccacatattagctcaatcaatcaataaagaaaagtgattaagagaaaacattctcttatacaaatttatatatgaataaaaaatttgcaaattttcttcatatttatttaacattatgttgttaatgatgaaatttttgaatattttattttttctgtattttattggcatttccgtttgtgtgcagctggcgccgtcttatacatgggactcaagcagttcagtcaacaatgtcggcacatttggcaactttttggacgacctttttaccgaatatgccaaaagcgagaaaatgggttggttttcgttgaaattacgtaaaaagagtaattaaataaaaatgccacatcgcttagaaaaccccgggagtttctggcataacaaattagcacgtcaaattatgcattctttgtgttattcaacagctttggttgccggaaaccaattttttgagaaataaaaatttatcaatttttttctggaaaaaataaacaaatgaaaatatcagcaaaaaatttaatttattatttcccatgtcaaaggtttgagtccgcttgacagatgctgaattattttgattttttcctcaaagtatattagtccacctcgcaacttttttttctcttaatttacattatttttttatggcaataagaaattttctctgttcatttaaaaaaagtttatagatctagtatgatgttggaattttttgactttattttttggggtccaaattgaaaaaattaattctattttatttttatttttttattccttttttgtaggttattttttaggcatttatatttttaaagtatttcttatttttttttattataattgcaggcttaattaaaggagaaaaa

SEQ ID NO: 8671 - DNA, 1620 bp, Heterodera glycines
tgtccacctatgatgaaaactaaagaatttaaatattttcttttctatttttaaatttaatttcttttcagaatatcacttcgcagttgcccgattctgtgccgtatgatgcggtggacattaccgagctggtcaccatttgcatccctttctttctgtacgccgtaacagtgctgaaaatggtcattgaatttagcaatcagcccacgtcgagcccaagtaaaaattcacggcttaaaaatcaaaaaacaaatgcttttgcaaaaactctccattatgttttaacatttttgaaaacaaaatcgatttttcttcacacgaacaccgtattttctctaattatatgcccgcgtaaattatttttgaacttcctcagaaagggggagttaattggagacgggtaaattaatggagacgggcatataattagaaaaatacggtagttcgtttgggtgtggttgtagtcatgtgccgtgatttcttgtgggatcagccaattttttttgtcgattactttagtcaggactatcatcataaaagggtcgcggtaaaattctaagagaaatacgcaactaagcttaaaaccgtaaattaagaataggttaaaaaaggaccaaccacccctactgctggctctattccggctaacagaaagatttttttcaaaaacgacaattaaactcatacaaatttattggacgtgcttaattatctccctcattcagtgcaagttgccattgtccttccggtcggctcccaaggcaacaaggaggagcgtgccaagtttgttaatttgatgcaggagcgcactcggctgttctccatgtgtctgctgagccaagtgccctactatttgtcccatgccatttaccaatcgttgcgtttttttaaaatcaaccaagacacacttcaggtggtacagtatacgctgaggaataggaaactaaaaatctgtaggagcaactttgtcccggccaaatttagtgttccaaaacttttcataattgaccaaaaaatattcatagtcgaatcactaaacaagctttattggcctgccaaaaattataaaaaaaatgcctctggattgatcgggatttggacggaaccccgactctggattcctcccgatcatttttccaaaatacttgtcaatcattatgccaaaaaaattattcccaaatttatctatgatttaataatgtttagattatgggcatcctttggcaactccttggcacaatttttcacgtccaacagcccattttgatgctgttgctcagcagggatctacgcgaatcggtgcgcaacgatttggcacatttttttcgaatgttaaaagagcgcctgttttgaagttgggtgtcggaaaatttcgggccaggtcgttttcgcgccgtcgttttcgcgccgccgttttcgcgccaggttcgttttcgcgctgtcgttttcgcgcgggggtcaatttcgcgcccgcgcttttttagcactaaaattgcgaatagatgacctaatggaaatctgattagagattggttatcaacggcataaagtttctaaaaaaaactatatttttcaatatatctgatggataattatctactcaaaaacaacgtgcctccc

SEQ ID NO: 8672 - DNA, 1346 bp, Heterodera glycines
  unsure (1)..(1346): unsure at all n locations
taaaaaaatgaaaaaatagtgctaaaagggaaaatagtgccaagttntcaattnnaggggatctaaatcaaaatttctgntcaaaaattntggagatgaatgttgagaaaatttttcatttattagggggggggtagattttcagaaatttttttgtccattctttgggggtgtatttgaaaaaatatttcagttcgattcttaagggtgattttcgtttttattgaatttttgttaataattttgggcaaaacgccaaaatagttaaaaatagttttttcaaaattttttaaggctttttaggctctaaaataaataactataaaataggcacgagtaactcgaaaagtagcttaacaatcaacaaaaaaatgtttttcgtgattttcaggtcaatgggagctcagggaaaaataggttaaatcctaaaaaccgtatccctaataataataataataaagcagcagcagaaataataaagattgtttttgtaattgacgaagcaccaatagcgccgagattaaaatacgggaactaaaagcatcaacgagttgtttggtggtaaatgtgcttctcgctggcgacttcagcaggggtagaaggtacccccgcgaaggcatattttaggctataaaaacagcaaaaaaggcactaaaaatggaaaataggctctaaaaatcttaaaatttaggggtgtaaaatgacaaaatttattcaaaaattgagataaataatttttaaaaatcaaaaatttataaattagcaaaacatgtaaaatttaattttatcaggataattttaattttaatgggttatttataaaaactttttccattctgttcaatacttttgcaatttcccatatttgttatttttgttaagaaccttatgaaaatctctacattaataaatatattttaattttatcacagttcgtaaataatttatacacacttcaaaaacacagaatacatattgataatataagattgcgatgatatgctacggttggatcgaatgtgcatcaatttagctctgaaaaacttggattacgtttaaatttggtttaaatttttttggaaatttatcccgaaatgcttgccgatattccgtgctaaaatcaatataaattttttattgaaatatttaattttttaatttgcctcgtgaaatataaaatgggtccattcgatgtcgcgctaatgttcaacagaattgcaatgattacttgcccaaaccaagcagtgatcggagaggcaattaaatacttgatcagagcaatataaaataaaacgattaaatagcccccaatattcactgtgatgatacaacaaagagctcgaaaa

SEQ ID NO: 8673 - DNA, 2491 bp, Heterodera glycines
gtcatcagcttaatggatctatgaccactgggaaaagagaactgttagagaaatggtgtcgatctcttggttgatcagagggatgtgatcgccaaaaaagtcggcaaaatttgtttttattttttggcataaaactgtgtttttgtgacaaaagtgttgaagaggcatcaatttttgggtacttttctttatgccaggcgaggttttccagacaaaagcgcatccctgcttttaattatcttaattgaatgattctaaaatgctcacactttgtcgatttttcgttaaattaatttatttttccctcggaatttgccataaatttcaaatgaaaaaatattctcatttgttccaattaaacaatttgatttttttagttttttttcgggtcaatgccaactcgtacaaaggcaactcgtacaaaggcaactcgtacaaaggcaactcgtacaaaggcaactcgtacaaaggcaactcatacacagggcatacaaaaaaaaattctagatttttcaactaaaacttagaatttttagataaaaaaaactaagtggattttttaacctagaaaaactttttaaaacccttaaattttcaaaaaatttaagaaattaaaaaaaatcagctgaaaaattagtaaaaaactttaatgaattttttaaaaatttttttaggctaaaaaatccatttagattttttttatctaaaaattctaagttttagttgaaaattcttagaaatttttttttgtacgagttgccatgacaccttttttctacttcttgggatttttattagttttttctctttttaaggcaaaattgaaattgagcaaagaaaatgccaaaaaataaatgttcgattggtgaaaaggcaattgaaactaacttttttgcatttttcgtggtcttttggtgtttttatgacttttttagacgagtttttgaaatttttcatgacttatttccatctcatcatgactagggtcgcgatttctagtgaaaagcttttttttttttgctcaattgttttaaagaaaggagctcaaaaaaccttttctatgttgaatttttcgattctgatgtcactatccgtcactagaatcactattttgggggttcgtcactaaaatagttaaaactcagtattttggcgttttgtcattccgagtgaccaagtttttgccagcggccaattttccaatttggagaaggcgtccggccatgtcaatcgatgaccttttccttttttgtgatcaacaccgcttttttcgctgcgcattttttccaaaaatggctaaattttgcgcttttatgtcaattttttaagaaaaaaatggcttgatcccaataaaataggaaaaaagactgtgtttaaaatgataaaatttgtcgaaatgtttttttaaaattttctctttccctaaatttacatcaacgattttttgctaagactcctatttttaccagtgcaaatttttaccggcggtaccggtaccgatctctttatttttgaaaaaaccggtacttgtaccggtacgaaaaaacggtaattaccttgccggtaccggtaccagtaccgctccactctagattggaattaaccaaaccgaaaccgaaactgagtgaaagcgtcaggtgacagctaagacattaattaacgcttagacagtgctgaacagctgaaattaagtttacttttaagatcgttgccaaatattaattataaagaacgaaaaatttagcgaaacaagtgccaatttgtcagagaaaaataaaattaacggtttctatgacaaacaattgggtcccaaatttttcatttcaacttcagaaaatcaaatgaaagaaaatcttttttagcacagtcataatattggtgctacactgtgttaatttaaaataaagacaccctgttttttgggagtttgaccatttcccatgaaccgatcgagctgaatttttaactgtacgtagcaattctgaaaatattaagattctaaaaaggagaaggcgaaatgacgatggaaaaaaattttatgaattttttcccgaaaaaggggtgttaatttaaaatagagacacttgataaaaacgaatcaaatctcaacaactaccaaaaagaaactgataaaacaagctaaataagaaagaacaaatcttttttcacatttctatttcttttgcagacagaaatctgtcttttggggagagttatgttgaattttctaagttttcaggagaaattaagggccaaaaggcttaaatcgcctctaacatttgcccaaccgaatcaaactgacagcaatcaacgctaagataacgtacagacatcctttaagcattttgtattcattttatgccataaaaaaggcattaaacacaaaatttatgcgggtgaaaaaatacgaaaatctgagtaaattcgaaaaaaaaattctagggggttggaaaaaattttccgtagaagatgattatgacgaacagaaaga

SEQ ID NO: 8674 - DNA, 2238 bp, Heterodera glycines
ccaaaatgaatgaggggggggggggcggcatttgccgaattgaccgctgtcacagtcactttttacgatcacatttctgctgctaatgttgcctttctgctcccatttaaaagccgtgtcgccctccgtttgcccattttccgtgccattctctctctcccgatgccctgctcgtcctcctcctccccctcctcctcttccgccgcttcgttttcctccgttttccccgtccctttccccgcttcccatccatggaatcctttcgcttctgccgccccttttgtcatcgcaattggcagtggttctgtgtgcgtcaaaaatggcgaatgtcgccagtacaaccaactgaaacgacactaccacgagtcagcaccggtcgcagcagaagtgccatcagtcgacgagggaatgaacgcgacggacaaaaggagaaagaaacgcggaccatcggcactcgcaactctttccgcccttttgctgcttggcgtggcgctaattgtcagtttggcattcgtcgcgtggacaatccatcggatggtaaacgaaaagaaaaggccaaacgatgccagggaaagtgggaaaattgaattgcagaacgaacagcacaaagaatgtgcggaagcgatgaaaacacaagcggaacgaatcgaagtgttggaaagtgcggtgacaaagcaaaaacggacggaggaaaaggaaacggaagagccaaatgacaatgggaagaaaagccatggtaagggagggaaaagcaatggtaagagaaaggaggaaaagcctggtaagggaagggaggaaaagccatggtaagagaggggaaggccatggtgagaggagggaaaagtcatggtaaggagggggaataaattacagcggcaggtgtcagcgaatggaactgccaaattcggaccaaatgatttcggcgtttttagacaaaaaacgccgcgacaacaaaacttcggctgagcagcaaattgtcaccacgcaaagtaacaattgggaaagcagtggtgaaatgataattgtcacaattaaaataaataaaaattgacagatcgtcgccaattttcgcagcgaaaacagccaaaagaattgacgggaaacggcggcagagattttgtgatttttatgaagggacggccaattagcggaagacatttcatggcgcaagggaaaaaagcaaagtgaaagaaggcaaagggagaacaaaaaacaaacaattttaattgtcatttctcattttaattttaatttttcatttttatttgtttaagattttatttttcaatttaattaatttgtaaaaggaataaatcactcttttatttgtcaattgccattttgtccgataccaattgacaattttgcatttccttttgccattttgtccgttccattcaaacgtattcctccgtcctttccctcgccgttctcttcggcggaattggctctgccgggaacaccgtctgatgttgctgatgctttcgtccgttttcgttcttcctaaatgcttctccattgtcattctctcctccctcccccaatttttgccactttttctgtccattttcttcctcaaaattgccatttgtccatttcaaattcgtcacgtttcgccctctcccaaaatgaatgtttttggcgttatcgtaatgccaaattcgattgaattgcacttcctgctgggcacacattgcgctgattttgtgccaattttgacttccttccgccgctgtttccgtaagtaccgtatttctttatttccctgtgctttaccgtttcggaattccttttccaaatttctttcggcgttctccgccgctgcgttcggtggcgtcggatgcctttcttcgtctgctgctgttttgtcacttttgctgacgtttatgcacttttttgcgtgccttttatgcaaaaaagtgccaagatggacgagttgaatgatggccaaagtgacgagcgaaagaacggccaaaagggcggagggacgcgaaaggcacagaagcggcggggacggagcagaagcggcgggggaagtgggagaagcgggggacgggggcaatgcgaaggctgaaattgaatggaggacccttctggccaactccttgttctctgatcaccttcctcggcttcttcgtcgcggtcgtccttttccctcccgttgctgccttttgcttttgcccccagcgcaatgactcggttcgaaggtgccaaaatggctttctttggtgggggggg

SEQ ID NO: 8675 - DNA, 2188 bp, Heterodera glycines
  unsure (1)..(2188): unsure at all n locations
ctttgtccaccaccgctcgtcccccctgcttttccccgccgcttttcctcctcggcttcgtccgcttcagcagaggggacttctcccctctgctgctgttcctccattattgtatacgatcccgaaatggttgcgcttttctgctgatgaactttcctcggccgctccttcgcttcctttccccccacaaattgtgccaattcggcaagtgttgccatcctcgctgaactttcttcgcttttttcccgccttcggcgtccacgtgggccctgcccttcgacggtttcctctttctcccaacatttggcctaaaaagccaaaattaggctaactctgacaaaagcgatcattaacagcaaatgatcccactggtgcgcatttttccacacaaatgctaacggagcagcgaattcgcactctccgcgacccttcaaaacggaacactctcagcgaagtattaaagcttttcccgtcatttcggggccgaacatttgtgccgaacagttgggcagaaaacgctcgaggggcaggacaacttgcaatagcgggccattgaatgatttatgccacaaaaggcaaatgaaagtgccccacccattaaggaaaagctgaagtggctttggctcgggtggttcgccgccaattcgttcggcttcgcatttgttgaccaaaatgtccagtctttgtggaagagggaggtgaaagcgatcactttgccatgccaaaagtaactgatcactcggagtggcttttgcgaatgtccaccgtaattccaattgctcgccgagtctcacgacgctaacgaaaagtccgtcacggagaagagccattcgcagccggaatttatatccagacgacaaatcggatcgaattttggacaaaggattaattgaggaagacaaaagggcgacatttttggagtcattttgatggaaaagcgaattttgggggaatttggaaaagtcacagaaaaaagtgaagagacgacctgccaaaagatgtacaaattcaaatggcaaaagatgctttgtttgactttcagacctttgcctttctcgtttttctgatgtaaaaccaacacaaattgccaaaggtcgcttccaaagtgtcttccggggcatttactcttcgtcccatttttatgtgctggacgagggagacggagagtctgtgccgggaggaacacaaactttcggcattttgaaatgggaaagcgttaatattacggtcattaaggcattgcgaaaatggacgttgcaattggtggcgtggccattcaaaaaagcgacgccggaagagggaaaagcgaagtgaaagtgcacggcaatgccacgagaaaggcatttagttcggataactgaaagggaggggagcgggaaatgccaatcggaacaactgttagcaaagaatgaggcttatctttatggaagaagccctcttccgatggcaatttcacctggtttcgtaccatttttggtcccaatttgttcctttttctcccgctgattctttccttttatccattcctcagtctcttctttttctccctgctggtcctctttataatcttcataatccccttccccatcatcttaatcccttcctttttctgcttcttcttcctcccccatttgatcagctgtgtgttccacctcctccttccacttaccctcctcctttttctcctcctcctgttcattataatcttccctttcctcctcctcttcctcctttttctcttcttcttctttctgttcctctttcccctttccctcctcctttttctcctcctcctcttcattataatcttccctttcctcctccacattttcctcctcctcttcctcctttttctcttcttcttctttctgttcctctttcccctttccctcatcctttttctcttcatcttctctctgttcctccttcactttctgctcctccttctcatccacttcctcctcctcctttttcttttcctcttctttctcttcatcttctctttcctccttcgcctttttcatctgtgccaatgtgcgacttgccaaagtgaacttcgcccgaaggaccgatgaaacattaaataatggaaaaacatcggaaaaagtgccattcttctgtggnctatcgctaattcttgaaggagcgcataaattatcataataattggcaaattttgccgcatgga

SEQ ID NO: 8676 - DNA, 1259 bp, Heterodera glycines
acttgaaaattcgaatttactcgacttgcgccattatttggtgccaaagaaacattcaaagcactgccggggaaaagctcgaaattggcactttcagagcactttccttctgcggaaatgaccaccctctcggtgcttcggatgcacattttctcgtggtaatggccatttgagagcggactcagctcagtttcgatttcagctcggccctctgctgtcattcctctgattcattatgttagcaaattcccttttgtttcaaaacccccgtctctttcgtctttgggtgtctcccgtgccaaaagcgtcccattggatgccggattctgaactgagttggcattgtcccgagttagccgagtgtacaaaagctttgcacggaaagggcgccccgaaaaagcgattttcctaatcaaatgctattgcattgcaaaagctgttgctattcgtccgctttgcccactgtgcattttcgtcgacatttttcgctttcgaattgcccttccaccaccaattctctcgtcgggtcaattcgaaaatgttcggagcgtatccaaatgagttcggcatactccgggcattctacttaagggaggggaaaggggacaaacattcagtgccgcagtcagcccgaacaattcgataccatcgtcgcaaacgctctcaaaataatccaccggttcggtgccttttattttcctgaagtgcccttttccgacgctttttcggtgttcgcggctcaattggcaaatgcccgtttcgtaaaaataagtcacctgtgaagagccaaccaacaacattctgcagcaactgtttccctttttaaatgaccaaccgatcgacagtctgtcctcagacggcgcttttcctccaaacaaatggccaaacaatcggacaatttgaaaacggaacggaccttcaactgatagttggactgatcaccatcagattcaacattacttccttaatattccaggccaaaatatgctgtggaattctctcaaataaatgtggagaagggcacggcggaaaatggtcatcgccgtcttgaaaattgggaagaattggagaaggaaggggaaaagtgagggagcaactgactgctgctgatcggcggaaggcatatccgctggaagtgcgctcggctgtccctttcccttggcttttgccctccctcctccaaattcgttgtgccattgcctttcccgtggctttcgccttcccttttggcaccttttcttccgtcgtcccttttcccc

SEQ ID NO: 8677 - DNA, 1490 bp, Heterodera glycines
  unsure (1)..(1490): unsure at all n locations
taacaaaattccgtcctcccttttctgcttccaattcgatgccatttgcttcgttgncgccccctccgttcgcaaatacgcccttttggcacattctccgcttgggtgacgcaagacaaattcatcagaaaaggacaacgaattgcccaaaagcggatctgaacaattaaatggtcacagggcaaactaaaagtctgcncaatggcaaatcaaatgccaaccatcggcggatcagacagagcgattgccatttttaaacccggcttttatgtgtgtcaatggaataaatttcgaaaataataatccctttgctgactcaccaggaaaaattctgggattatttgttatcgtcgcattgtgcagggaaaagaaaataaataaaaagaaaatcttatccatcagcagaatagcgcctaataataatcccattctctgcagtgtttttggtgcattttgtcaccacagcgatcgctttttcccaaaattcattgacctctttttgagattcattcccccaattttgtgcatgagttgcaatattcaaaaggaaaagcaacccatctcactctctctggtgagttaccggtttctgtctttgtcaattaccggcaattccgctttgagattcgctttccgttcaaaaaattcacataaattcaaaaggagcgtcttttacgggttcatctctaattaaataaacaaaatgacaaataacaacatggcttaggctgcttctttcttttgctctttctctccgtcctttttctcttctttctctcgttcgcggttccacgagtcaagtccttaaatcagagcccaattacaacaattcccttcctccccctctcctcccgcgttcgttacctttcggcagcgtcgtgtcctcatccattgatcctgtgcctgccacgaactcctcataagtgtgcttctcggcaaaaggcctcggacccaacaatctgtgaaagtgaaggattaaagggaaggaaacgtgtggctaactcgatcatgtcctcccttgccaagatttccttctccaacagtcgaagagcaacctaaaaataagaaaaatgaaaggaaatgaatcatacatgcacaaggggtgtctcagcccaagggccatacaacggacgattgggacaggggggtgtctcgggcccgatttttcatacgaaggtcaaatttttctccgtttttgtaaatgcttatggtctctcctaactatttctgactgtttcacgaacccgttcgatctgttccaccttcgacatcaaaagttcgcgcgttcgccgcagtgccgcgctgaccatgtcgcgcacctcctggtcaatcagctgagcggtagcctccgaatagggcttatcgaatgccatttcgccaggctccggagtgtcgaaggacaccggaccgactttctcgctcattccgaatttgaccacctgaaaccaacgtaagacaaaaacaacaatgattttaattattggtgaaat

SEQ ID NO: 8678 - DNA, 4087 bp, Heterodera glycines
ttatttatttttatttaaatttcatttttcccggcggaccctttccccgctcaatgctcagttcgtcgtgttccaaaatgcgtgcgaaatcggactggcgccaaaatgcccgctgtgccatcgttcgtgcgatttgctccgcctcgtcgctccgatggacacgaaagttcaaatcgccaaaccaaaagacattggcactttcgctgcctgttaaagtgccgctttaatggacaatgaacaattgcgaaatctctgctcttttttctcaccgtttttccctgtccgacaattaaagttgaaagaacggaccattttatgatagtcgaaaatgcgactttcgactttgccatcttaggcacaaaaaagaattggggaaactaaaaatgatggctaaaatacgtgtcaaatggcacgcaatgaacacacaacggcactgaagcagacgaaagcaaatgccaatggcacctttggtacgaaaggggcgggcgatgttggagccggcaacaaaacgatactcggggtcttgagaaaaagccaatttaaatttgatacaatgaggcaaaatgaataaataatggacgagaagtgaacagggcgaggcgatgacggatgaaaatgacgagcatttgcgaccatttgcggacccaacagaactaaaagggcatttgtccatttgccaactccgccgaatgtttggaaacggaccacgcgatgagtggcgtcgagagaatggccaatttgttggacaaccgaatcgtggaactttctgagatggcaattcgaacatttcactggcacaaattaatcaaacaacagcgtggacgggggcacttcctgcagagccaacgcgatcagagaaggcctttccccggggcacatgttggagaagagggagttcagctggggcaaacagcggctggccttggggggggggcaattagcggaggacaaataacggacggaacggacttcaaagaaaaaccgaaaaattgaaattaaatattaccttcccagcgatattccaagtgaagcacatcacctaaaaaaggcttcattccatgaactcatttcattttccattttaaaaaggacggggatggcagaataagaccaaaaaaacaaagaaaccccgctgttggtgcaattaccgaaatagcgtcttctccgctgtccaacagattcctaagttccgactttctcggcaaggaaacgccccccggaccaaagactttggcactgtccaattggcaagggcatcaatttgcaaattgacaacaaagtggtcaaacccgaactggcgaagttcaagttgaaagtcctcctcgctgaactgactgtggaactcctccgccctttggttgtgttgcgtaagccgtgaagcggacgaccgtggcctcgagttggaagttggactaaacgacggatgggcaaagtccgtctccccccgctgctcttccattccgtccattcttttcttttcgtcgatgtcttctctcaatcgaccatatttgaacatacacacgaataaatttgaacagtcgaaaaattgaactacagacgaccgaccaaaatacagtagtttacagtactattattatccgaagaagggacggacagaaacaaagcgataaggacaatttgaacggaagtcatttttaaataccttttgaaaatgcaattccttctttagacattaaaaattactcatttcactttttgtttttgtcgtcatgccaacctcatcccttcccttccctctcctgcaaaattggatagtgaaaattgaaaaaaaacggggaaataaaacgccaattcatttgaatgttaaacagaatcactttatttaatcagttaatcaagggagggttaaacttcggcaaattacatacataattttgatgcaagctaaaagtagacttaatatcaaggaatataaaatttatgcttatttaaaatcaaaaatcttgtgatgactcagcagccatattttgcaacttatatacaggacctagagcaggttaatcttctttttactgttttgcccaattaacacctcacaaatgcatttttaataattttaaatacccacaaatttgaggaccctttcgatgtgattgattttgtggagcgtttggcgtggcgaatgagcaccggcaaagactgtgtggacgcggcctacctgaagaacaaatttgaagaggaaattggaagtttacaactgctctctgaccaattccaagtttggttttccgatttggcgaactcccgttagaatggccaatgaattggccattcattcagagcaaattgaacacactcgagcagcagcaaaacaaagacaaaaccgactatttggactctctgcagcgattgcatgacaaaaatggcgactctcttgaccaattgaaagtttgtatcgcttatttttgttcatttcggttcctctaataattctcaaatttgacaattttcagcaactcgacctcacaatgcaaacggtggccgcaagggtcgtccatttgggtgaccaactcgaaagtgttcgagccttttcctcccgtcttttttccacttaattttttaggtccatgagccgcgtgctcgcgcgtttgaagccttgcaactgatgcggcactttgatgaattcttggcggatcagccactgaattcggcgcttttcacagacccggacagagtcattaaaagaaacaaaacaaaaataacaatttaaaaaaaattggttacaattatgctaatttaaatgaaaccatttgtttaagctgctcgagtcggcggaagtaatcgcaaaattggcctcaatcgcacaggaattggacaagaccaaatttgctgcagttcaattacgaatcgcgcacaaatacgatgaaattgagcaacttttgattgaggaatttgtccgatcgcatgacagaaaaagaatgcgcgaaattgcgatgattctttcggaattcaaaggttttccgacgaaaattacacaaacattttgaaattgtcatccaaattgtgaaggattttcgcgttgtgtggacgcattcgttgaacggatacaatcggttggcccacgttcccccaatgtcttcgaggacatccaaaatttgtgtgaccgcgctaaacccatcattatggagattttcttgagttcgcaatttgttgtctccaaattgctgttgaatgttttccatgggaaattgcaggtgaaaaaacggaaaaggaaggggaaaaggaaaaacgaataggaaatttattaaattaaattaaaaaatgaatttaatgacgaccgaatcgggctctttttaggaagcagttgtggcgacattggaggagaacaaaggcaacccggagcagtacctggccaatttacatgagctttacctaaagtatcattgtcgttttggaaaaagtcgatttccctttttgaatttaggacacacaaattgctgggccttctgcaggagaaattccgcacgaattcgttggacccccaatttttgccgacgctcactcagtcggtgttcggcccctatttggtcacatatgcaaaaattgagcacaaattcatcgccgacaaatgcacttttacgctccgaaagttctacgagtccaaagggcaccaaaaacggagtattctctcgagcgggtgggcatgcaaagcacaccccaaacacacggacatcatttcgaattcagacttcaagaactcaagtcgcgtctgctgacagcggaggattttggtggcgaaacttttctttccgaaatcatagcgataaacattctgcaggagtttaagaatgccttcgcccgctgttcatcggtacaatttattttattccaacttttatcccccccccctcccggtaaagagcagataaacatgtagaaatggaaattctaacaaaaaataagtcaattttgggacaacaatgggaatttcgcaacgggataatctcggaatggtggtgtagtccctcaaacagtttctattttcacttaatttttagctttgcaaaaaaacggagtctcttgaactgaacacagtgctttttgacatgcttctcaaatttctgta

SEQ ID NO: 8679 - DNA, 1655 bp, Heterodera glycines
  unsure (1)..(1655): unsure at all n locations
gatgacacaattcaccccggaataaggtgggtttgtgctccatttcgtgctctcattaaattcattcggtgttatttcgtaatntaaacctcgcccaagcaaaaatatttcttttatttttcagtttgactcattcctggtacctttctgattctgaccatcaaaattcgttactttttccgctgtatttgacaattttctaatagggacacacaaatagaggacgcattgctccgaaaaagggaccaaactctgcgcaatgttgaggaacggataaacatcggtgtcagacgacagctgaacgcggtgatcgcctttgtgcggcacgttctgagcacgtctcaacgcaaaacggactttaagccggaggaggacagctgcgagataagcgccgcatgttctggcgtaaactttttttagcaaaatgggggatgaaaatatttaaaatgtcgtaaaaaggtggtatatatcggaatcagatttgtcaaaattttgaaattttacaaaattatttaaataagtgctatatttgtaaaatgtgagcaaatatcccccatttttctgtctttgcattgtaacaaactcttctattttaagacatgctcaacagtggtaaagtatttgaatagagtggtgcaaaatgccgacaaatgcggcatcaaagactgcgtggacggggggaatttgcgcgttatcctcgcggagctcggcgacaatttctacgccaccattttggcccatgcgctgtccttcgcttacaatttggccggtgcgatgcttttgctgtgcgacgtcagcacgtacaagtcggtggggcgggcataaaaccaggctattattatttcccattagaaagtgcattagcgcctggggaattgccgagttggagaaaaagttcgacagtttgcacgcgttggccaaccttttggtggtggtccccgataatttgccggaggcgtgcaattcccaacttgtggtgagcagtgaaaagccttggggattttcaacgaaaattcaattaaaccgatcggtctttaagaaaaacgtggaccgtccgttgatgaacgaatttattcagcgacgccacgactacaaatcggctaaactctttctgaacacttactgaaaagtcaatttactaacaattacggtggaagtgcaattttcttgtctttttgatgctgtgatacattttcaattataatttatcttcggaggaagaaagaaccaatttaaaaaatatattttttatttttttgtatttatttttttttataattatattgatttaataaagtttggttttttctattttattttgtaattctgctatacattatcagatggatgccatttattgtaacaagaaataaatttttcagaaaaccgttcagtgatatgacattttatggttcttcggcgctgccaaatggaacgaagggcccaaatgccgacgactttttgtacgccaatggcacagattcaatcgccgcatcgaccgccgaattgtcaaaggacgaaatgtttgtggaggatttgttgcacgcgcacgaggccaagtaaacgctcgaagctggcgaaaaacgggagagtaaaaaatgggcggaaattattaggaatttattttcattgtctgaaatttctccccaaaaaat

SEQ ID NO: 8680 - DNA, 693 bp, Heterodera glycines
  unsure (1)..(693): unsure at all n locations
cagctcaacaaccccataaccggggtggggggggggatttgccgcaattaaagataaatttaggaaaatttgccccccccccccgataggtgcagttcatcctcgaattattttcaatttatttgaatagctcaaagaacagcagcggttgcgcgtggcgttcaacggcttcatggagcagcagccgagcttcgtccccacctacaaattcgacccgggcacacacaattgggacacgaggtgtttttaggtggctaataaaatacgttttacatacaatcaccccctccccacctttcccctaatcgtttggttttttaaaccattttttgtttttgagtgaaaagaagcgtgtgccggcgtggtgcgaccgcattttgtattgggtcaaggacaaaaatgtcggcattgaacaagtgacctacgaatcggcacaccaaggcaagtgcggatttgggaacaaaatgttggcggaacattcataaattcggtgaaattaaacccatttagttgtgctcagtgaccacaaaccggtgctgagcacattcagagtccaagtgaagaaggtggacaggccgagaaggagctcaaagtatgancagncaaagaattattcaaattggcactttagaaggaatgaattacttttttacagttgtagagggaagtggacaccnatgcaggcnnatgcaa

SEQ ID NO: 8681 - DNA, 2144 bp, Heterodera glycines
tggtaacatctggacacacctcattggtgctcgaacttacacgctttttattaaatttaaattgttggtttaaggcctttttgccttttttgttttggagctttggtttctcactcggcctgacactcatatccaatttcaagcatgttttttttgaatggaaatattttctttttcaattttaggagaagctggttttctcttttttctttatcggtgccattctttgtctgggcctgtcattcacctttcatactgtttcatgccattcaaaaccggttgtgcgtatttttagtcggttcgtttttaatgtcatttatacatatatgtaaacgttatacacataaaaaataaacaaaattccttcatttagactcgattatttgggtatttcgttgctaattgttggatcgttcattccttggatttattatgggttttattgtcggcgtgaaccaaaagtcacttatattgctgtatgttttcaaaaaaaaaattttttttgtgaatactgatttttttttactttcaattagatgatcggagttctgggccttggagcagtggttgtttccttatgggacaaattcaatgacaaacgttacagaccttttcgcgcaaccatcttcagtctgatgggattaagcggtaaatgcttacattaacaaaaattcaggaaaaaaatatggaattttgtgtctttttaaggcatcattccgacgattcattttgtgtatacggacgggttccgtcagttggttgctgagacttccttttactggctggtcgcaatggccgtcctctacttgttcggtgctcttctctatgcgactcgaacaccggaacgtttttttcgtatgcggaacaaaaaattttaattttacatataaaataatttcagcgggaaaatgtgatctgctatttcagtctcatcaattgtttgtccatttaactaatttttgtggaattaatttgttaccatttttttttttgaaggtttcatctttgcgttgtttgtgcggcattcactcattattatggcatcagtgaggtaagcaatcccggaaaaacgggagaagtacccgagtcaattttcaagtcccaatcccggacatttcaaaatttctggctctaattaacttcttttttagatggcgatgaatcgactcactggcacttgtcacattagcaccccgtcatcttcacatattcacactgaactttaggcgggcagcaagcaaattttgttgaacaatgtgtgataatagaaagactattgtatttggatgaatatgtgttgcctttgcctgctgtaatctgtgctgctttcttttgctgcttatatataatattatattgtcatgtcattgtagcagtataggaaaccgaataaattagccccgaatttcttcggacaacgttaagaatagacctgtcaaaaccatgtttttttcctatttatgcttgccgccggtcgtgcatttttgtgttccaaattgcatcaagttgttgttctaactctccaaaatacccccccccccccccaaatcattgcaaatttctgggaaattttgccgttggtagcccacattttttgaaagaaattttctgtaacacatggaggacgggacaaaatctcgccgcaaaattttcaaaaaatttttttgattcatctgttgcgcaaatttttgaaaaggttttcacattttctttgaaaattttttttttaaatttctgtggcgaggttttgtctcggcgaagcgagattccgggcggcgaaattttgggggtgtaaccaacacatgcgaagaaaacaaattaatgggacacttacaatttatgtttctatagtaattgacaatgcacatcaacaattgatcgccccccgctctaattgaggttcttttctacatccttgtgcgcttacagcttcttttggaggacattcagtttgccttcagcacataaaaaatggataaatcatcaaaatttaaataaacagaattctcagacataggtaatcatttctttttttccaattgtttgaaattatattccaatcttccaaaagacaagttggtatagaattttgttctatttctgatcggactactcaaattttccaaattaaatttcccaacact

SEQ ID NO: 8682 - DNA, 1296 bp, Heterodera glycines
tgttagaaggatatgattttaggtagctacctattttttattaaacaaattacttctgtaaaaataaatacaggtacactctagatgttgtcattttggatactcgacgaaaatttatgtggttgcagttgtgagaacaatatgaacaaaagttgcgccataatgtgaaaaagtcattaagaagaaaggtaagtagaattgtgaataattttgtgagatttatttacaacaccccccccccccctctcggactctgtataacatggaaaaacaaatttatacgatcacgtatatttcatagcactaaatttgacaatgttttgtcagcaaaattaatcatcttccgctataattgtcattccttttctacatctttgtgctcacagcttcttttgaagaacgttcaatttgccttcagcacctaaaaaggacacatggtcaaaattgaaataaaaaaaattctcatatcaacaggatatatttttttgataccaataaacagtgttttttgtccctttgtaataatgtttgaatgtccctccagacttaatggtatacatgctatgaatgtgtttgtctgcccggtagagacgggattttaaacaaaattctggatcggatttgagaactgcctcatgaccggatttcgggattccgatccgagtgcattttttaaatatgcccgtgctccggatcgggatacagagaaactcggactgaataccttgtctcattcagtctctctagtggcccattattgtttgttttgttttttgtcaaaataaacatacgtaagcgacggcgctcctccagcttctcattgagctcgtcgttgaagtgcgtctgcttgaacggacgcacattgtcaaggttcagcatcacataagtcggataacccaaaatggacacacagcaaaagaagaacatgccgaaccgtttctaaaattgcaaggcattttgtactggtaaagctcaacaaatggaaaacggaggaatgactattatgaacattggagtccaaaatgggaggggagtagtgtaagtcaggattttctcggactccttatccgggtatgcttgatttttagtcctgaaatcctgtccgtgtgaaattctcgaatctgccccaaaatttttcatttttcctgacttcaattaacctatgtaatggtaatcctttccatatttaattaaaaatgggcccggtgcggtgagacataacaatggcacagcagcgtccataggtttttccgtttttgaaaatagcgccagcataacaaacatacaggaacactc

SEQ ID NO: 8683 - DNA, 1889 bp, Heterodera glycines
gaatttgggttcggggttagatatagatcgaaggcggtcgtccgattcttgattagtggtgcggaaagcctatggaaacaactttttcacgaattcaaaaaaaaatttttttttatggctagtaaagtgcataagtaccgaaaaaagcaaattatacactgaaatgccaggtggtaggaaatttaacaaaaaaagttctcaagaaaattccaaagtggaataaatttttatgggaattcattcattcgcctaccaccggtgagaaaaaataaacaaaacaaagcaaagcatcaaaaaaacgagatctgtggttctgatttttcgtcataccttgtgcatattcaactcaaaaggtccttggaaacaattctgctgacaatcaaatcggataaattgtcgctgttaagctgcggatgaatgtccagctggtaaatctaaaaatccattttttacaaaaaatttgttaatttttttttgaaaaaagcaaaaacgatattcgggattctctcatccgtttttttgcgagttaaaggtctgctaaaccaattagtcagaaattcgcaatgcgtcagaccattacccatccagtgataaattagcatcggcagttcaccgaaataatacgccacagtttgattaattacctgtctgattagtgcctcgtcagcgttttccctcaatttttctaatgtcaccggtgtgcctttgatatgtttggcggcttcacgcattttcttccctttggcatcatcaaatattgcaaccaacagagcacgggttgtgccagcaatgccaaaagtggccaacgactcgcgaatattacgattgggcgaaagacagtaaatcagttcagcagacagtgaacctaaaaaatgaaaaaaaatcactcgaaagtgtcattttcgggatcggcatccccgaaaacaccctagaaatgtgtttttacgacttttataaactataaaaatttatttaaaaaaggtgtgtagcaccatctaaactattaccctcgagacatttttttatagcaattttggacgaattcacgtacgagttgaaagttggttgtgagcggcttgaaaaagtgcacgattcgctgctacaaggagtataaaaggctcaagtacctgtaaataatataaattaacagtccaatttgaaagtatgatgaattacgagttctgcgcgaatcaatgcaatatccataacttttacaagatccgctaagtctgatgcattttccacgttcaaaaactgaatgtattgtagaaggatacctaattggtaaataaaaccgatggacttaccaaacaaagacgcaagtattttctttgcgaattatcgtatgggtcaggcctcaattcaaataattttgagatcgcagtgttcatctgcagggatgggatttttagtttttcatttttttttctgttgcttcgtttcactgagaagtgcacaaaaaacacatttttagtcgggaaattctcattttaatgcaacaattcgttcacatttttattttaaaaattgatttttaatatctttaaaaaaacgattttttaggggtacattttcaaaaaaaatttttaatttttaaaagtcccgatttttgttcgcaaacatgaaaaagaaagtgtttttcctactaattaggctatggagaatgcaggaaaaaaacatctacataaaaaaagaagccctgattattagcatagcagggacttttcagttacatttaaaaattgagttttaaacgatttaaaatttgagtcatttaaaaattgagttttaaacgattaaaaaaattgagtctaagcctattcttttgcaccgtcaaaaattggcatattttacatggtgtatatctttgcaacagatcacaacatgac

SEQ ID NO: 8684 - DNA, 1375 bp, Heterodera glycines
gcatttttttttgtatcattcttccttccatttaaaaataaaacccttaatttttggaaagatagtcattttaatacttataattagttttttggtatttcattaaaaaattttcattggggtggtcattttgaacactcaagctttaaaacaaatgtacaatttgataaataggtgcatgaaaaaatgaatccccaaaataccatatccccgtacaaactgtacacataatatggtgcagaattctcaccaaggaatccccgcctctgatgtgatgcacagttttttacaattgttccaatcaaccattttcagtgcgacgtcaagaaggcggtgccacaaaacaaacgcaatggtggtgctggtgccgcgtcgttcattcgtggcggcaacctgatcatgcgcaacgcgtacattggtggtggtgcggctgcgcaccatgccagcattggcatgggcggtggcggcggttcaatgcgaggttcttctcatcatcacccgcagcaggtgggggacgctttttatttgttttttcattttttgtgttaaaaaaaactcattcattcgctaattcatggaatggttattaatatcctatttgtgtacggaaaactttgattccatgatccgatttggtaagggaatcgtgtttccaaacactgtcatctttttttcaagggggagaaggttgggtcaaattgaatggtttgaggaaccttggcaaattcggtgttcttttggactcagttttagtttttttgttgttgttgacaatgtgttttacagggctgcacgcaattacggattttacggaaaaaaatacggtgcttttttgggagttaaaattttactctattatcccccgcataattaaaaggtatatataattaataaagtttttttcattccagcaaatgcccatgtattcaaatgcgtctgccgcggcatacgcccaatggtactacaacgcggcggccgctgctgcatacggggccggaggatatctgtcataagacatattagtctaatttatgatttcgacccatcaacgattgatttttcttttcatcaagtgcttcattttcacccgcgtattgatgagaataaaaaagttatttgtgagaggaaaccagaataaattcgttccgttcctcgcccctaaatatggcgctaattcaccaaatgcaccccagggttttggctttttctaattttaatacatcaaatcttaaattattctgacatatagtacgcaacaacaaaacaaaaaaaaactaatttaggagagataaattggatgtccgaaaatttttgagtggtttttttcataagaatttaacaaaaaaaaatttttacatttttagcacacaccgat

SEQ ID NO: 8685 - DNA, 3285 bp, Heterodera glycines
  unsure (1)..(3285): unsure at all n locations
tgtcacttccttttgccattgacttttcttttttgccccttttttggcacttttttggctaattttcccattcgattccaatgaattttctgttgcttccattctttctatcccatagtccaaatgatttggctctttatttgcttgcttttgttgatgctctctctgctgatcaaatggcggttcatctttgatcacagagtgtgccaatttaggtggcatgcgaatgccaaccacacccatttttccaatgtccaattgctcaaactcctcctcttttggctcatgctttacatttttcaatagctgatcaaaaactgctgctgctgcggttggttcagttttgatcaacatttgtgccaatttgggtggcatgcgaatgccaaccgcacccatttctacaccaccgtccctttcttccatctttacgcgattggtcactttttgtcctccgtttcggccaacatttgccttctgaacgttttttgcgttgaaacaattcttccacaaatcactgaacaaatcgttttcttcaccaccttctccaaccccaaaaatcccattaaaagtggcgaaaaatatgagaataataattagtaccattatcagttttatagatgataacttttttctttctaaattaataaattatttaaaatattaattatcatgtaactaaactaattcggtctcgagatttgggactttattttcgagaatcgtgacaaaaagtattcgtttttttgaaaatctttacataaataaaaaccttggctgactttggcactaagacaaaacaaaattaaagccaatgggaattttttttgatattattatgtaatgcttccaaacaggaaaaaagactaattgatggttacatttcgtcattaattataagaaattgaatttttacgcctaatttaaatagtcattttccgttaattaatgggcatgcctttcatatgaattaaagctaattactgcattttcttcttctatttttatgctttacatcgtaattaattgatggactggttccgttgtgtgattatatttacgttttgttgaagaaaaaattataaaaaatgatttaataggcgaataaaatttcgttgaattacttaagcatattcattttttgttaattaatgtgtttttcatgtgaattacatttgatgattacacgcactaattaacaaagtatggtgagtaagcactaattaaaacaaaatcattatccaaatttcctgacagcaattttaagcaaattcttttttcagccaaaaaatacagaaattaaaaataataattattattataaattttacttttcagaaacttggacaaaactttatttttttatcaaataaactttgtttttgccaaattaactctgaatgcttaaattaaataaattgatatgatgcactcttgatagctctattattttagaaaattctaaatattagtttgggtaacaaaaaagttatttccataaatctcaaaaaatgattttttaattgcagttttggcgccgcttaacttttttaaaaaaggttgaaacattttaattttggctaataaatatggaacatattggctttcataatatatctttgcttaattgatacaactttaaaatactcaaaatctgttaataaaacgcacataaaccaaaatttccaaggcgactcctgtggcacggcctgccctaatggtgctgggacgttagtcaaaagccatcaaatggaaaatttttgacagaaaattattcataacttcgtccaaagtgaatcaaattttaaaatcttgttagctttcgatagctataaatgttttctattagcctgcaaagtcttaaaaaaattcattaagttccaaaaaagttatgaccttagaaactcaaaaaaaaagtttttctgaacattttgatcataactttcttggacctgaactaaatttttttaaattttgcctgataatagaaaacaattatggctatcgaatgaaatcaatttttaaatttggttttatcaaaaaaattttcatttgatggcttaatattaattaaaaattttatttacctatttttatgtctattcgacggtttttgtgcctatttaatgcattttgcgattttttctgcctttttaggtgtctatttctcgcttttttgtgtcaaaaaacgaacctttaacaatcaccataatttgagaggaattttccaaaattatctaaatacttcttttgattaccttccttttttacctattttgcagtgaaaaaattgtgtctctgactcatcaaaagggttataaattatatggactaaaaaacgtcaaatatggacataaaatatggactaaaaaggtcaaaatggtcaaatatggaccaaaatattgactaaaaactgccaaaaaaaataacgaaaaaggtgtttatattccatatttgcttcaacagacttaaaaatacaataaactaccaaatccagcttcacaattccaaaccaaatacatctcaaagtttctaatagtctcattctgttgtcagcaaaaattttcggaagcgaaccaaataccctaaaaaattggcaaaatttcgaaaaaattctcattttaggggagtgtatttttgaaaaattaacaaaaattcgatctttagggggtgtatttttcgcctttttccatttttcttgtgaaattttgtcaaaaatggccaaaatatggactaaaaatgcaaaaatggcgaaatatggatttattcccgaaaacccgcaaaatatggatttatatggactaaaaaccttcaccaaaccaaaaaattttaacgtagaaatgctatttttagcccctttcttcatagcatatgcgcggaaaaaatatgttaatccatataatttataactagggcaaggaattatatacacatgaatattttttcctgaactgagggagccatgaaacgtacgaaaaaaacatatttttagctcggtttgaagcttctaggatattccatatgcatattttgcatatttgtgcatattttgcgatttatgtgcatttgtgcatattttgcaatttttggtgcatatttgatgcgcatatttgagcatttttcaacaaatcctattaaaacggctccctctattaaagctgccatttgggcctctaatgaccgaaaaattttcaaaaatatcttttatggggtatttcataataaaaaatgtaacttttttttaaaagagggaatttattccaaaaantagtcagaaaaaagaaaatt

SEQ ID NO: 8686 - DNA, 4062 bp, Heterodera glycines
ttgggtatttcataataaaaaaatgtaacttttttttaaaaattggaaatttattccaaaaatagtcagaaaaaagaaaacttttcattttttttactcaatttcttcaaaataaatatattttacttttattttgtatttttggttctaaaatgactattcatactatatttagctattttcgagattttatgcttaaattcaacaaatttgaagaaatttataaaattttgccctcaatttggaaaatgtgcatattttgcgattttatgtgcatataattccttggccctatttataaccctattcatcaatattaatgattatatttcgtttgcaaattaatgtcaatgtgtgagaaagagaaagagaaaaagagagacacagtggtacggaaaggaagagaaaagagaatgggagacagaaggaatgaagggaaagtgagagagcaatggagaaaaatattaggcggacaaagcaagacaaaaagagggagaacagagataaagagagcgagagaggtaaaagacgaaaagaaagggaagaagtgagcgagagagaaatagagagggagagagagtaaaatggtaactgcgataacaaaacaacaccgcagctcaactgttgatcactttgatcaaaaattaaacattcctcatcctaaccactgttactcataagaaaatgaattaatattttttgcacaaaaaacaataaaaattgagaaaaataattttattaatttctccccatttttatttgtaaaaagaagatggcacaactgttcgaaaacattggcgttcgacgcaaagctgatgacaaattggtgaacgggcaagaggcgctaaaggtcatatttggaatgtatcggggaacccggattgggactaggccggattttccagcatcccgattttttgggtccactgaacaccattaattacctaaatgccatagctcctggaataaacaaatggaaaagccataactttaagcatttttaacaaactaaatcattgtctattagtcggaaaaaattcaaaaaattgcgctaaattgtggaaaaacgtttgaaaaataaattttttgagttttttagtcgtatttttaaaaaattagcggaaatttcgtaaactaatagaaaaacacttatgattatcgaaagataacaagaaataaaaattttttgctttgtaacgaaatggttttgttaaaaattttcatatttgtgttttttaataacgaacatttcctgtggtttttaagactcaacccccactgacccatttttaaatgtcccaattttccatcaaaatgcccattagcttaataatgcaatcgccggtatttagggttgcgaagtggtggcactttatttcagtgcccattggtgtccgccgtgccgcaatttcacgccggtgctcaagaaattttatgacgaggtgtgtccgaggggatgccatggccaaaaccaaagttcatagcacaggttcaaaagcacggcagatttttaagcaaattttcaatgcaaaaatttaaaaaaaacacagatttatcacaacttttcggcaattctatagagtatgagtcgaaaaattaaaattttttattgtcaaatcaaaggaaaaggagatttttgatttgcaaagattttaaaagggtcccccataggtcttgcaacaaaaaacttatttttttacccctattctgatttttgtgtcgtcccaaatctaagaggagcaatagaaaatttaaataccccaaaaactcggcatggacacttagaacttggaaaatgccaaaattttccggcatgcagttaagcataagacattgcctgactttaccgcaatttttaataaataggcttaattaggcgctgcttacttttaaactctttgaggcatacaatatatttaattaattaatttctgtccattcgattttagggataaataacaagtataaaaaactattcaaactcgggaacgacaaaacaaactgaaaagtgactaagaaaaacacattttttcccggatataaattaatttttttccactttttgcaaaaaaaaaaaaatttagttgaaaaagtcgccggagacggcgcactttgaaattgtttttgtgtcctttgatcgttccgccgatgatctgagcaactatttgcgcgaatcgcatggtgattggctgtacattccgcttggaagtgagcacatcgagtaagtggaggagggcattcgtgtgtgcccttttcaaggaaaaattttgcaaaaatggccatcacaggaaagggaagaaattgggcctcacgaccaggatgaggatttttaaaggcggaaaattttagaattttagttgataattttaaaaaatatggtttttctatgaaaataattaagattaatgcaaatgatttgttttcctttgttgcaattgaaaaagagtgcaatttaatattctttgaaagaatgaaaatataaagcgatttttggcttttttcagcaactttaggatttttttttttgaaaatttaaaaccgatccttcgggttgaagagatgaataggagcgttaaaataaatacacaatttttttttcatcagctaagacttcaaccatagtcagaaaactcaggaaagacagtaacaattgaaaataggtaaaataaaaattgccatttctgatcaaatttttattaaattcatttatttaaaattggatggtgtaaaacaatttttaacgaattcacaaatctacagaacattgtccaaaaaatttggcatcagtggcattccggcattggttgtgctgaagcaggacggcactttggtcaccaaggatggtcgagcggatgtgcaggtggaggacaatttgttgttttttgatgatttttctaacaaaattggacaatgagacgcggaattgaaattttccaaatttgaagggttgggggcggtcgattcagtatcgtagcaatttacacttggctaacttccagaatcatcgaactcgcaaaattaattaaaaatttaaaaagttgtggtcaaaaatttaaaaaaaaaaaattttttttttgaacatttatttggtcgaggaatttttgtaaatcaaaagcaaagcacacagatgtgccgactttttccttcatattttgtttattttttcacttggaaaagtaaattcctggcccctgttgaagtcccggtcctgacttttctggtcctcgcaaattcctgcccttttttccttaaattcccggttccgtgacagctctaaattaaataaaattttctgttaaaatttctattagctaatagtgaaccattagagctatattatgctaatcagctgcataataaaaacaatttggaacacgcgatatgacttttgaacaattaaaatgctaattgcgcactaattacaaagactaatttaatccattgcatcttttctttttttctttagaacctatcaccatcaaatgcaatggccaaatggcgctccggctaagagaacacccctttcactggggagactgatggaagaaaatcaaaaattttgatatggatggacacattaatacattagtagtgatatatcgaaaactaatttttaaatatcaaatatataaaatttttttgtttttttatacgattctctggtcgttttcgaacatgaaatttactattttctaagtccattcgtgtaaactcagaaaacctcaaaaacaatttcctcaactcagtaccgaaattttctgagaatccctactgcaacgatttcactaatagaatattggaccgacaaaaaagtttttaacttggtttacagttctgatatgacttataatgtctatttttgcctaaaggcgagttcaaccgggcgtttgcgtcaccggagaagggcaagatctaaaagattggccagataaaagtcaaaacaattgcgaccgccgaggaaggaatgtccaagattgcattttttgtcgcattgttgatttagtcaaaaaaaatcatattttggtttcataactacattttatgatgtttaattgcatttta

SEQ ID NO: 8687 - DNA, 4745 bp, Heterodera glycines
tttagctaacttttcttggaacaaaatttcaaacaaaattttattatttttatttatttttttgagtaatatataagctttaaccccacgtccaaaaattcctacgcatttgggttacttttttccacctcatttctgcaaattatccacatatttcaagttcaaatgcggaactgcttcctgcttgttgtctgctgctgttgacaacttcagttgcaattagaggggggggggcttttcccccgggggatgcttttcctccacagccctcgccaaccccaaaattatggcttaaatcgcgtaattcttataaatcatagtaattaaggatcaatggccaatgtcactttgtcctcgcttttattgtaaaatcctttgcttggatccatcagttccttaaacattgtaataaattaaaatttaaaaaaataattatcttaatggaaattcattataattagtataattagcatttaatttgcaccttcttgttcacgcataaggtataagcccaaccatttctcattgtcagtgcttccatttttcttttcaatttatgccaatattttccatggaagcccatttatgtaagtgacagattcgcttttacgttcacttctgtcgatttctctcgcaaattccgacactttttcaatttccatcgaaattattccattggatttgtcgggatcagaaatgcatttctcctttttatcatctttcactgtgacatcaatggccaatgtcactttgtcctcttctctgttataaaaaccattgctttggtccatcaattccttaattaataataattatgccaattaaggaattatgtacaattgacactcaacaccacgtttaaacagctgtaagaattgactaaataataaaattgtcacttttccatattttaatttttaattttgtagtaaatataaatttttaagcgcagcttggattattaaagaatgaaatcatagcgtaattagtaatagtttttcaatttttaatttaataagcccaaacttcccggttcccaaatttctggtcccaaaaaattctgcttaaataaaaggaaaaaatgatcagtcaattaggaaaggtttcaatttaaaaaaaaagtttaaaaaatgtttacgtaaatcctaacaaaattaatgcaataaatccaagtccaaaaaattgtaaacattgacctaaaatggtaaaatttgaattgggtttatgactaaaatgtttatcattgaaattcggtactcaaaaatgagagtctgctaaaacagctccgacaattaattaattcatatatcagtagttttgaaagtataatcaagaaaaattaataaataaaaaaacaggttcatcataggatggaggatattcaatgggcatttttccccaaatcatattgggcatttatgtttcgtcctccgttttgcttctttcacagtgaaatcgatggccaatgtcactttgtcctcgctttggtcgtaaaagcctttgcttgggtccatcagttccttaattatgttaaaatttaattgagcactatttatttgaattgtcactcacagcaaatgaaatgtaattggcatatccccagctgtacgttttattgtcaaaaacatcgtcatcgagttttctcctgaaatcctttacgccgctctttagagagacaattcgaaagtttgccgaacatttgcaactccaattttctgctcaatatcaattaattaattgttgttaatatatatattaattattagtaattttacaccttcttttggagcatcacacaaaaggcaaatgcccaaccatttctcattgtcagtgctttcatctttcttttcaatttgtgccacaattttccatggcattcctttgatgtgcacagtttcgcttttacgttgactcccaattatttcacgcgcaaattccgacactttttcaatttccattgaaagtgtgccgttggatttgttgggatcggaaatgaatttctccatttttggctcatcaacagttatgacatcaatggccaatgccaatttgtcctctgctttgttgtaaaagcacttgttcgagtccatcaattccttgattaaccataattatatcaattaagtaaatatgttaaattattactcacagcaaaagtaattaaaaatccaaatccccggccgatgtttgatctgttgataacccggtcacacaatgtccaaattgaattctccgcttcggtcttttctgacacaattcgataggttgccgaaataacgcagttccatggtcctcctattttaataatgattatatttttaatatttattaaaattggaccttcttttgcatcgcacaataagtaaaatcccaaatatttcttctcatcagtgtcttcggtcttttttcttatttctgcttcaattttccatggaaatccatttatatacacggcatcactgaatctgcttctcccgacagactctcgcgcaaattccgacattttttcaatttccatcgaaagtgtccctcttcggttgcccttggctttgttccaattaaaaattcgtccatggcttgggaatttcgacgagtacagcccgggcactccacgaagatacagaaacggatgggaattgaactgataaacgccgagcacttcttccactgttaacacaccggatggaactgtaaaatttcaacataaattattctgtaggcatcagtttttttcggccaatttcacataaatttgaaaaaattctgacccccctccttgtccatgtatgaaattcaagcattaaaggtaaaatttcatatcaaccaaaacaaattcaatttaattttcgatttcaaaaattttaccgacgcattttgcaaaatcctcctcatggatattaggaaaacgaattttgaacagtgcaggaccaagtacggaacgacgatttcccgaggagcattcaatgccattctgacgacatttttcatcggcccaacggagtgcctaaatagaaaaaaatatcgaaattaaaaaatgaaaataaaaaattaaattgaaattacagatttccaaatttcaaattcattgctgagcaataaacgatcactctcgagaagattgcataacattttctgatcaatttgcaaaaattcatctgattcgaacaattggcccgcattttgacaaatgtaacgcaaacatttgatggaaaaatccttaaaaaagcattaaattatcaaaattatacaaaaaagggataataaaaataatagaattaaaaataaatttgtctttctcacctccagttcgaaaatgagagcctggtcatatgctaagaaaacattgcgcaattcggagatgggaatttgcaaagatggacgaataaggccagggatattgtactttttggctaatttacaaaataattaactaaataatttaaaaaataattcacctgcgttgagcacagccattgcattgtctccattcaattcgcttaaatcatccgtgtaaatgaagctcaacatcactttgaacgctgctggttcaacgtcggggacctcctccaccacagagcaattagcagagactaattaaaaataattagggaaattagcagactaattgaaaataattagggcaattagcagagactaagtgaaaataatcagggcaattagcagagactaattgaaaataattagggcaattagcagagtaaaaacaacagagatgaggctagtccaatatacatatatattaatttgcttatgtgttcataattcatccccttttgcttactctttcctgcattggtaccatttgagttttctttgtccgtttggaacatcgcctcaaaaacattcgaagaagcaatcagaatggctttgtgagcatgcacaagcttaaaatttaattttaccgtaattaattgtctaaaaatgtcattcgctaattagaccgtaattaattaattgtttattaatttcacttgcctcttttttgtcactttgcccaactaaaaaatgcgcatcgacacctttggccgtgctcagcaacaatttcattcgatccgccaaggtgtccggctttgccatccccattttgtgtccactgtctacagcgaaaaatttgaacaaattaatatgaaaaaaaaataaataataataatttgaaaattctaatataatctccaaatgtacaagcaaagaattttctaccgtatccgccatgtaaagacattttttgaatccgttccatttctgtaattcgcatttgttgcaattcctcggttggcgtcagactttcattttggtacggtgctaaaattaaatttgaaatccttagtcaacaattttactataataattactccaattttattgcttaattaccctgatcagaagtaaattcggcaattgttgaatttggtgaaaaagacatattggattcccgaggttccttttaggggctaataatcacaaaagtcaaatttatgaattcataaaagaataattattgtattattttgtaaaaaatgcaccagaagagttaaatgaagaaagatgggatggttcacttatatttatgatggacggcggcgagcacataaaataataattcacggcaaaacggtgacccaaaaaagaaacaaatttgaattggattttgcttatcccccaatattcccatttgatttttatttcagcaaaatgatgacccaaaatctgatgagagattttct

SEQ ID NO: 8688 - DNA, 1835 bp, Heterodera glycines
ttaaattgaaattacagcttcccaaatttcaaattcatcgctgatcaacaaacgatcacgatcgagaagattgcacaacattttctgatcaatttgcaaaaagtcctctgatccaaacaattgagccgcgttttggcaaatgtaacggaaacatttgatggaaaaatccttaaaaattgcttaaacttggatcatgaatccacactagttcgactaatttcgaactcaacgaacccaaattcgaacacgagccagcattattaaaaataaatttgtttttctcacctccaattcgaaaaggagagcttgggcatacgcaaagaaaacattgcgcaattcagggattggaatttgcaaagatctgccgaccaaatcagggatattgtactttttggctaattagggaatccaatgattaataaattaaataataaaaccaccggcgtaaagcactgccattgcattgtctccgttcaattcgcttaaatcattcgtatagatgaagctcaacatcagtttgaatgctgatggttcaatatcggggacctccacatcagcagggcaattagcaggggctaattgaaattaattagggaaattagcagaagagacaaaatgaagaacaacatacctaattggtattttcccataaaataaatttttttttaccattttccggtctttctttcttggcgtcaaaacggaacattgcctcaaaaacatcggaagcgctcttcaaaatgagctgatgtgctggcaaaacctttaaaaacgtggataattaatgaaattgcaattgaaaaataaaataaaatttttatttttaattaaactcgcctcttttgcgtctccgtcccccaccaaaaagtgcacatccgaatgctcacccgtgctcaacaaatgtttcatccgatccattgacgatggcattttatataaaaaaaaattgcactcggaaatttgatcaaaatttttgtcttcggtaattagctctgaaatgaggcgcatttataaaagggataaaaatataaatttaaaaaaacgaattttagttttaccataatttttgatacatattttttgaaagccttttcaaattttgaaaaatcgttggccaaaaatttgctgaaacttccatattgtttaaaaaggtatttgccaaatttatggatctatgccaatttttccctctatttttatgagttttttccccggtggtgccggtcaaaaaaatgaaaaacaaaacaatgatttttttaaaagttgcgaaattatcagcaatatttgttttatgaatatttgtttcgttttgtttttgtgtttgtgtaggagtggagacagcgagaagtcagacagttcacatcgaaagcattaaaaataatcgatacacaacaaaaaaatttagaccgcagggggagggttagaggaaaattcagcaggtaaataaaacagagtttccatgttttttttttcaaaataagacaaaatggctcaaaaactaaaattcggaccccaaaaataagatttttctaaaactaatagtagcgtgaaggaaacgcaataaaaatatgaaaaatcgacttaaaacaatattttattagcggaaaaaccagggctgccaactgaaaattttcaaaatcagcatttggcggacaaaaaatcagcattttgaaaaatttattcaaaatatgacaatttttggtcaatttttatgaaagaataagttttggaaggcccggcggtgccgatagacgccgccggaggaaaaatagaaatgttgaccatttttaacaaaattttcactgaaatttagagcattttacactcaagaaaac

SEQ ID NO: 8689 - DNA, 2155 bp, Heterodera glycines
  unsure (1)..(2155): unsure at all n locations
ccgtaatcgtccaacgctttgccgaacatttcgccgtcgttggcccggtggagcaattcaaaggaatggaccaaggccggcttcaagtccaaaaactcgacattnaacaggcgacactcgccttaatatggagaactctaaaaataaggaacacacgaacaaaacacacgttggacacacgcgtaaagagtggcgtaagtttggcgcaatttgtcgccgagtaaatgcgaaagttccatcctttaatttgcaaacggaaaatgcaaagtgaaagaaagggcaattcacaatgccaaactgttcggctccaatgccaattgttccgtcacatttttctccacttctaacaaacgtcgtaaggccgagaaaaatgcgtcggaaggcgacccttaacagtaatttataattcagagtgatcagtggacgggatgagtcaccctgctgattgggtagtgccaatgccgtctcctcctcttcgtttagggaatatttggcgaaaaattcgtccaaaaatgcattcttggcacccaattcgcgcttttccgtctgcagaacggctgttctcttcagcaactcgcgcgtcttttccttgttcgtttgaatgcgttcagtgagttcgcagcaaatcgaattcatcgaccgaatttgctgtacaaatccctgcacgcggtcattcatctgaattaaatttccaaattgtattttcccacattcgccgttgctccaccaccttttcaagctgttccaagtactgttggttcagctccagctcccggtcctccaataccattctgagtttttgctccgtcgtttcggcatccaaacgcaaattgtcgttcaggtaatttattgtcgcaatgaattgctgaagagtaaaacactaactcaacaggagaaaacaaaatgcagggcaacttcgaaattcagtcgactttcccctcccctcctcccttttcctcaatttcccccacctcatcctcatccaaccgagcagtcaaaagtgcatctaatccacctctttcgccttctaatgtcatttaaaaacaaaacgacttaattaattgccaattaatgtccgcttaattattaaacgtaaagtaaatttgaaaaaattaaattccatttataaaacttattgttaaccaattcttctaaattagtttaattatcattttacgccaattatagacaaaataaaaggacaaactaagcatctttgttggggattctatgattaagggacaaaaggcacagaattcggggaaatgcacgcggaaagaattggagagcaaaaattgaagggaagagaaacgaaagtgaggcacagaaagacggaaaatagcgattaaattcgaagttaatttggcaattccatcccaaaggatgatacattttgcatcccatccattaaaatcattttgcccggtaatttgccaattttcaggggcaacgaataccctaagacggaatgaaaagtcacatcacaatccatttcccgccaaattcctccggtgcctctctctctctttggtaaaagtttgttcaaatcggtcttcgcgtgtttcgcagtttctcaagccgcgactgcaaatggttattcgtctctttgctctcctccaatgcttgttctttgtcccgtaactgaaaaggcgaattaatttttggacgagagcttttattggataagggaggtccggcgtggcgacagtcgctgccggcaaattttagaatttgaattaattttttaatgctttttggtcagaaaataatgagttaataaaaaaaaattgataataaagataagaatcttacattaaaatagatattttaaattcttaacggataaatcaaagcacacccaaaatttaaaaattgtcccggcggcgcctatcggcaccgccggcctccctattcccgaatttttttggaaaaatctcgctgaacaaaagtttgctccatgtccgtccgattccctttggttcacctccttcttcagctgtcggttcgtcttctgcgtctcttccgcctctttctccgcctgttccgcgtttgttttgtaccttttcagttgcgtctccgtccgcgacagcgacccctccagcgcactcttttccctctcggcctcctgcagtttcagcttcatctcggccaattg

SEQ ID NO: 8690 - DNA, 2397 bp, Heterodera glycines
actaattcgtcactgcttgtgcttcctgtggcgttgtgtttttcattttggcgtcttctgtggttgtacaatgccttctccgtttcgtcaatttggttgcgcaacttccgattggattcgaccagcctttgaaccttttggtctaccgacgaagtgccgggcagtgccttttcaatggccgacaaagtcacgtgggacaacaaaatggggtcgaatttgctgacagagaaaggcaaatgcaaaatatcggccgacgacttacggcgcattgtttgttgattggctaccggtggatccgttcgaattgctgggcaccgccggtggctgtagcaaatcgtcgttagggtcctgctcggcaatgacgaagccattctcctgaaaatagtgaccaatttcgagccgaatttccaactcgtaattttcccacgtgaatcagtcgatctctttgcgatatttcgcttttcatctgctggtgctgcagttggagtgcctcgacggtctttctgagcagtttcaactcctcgctgatctcgcgattctcttttgaaaccttaaaaactaaagggaatgaagcaaaagtttggtaaaacctgaaaaactgtcacgtccttctcctccatttcgtccttgagcaagtcaatctcgtagagaagtgccgatttttcgttgtccaattgtgtgtacagcaacatcgcccgttggtatttgttttccaattcggtcaccttttcctaagaatttataggctaaaataataattcgtaattcgaaacccatatttaaataattcatttgcttctcctcacccaccaaattgtcattgtcggccaacaaatggtagtctttttggtcacccgcttttattgacttctcaagacaatccatgcgaatttggcgcgcttcgtcgcgcgcctggcgctttttgttggagcgctcttcggcctaataaaacggaagttagaaataaaaaataagtcgaacttttcttgtcgatttgccattgctatagaaaatctgccgaaacattctttcttttggaaccaaccccatgggaatttgcaaaaccttcacatttttattgagcccattatgttgaaaatgtgcaaaaagggggaaaagtgataatttattgcctcgcgggatatcctgtcgagcacatgctcctccatgaaggaactggccggcgcacgacgccgagaggacgaatacgaactcatcgggaggggagggcaattattgcttaacaacacatttatcattttgaaaaatagtgttaggaaagtgtaaatgaaaaataaaagaaaaagtttataattaattaccggagaaaaaaaagtgtaatactaccgatggtaccccccccccttttttgatagaaaattttttttcttttaaaaagccttgaaagcatgcttctgagggtttttaaaaagtaattattagagcacggtaaaaaaaatgttgtagaggagtcaaagttttgcgggaagtgatcgggattcacgcaaaaattaataaaataaaaacaaaaaatttttttataaaaaatttaattttgacgaatttagtagaaggatctaggtacataaaaaactaattattagcatgcaaatgggtaaaacttaaacaatccgatgcttttcaaaaagatattttacatttcctctgtgtttgggacaaaagatatcccaaaagatttatgtatatgaaaaaaggaagggacgttaaacttaagcggaggagaagaaatttaagactctttaaaacgtgaaaagagagacattctcacaaagaaaaggggaaaagagagagtgattgaatgtagaggagagaacggaaaagaaagagagcgaaagggaattttaatgggccaaattatattttaaatgataggcaaaggctaactaagaagggatgagtttggtggggagaaaaagccacggcattcattccgtgcagcaattatttgccaatgcctccgtttattttattcgaaagaacttaagggaaaagggaaaggcaagcgaatccgtcgatttaaagacggatggatgagaagagaatcgaagaaaagcagcggagagaccgatgggcgggagaagcaacaggcgcccgcttattttgtccactttaatgagagggaagcgaaaaaagggggagggaaatccgaaagtgaaaagatggaggatgggcagtcaatggatggatgaattgtccaactcaacacaaaaagcgaaagtgaacatttggacgacagacagagagagacagacatttgaccaatcaaaggacttttgagtctttacacttaagtcattcactaattacctacttcattgtctttacatgcattttaatagaatttcgtttaaaaaacatctcatgcaaatcgatctt

SEQ ID NO: 8691 - DNA, 2237 bp, Heterodera glycines
  unsure (1)..(2237): unsure at all n locations
ccccccccccccacccccctctcattgtgaactctttccccccccctntaattnntgttcattttccattgtttgttttcatcctgtggttgacanatccgcttcnagtatcttccgtttgaccttgatccgatttttctatacaacattaaacaaacggaaaattgtttataaaattatcattttttgtccctcaggcgcccctcaaaatgaccccccaatttcgccatcaaattcccttgcttttctttctgttattcacttttttcgcctctgcaaatggcacttcgaaatgcgtttgggtcgttcacaaattttattttttaaaaatgaattttgaaatttaaggtccgcggcgcactccaatgccatcgcgacccgagcaaacatcagaatgtggaagtacgggtcattgaccgggacggatggggcccgttgaaggtgttggaccctgacgacatgatggggtgtgccggggttaaatgttgtcaacgaccgattgattgtttattagtgttttcaaggggaagggtgccattaatcgatgcttaattatgccaatgctttttagcgtgtcttttactgagcaggacggcacctttcagctcgacggttgtggcaacgacatgaacttcctcccgggcgtggtcagtgagtgccgtgacactgtccctccgttcctttgcccatgcccatccttcgttctcccccccccctttttagcccaatttgcccgaccctttcgttcgcattttgcatttctgcaacagcgaagaaggcgaaaccatcgaattgcccgaattccgaatttttgtggtcattctcaaattgtttgtgctcaaattggcttttccgcttcagccggacacttatgacttgggcatcctcgtgttggaccagaagactttgcccaattccaccgttaatttccccgtgcccgagaacccccgtcgacgcctgcagcaggcaaaaagaccgacggaagtcggcactttggacgaaagcaatggcaaaaagggggcggaagatggggtgagaagtgaacggggcaagaaaggaaaacaaattcgaaatttggacattccgatgaattttttttttggataatgtgaaattttggaattgaaagtcggccaatgaaaagtttctgaaaattattaaaaatcgcggcaccaccttttttagtttgtgactgtcgacgcgccaaaaagtcacaacgccaaaggcctggacgaccttttgccgcccggcaaaacggtgaccaaaacgaacggcgatttgttgtgggagacgcaatcggtggagatggaggaagtgccggccgaatacgacacgtcgatacggcaaagtcagcagcacaattgggaggaaggtaagcaaaacgaagaagccaaagagaacgacagacacaaaatgcgaatgttggcattttgttgcttcacttttcagagtccaaaggcgatggaaatgaaaggaaaaattggacgaagaaaaagcaaccgacgaaggaagagaaaaagaggaaatgatcagacagactcactctgctgtgatggcatttcctataaatatcctaattacccctccccgcttttctatggaatgccctcaaccgaccgacactttgtgcataattttttcactttcactatgaaatatacacatatacagtacatatgtattcaaaataaacagagaatcgaaaagagtgacaaatttctgcaaaatataaaaggcatttcaacaatttttgttacggtattgtcgtcaatgtacggtacgctgctgttcggcctttctttgttttcttccaattattcttgtgctttgttctgttagcctccgtctttttgcaaatcatttctcatttccatagctttgtcttatgcgaatccgtccaatccttctccattttctcaattcgtcgtcatttgtccgtccattcattggccatttttttgtttttcttttttttccattggtggcaaaatgcaaatgaatggggaaagggaggcgagcaaaacgaatcagaagggaacagaggacaaagcgaccattttatggaagtcattcattcatttgggtccatccatacttttctttttctgatcattttcctttcctttttctatttctctacaaagcatttcagtttcaggtccctgtccttttgttcatttttctgatcatttctctttatggcttctctctttctctcctctctctttctttctctg

SEQ ID NO: 8692 - DNA, 3193 bp, Heterodera glycines
  unsure (1)..(3193): unsure at all n locations
acgctttcccgtccgattcggatggaaatgtgccgtttttgacgtcgtcttctcgggcactgcaatatgttgcgagttcccaatcggcatccgtgtccagaatttgcgaaatgagctttttggcagctgatgccgatgcgaccgcttcagacttcagcagaaacattgtcaacagcgctttgagcggattctcgatcttcgtgagcccaatgcctgatcggtcaaggacggcatccaagtcggccacgaccacatcggagcagcatttgtgctcgtctccggcacatgccaatgtccaagaaagcgttttcggctcctcttcttcctgaacgaccgaaatttggtcttcttcttccagattcgcttctttttcgctcccgttcgcgtccacctctttgccgtccatcttttcctctacattttcttcgttttcgctttcgttggtctccgcctctttgtcgtccgtctgttccgtttccatgtgctcctcctcaccgcctaaaaatgcaattgacctcaattgcccaattattccgtccggtttagagttcaatttttcttccccatacaattttatgttttcttgacaaattaatccggccacacttatcagtccatttaaaacattcttataggggtttttccctttcggcattgtacaaatgttttgcaattcctttggtacgcgcactaatcgttcaagagggactgtcattggattaccgtatggattatcggacgggattacggtcgccgtcgatttattcaattccgtaatacgaaatgggccaaaatggttccacaaaatctttttatgtggtgatcgaatgtgggacccgggaaaaatgaccataaccctgtctccgatttggaatttgttctccgtgacttttgcttgtgcgtcgaagtgttctttcatttttgcacggcttatttgggaattttttcgcgcttcgtccactaattgcattagggactcgcgaaaaagttgaatatacgtattttggtctattgtgtagagcggatttacggcgaattttaattcgtgttccaacggaaagttggctggttttccgaacattaaatgatgtggggaaatacccgtgacttctgatggtgtcgaattataggcaaacactacaaaaggcagtctttcgtcccattcccaggctgaataagtcgactttcgtagcattcctagtatcgtctgattaacgcgctctgttacaccgtttgcctgaggatcgtatcctgaggtggtcgttctcttaattttgagtgtttttgaaatttcctccaatgtttcgttaacaaactcctttcctttgtcgctatgaagctttttcggcgttcccaagatacaaatgaagttttttacaacatttttcgcaatcgtttcggcatttttgtttgggatcgcgcaggccacgaggtatttcgagaaatgatctactgccaccaaaatgtaccgatttgaagatgctgcgggtccaatcgataaaatatcgatacaaaccaattccaacggctcctttgtctcgactatgttcaggggaggctcatttgatcgtggttttcgtgcatgtgcacaaactctacaacgaagtgccgcccggatacactctccgtacatatttggccaaaagtaaagctccgagagctgacgaaaaattttttttccgctaaggtgccccgcacaaattcccgagtgcctttctcttatcatcatttccctgaactcttttggtacaaaaagctgtagttttccatcgttctcattgcggaacaaaagtccgttgattaacgaaaaattgtgcaaagatgacaataatttttgtcgatcgcgaacgtcatgcggcaaaacacgtttttccaaaaattcatagacaaacgccaattcgctctctttggtcttttcaacccaatctttcctctgttcatcactcaagtcttcagcctgttcggcgacctgattttctcgaatttgcccaatacgaaaaatttcttttgaaattgggatttccgcttttgaattttcactttccacgttttctgttgcgttaagcaatgttttggacctagaaaggaggtcggcaagtatattctttttgccaggctggtattcgacttgaaggataaaacgggaattcatcgccatcaaccatttatccacacgactatttccagtctcgtttttgcttttgaacattgaaacgagtgcacgatggtctgttatcactcttgttggaatcatagtgataaattgagcatatttctttgtgccaaatctgatggccaacgcctcaagctctgttgggcagtatcgcgcctcatgccgattacattgtcgtgacgcgaagtaaatgggtcttaaatttccattttcgtccggctgacaaagtatggctgctaaaccaattttactggcatcggttaacatcacaaattgccttttttggtcgtctactgctgctttgaaatccgggaaataaagcattgcgtggtccaaaatgctcttttttagtgctttaattgcgcctaattcaacttccttgatttcaaacttcacgtccttttttaggagacgaaacagtggtgctgccaaagacccaaaaccaaaaatatatttccggtagtaagttaagaatccaaggagtgaatggagttcttttttactggttggcgttggaagttcaatgactggtttgactttgtccatgtccatttttacaccttctcgagttaagatatggccaagaaatggaatttctttaacggcaaaacggcacttggaaattttcagtttcaaacccgcttcatcaattcgcttgaaaacttctcgaagatgctttaaatgttcactccaagattcagaagcgatcaaaacatcgtcgatgtacacaaaaacagaatcgttaatcattccttcaaaaagacgcgtcatgaagcgttggaaagttgcaactgcgttgcagaggccaaacggtaagacattgaattcgtgaagtccgaattccgtcacaaatgctgtcttttcaaccgattcagggtccattcttatctgccaatatcctgacatnaaatcgatgaccgagaaaaacttttttccgccgagcgctaacaagggctatatcaatggtttggtaaaggaaatgcatctttacttgttacagagttcagccctctataatca

SEQ ID NO: 8693 - DNA, 1655 bp, Heterodera glycines
  unsure (1)..(1655): unsure at all n locations
ttggccctagaaaggaggtcggcaagtatattctttttcccaggctggtattcgctttgaaggataaacggggaattcatcgccataaccatttatccacacgactatttccagtctcgtttttgcttttgaacattgaaacgagtgcacgatggtctgttatcactcttgttggaatcatagtgataaattgagcatatttctttgtgccaaatctgatggccaacgcctcaagctctgttgggcagtatcgcgcctcgtgccgattacattgtcgggacgcgaagtaaatgggtcttaaattcccattttcgtccggctggcaaagtatggctgctaaaccaattttactggcatcggttaacatcacaaattgccgtttttggtcgtcaactgctgctttgaaatccgggaaataaagcattgcgtggtccaaaatgctcttttggtgctgccaaagacccaaaaccaaaaatatatttccggtagtaagttaagaatccaaggagtgaatggagttcttttttactggttggcgttggaagttcaatgactggtttgactttgtccatgtccatttttacaccttctcgagttaagatatggccaagaaatggaatttctttaacggcaaaacggcacttggaaattttcagtttcaaacccgcttcatcaattcgcttgaaaacttctcgaagatgctttaaatgttcactccaagattcagaagcgatcaaaacatcgtcgatgtacacaaaaacagaatcgttaatcattccttcaaaaagacgcgtcatgaagcgttggaaagttgcaactgcgttgcagaggccaaacggtaagacattgaattcgtgaagtccgaattccgtcacaaatgctgtcttttcaaccgattcagggtccattcttatctgccaatatcctgacatgaaatcgatgaccgagaaaaacttttttccgccgagcgctaacaaagtgctatcgatgtttggtaaaggaaatgcatctttaactgttacagagttcagccctctataatcaacacaaggcgactttttctcggtaagcgtacgggacaggtctatgttttgctttaatcggtttcgcattttcagtgtcaatgcgatgttcgaccatgtccgtctgtgtcaattcctcctcacgaattgcgaagatgttgtcaaattcgcttatcaatcgcccgagaggtaaaaactcttgatcagacatgtcttttgcctgacttttcaaacattcgagaatttccatgctttggcacttaatttcattcatttttggtgtcaatttaagattgttcaccaacaatggtgagccaagcgaatcgtccgcctctgcgaaaagatttgtcggaaacaactcgacaattatttctttttcgtcaacttgcacgaattcaattgatgaattcacaattggaacggttattttccctgcggtgattttcccaacggttggctcaaatctatgcaaacttttctcattcgacgatgtgacaattacttctttgtcattccattcatttccaactgacaatgttaccagtttcattgataacggtttgagagtcgtttgataaagaattcccacagacttttcctttttcggnntgattcctcaaaattgatcatttc

SEQ ID NO: 8694 - DNA, 4563 bp, Heterodera glycines
tttcacttacagtttgcctccattaacttcgccctggcttctttgttctcccacagtttaaccattgctgtacccccaattagcttctccagcaatgcaatggcgccacgcttgtggcgtactgtatccgatataccgtttcgcactgtgcccgtcactcggttgactacaaagtcccaatgggaactttggagtactgtacgcattgaggacaaagtttcttcgcgagtgtttaaaaaacattcggtgggcgactgccaatctgtggatgggaagttcctcttattgaccagataggtcacataggcaatttggtaacaaattatgcggaatttttcggcatgccaaaagtgcagttgcacagccaccatggcacgcaatttggcccgtgttctaataatttccgtgaaattagcagggttaatcaccactttctcggtttgatatatgatcgactccatcaatttgatgccgagaaatatctctgcttgaaaagttgtgtccgaatcggtggaggaaaacaacgccaaatagaaaaggtccatctcgtggacgtcatcaaatcttgctgaaaaaactgggtttgaagcttgttgatatcgacaattaattgagtcccagaaacagactttaaacaagaaaaaaaacatttggacgaggaactcggaaatgaaggcttttggaaaaaatcaaaaaataataaaaatgtaaagctaggcaatgctggttggtgtgtaaaaattgacaaaaaaaatgctaaattttgcagaactttgtcattccccccctctgatgtttgagtgcttaaagggcctgtcacaaaaatttaaaaactagaataagaaatttaatcttcctagctataaaacaccgctcgactccttcaaaaaaattaccatattttttaaaaattggcattttgccaaaattataatttataaaatcaacaaatttcttgttcttctccaataagttattcagtacaaattcctgcgtcccttcaaatgttggtgactttaagaaaccttgaaaaatttctaaaacatttttcatttcctcgcaaatggaattgtcccatttttgttctccttcagtggggaatggcgcatttagctaaaagtttggcattgtcctaattcgtttttttcaaatttaatttaaaaactcacttttccagcaaagttatatgtaaaatatgttctccagctttcgctttcattgtataaattgcgatttgaaatgacatacgcccaaaaactttttaaatagcaaattttcacaattttttcgtcaaaattttcgggttttcccaagagaagcgttttttgggccattatttcaatttcaattgccacacccttttttatttgctttatgattgataagagttggttgatcagtgatttaagttggtaatatacggtgttcacctccaacaattttttatcacggcttgaaattggccgatccgccaacatcaaatgttggtagcagctgatcaagtccgaatcagcttaataatgaaagccaaataatcaaaacaattatgattaatgaagctaatgacaattagttggagagtgttttgaaaatttattacaaatttgattttggcaaaaattcagcgaattaataaattaaaaatattatttaccatccgaatcaacgcatctttcgttttctgctctaccactttcgcttcctttttctcttccttttttgtctcctacttcatttatttcctcacttttttcttcttctcctttttctccatctgctcctccccgcttttctcctttttcttctcttccttcactattttccactccattttgttctcctcttcctttttcttctcttcctcctttttcttcaactgctcctcccctctcttcttctttttcttctgcttttcttttttctcccgctggttccttttctcttcctttttcgtttccttcttcatttatttccccactttttccttcttctcctttttcttcaactgctcctcccctctcttctcctttttcctttttgtctctttcttccttttcatctcctttttcttccctttttcgtgttttttcgtcttcttttgttacctttcttccttcactattttctcctactttttctcctcctccttctacttctccattggctcctcccctctcttctcctttttcttccactatttctcctcttcctttccccttttcttcatcgtcctcttttccattgttttcgttttcattcctctgctgcttgcttcctttggcattttccattaaaatttggtatgccaatgtcatccgtggtatcattttttgaaggcgttgttcgttaatgaaaattgctgaaattttaattaaattaactaataattatgaaataatcaattaattaattctcactcacttttaactttgtccaaaaagtgttgctcattttcgatcagtccttccatgatttcgtcatgcattgtcaacagacttatctctgtcgctaataaatttgaccgattttcttcacctttttcaattacaatcacttgggcttcttcgggaaaaagtttgtctttgtcacttcttaatgacataatttcccttttgtgtgctttttttgccgctttgtctgtcgccgattcgctccaggcaatcaaatccatttgaagttcaattttaaaaaataaattctcaagatcgggctgcatttcctttgtcaatttgtgttgcctttttttgaacctaaattagggtgaactatgatgaacaacccgcgaagaaaggggttaaatcatctgacaatgggtgtcatgacaactcgtacaaaaggaaactcgtacaattgcttaggttaggcatagcttttaggcttaggcctaagctttaggcttttttgtaaaatctgagttttgcttttgtatgatttgtctttgacccttgacaatgagaggtttttgcatcaaagaatttttggtgcaataatgccaaattaaacaacaatttttttttgcttattgcgctaaaaatcagcgcacactcgactacggctgctacagtaggtggggcgagactccgggctccggaagaattccgcgcgtgatccgcatctgttcccatttaatcttttgccccaaacgttgaaaggtgaaaaagcaaagcccatccctggtaactttgctgcagggatgtaacggaattgcggccggatttctgattatttttcttgtaaaccaaaatagaaaaacagaaagtttttcaaccaaaaaaattattgaaaactaagctatgccgggtttcggggtttggcccgctcaattccaaccccagagatcgatttccatccaccaaacactaacaaattgttagacgagttccgtccaatcgtattatgtaagcctcgggaaaggccccgaaatccctaacttaccagtgataaaatgccaaaaaattggccataaaaagtgctctcgtgtgaacatctgtttcactgtcactgtccatataatttagataatatttgacttgtaattggcttatttcgtctgttgtcaaatctgattttaattaggaggcaattaaataattatttttatattacggtaatattcaaattaaaatataatatattcattcaaaaaattaaaataaaacattcaccggaacggaacacctgcgcaaaactcgcatttccttgtagtaaattatccaaaattgcagtgccttttaatggtgaggtgaaaaatgttctcagtcgatgtttggcccctttcatttggccaattgaatgtgccaaaaagcgactgagtgcgttttggcactccgctgattggcacacggtcagttgagtcacaatttcggaatgttccaccattagttgatcttttgccctccataaaagttcatcggtccgttgaagggcaaattcgtcgtaaattatcaaaatcttttcatgtttttccaaaattggaattttgttgtataaatcggccaacttgtgccaaaatttgtaaattttctcaaaggaattttcttgtacattcgttttaatttgcgcacaaatttcgcaaaatttttcactccaaatttttcttatttctggataaattttcttcattgtttcgtgaccctttcgcccttttagtttcatttttccaaatgaattggacataacaaaaatggccatcatttggtaaaaaaatatccttgttgataaatccgcttcattttgtcgtactaaattcgcgtcctttttttgcaaaacttttacatacaaatttgccaatcttttgtcagtgatatctaattaaaataaataattgaataaaatttgttctgctaaaattgctattttttgggatatctatgaaaaactcattttaataatccgttttaaattattggctgaaattaacactcacaccctcccacaagaaatttattactctaattaccaaataacatttcaattggtcggaccaattcattctctccaaaattcatgccaaaatgctgttcattcttctctttatttcattattccatcacatttcatcat

SEQ ID NO: 8695 - DNA, 3450 bp, Heterodera glycines
cctcttcttcatgtgttgttgttgttggctccgcccctttgaatttttttcggtgtcgactgctgtttgctaattgcgctaagcgtttgcattaaaattcgcgcgcgctcgtggcatgtacaccacgcacatttcccccgggtatatatgcgttttcaggcgcaactgttgctccgtggttgggtgcatgtcgaccaacaggtagccaaacggttcggccgttgcgtcctcgtacgcttccaagaagtagcgtagcgccccgcccggaaacagttgtgcgccgaggttgcggatctgaagtgcgccggccgggttgcgcatcaacaccatgtagtgagagttgttgcgcgctatccgaagctcacgagtgaacagatgctgcgtgatgagcaccacgctgacgccccagttgtgggagccacgggtgaacaccgtgtccagaaagctgcagcgtagaccgccggacatcaggtcgtccagcaccaacaggagccgtccgcccgtagcgcgtgcttcccgctccacatccctctcctcgggcgctccatggcacattctgatcgaatgttttccctccgtggtgttgctgtcacttgaagtggtggcggtgttctccatacgttgtagccggagcacattgtcgttcacttccccataacagtagagcacgccagtgatagggccttcactgaccatcaggtcaatgtgagaaagaaggcggtccacccactgcgatttcccgctaccggtgcatccggcgacgcacatggtgaacgggtgcttgaagaacattttcccttattcggttttttgcgtccctctgtatttgcacacacacacacacacatatatatataaatatgtagataaaaaatttcttcctccattctactaaacccccacccccaaaatggattcattcggaactgtcgcctggattctgcgaccaacggctcagacgacaggcactgctgtgggctcaatggagtacgaagaggaggaaaacgggacaggaaagttggtccacagtgacacagctactgtcaccacacctaccaccgccgagtttagactggaaaaagaagccccctcctccgagaaggacggtgctgaagagggcagcggcggccacggcacactgctgttcatcgaatccgatgatggggaggaggaggaggaggacattgaagacacccccgtcgccacagactccccctcggctacgacggcaaccgttgtggatgactcttccaacactgttaaaggggtggagcagcgctccagtgagcacagtgacatgacgaacggtacgggcggtggcggtggaagcgaaggcgcaaaactgctcggcgggggagaggaagaggaggtaggtggaggccagctaattttctacccccccccctactgtttgtagcctgttcgaatgccgctgctcaactacctgtgcgcgttcaacgactgttcaatgaaggagcttcaactcctcttccacagtgtccacgcgcgacagcgtatggtggcgcatctgcaacaacactgccgacttcataccgcgcatctgaaaccggcggagcgtaacattgcgctccactgtcacgacctcagcgtgcagaacgccaaccggacgttcgcctgcggtggctatctggagcttaccgtaagtcggtgagtgtgtagaaccagtcatggtgcggccttctgtccaggttcgacaatacttcttcgccaaacacgggctaaagctgaagcacccgtacatgccgtgcatgatcgagttcgggggcggcacgcacgcctcctactatccgtaagcggggggtacgcaaaaatgggggaagtgagcgtaaacgccttcagcctggagctcgtccatgtcgtgctggagcgtacgaagcgcgctaaacaggaggagacggtgaagcaagaagagccataccgtcgtgaatccggcgacgtggctccgacaaagtcgatggcaatgccggaacgacattgttgccgctgttgctgtcgatgcgctaacaactagctttttgagagacatggtcattgtagatttgcgcgcgtgatcacgtgacttattgtgctgttatagtttttgtgcactttttttgaaataaatttgcaagcccatggatttgtagatgttgaatactatccgaaacagtacggtcacatttacattttgccaaaacaatcggccaactgctttctcgcacacagaattccgtgcgatggcaacgcatggcatctgtacggagtacgcgccgcgacgcttccctgccatcgtgttacgcattagaggctacaacagcggtgacgacgccgttgagcccaatggagtggccacagctctgctgtttcgcagcggacgtgtcgtcatgacaggtgtgcgcgctcccgcgtgtggtctttgctcgacagtcaacgtgatggcccatcgggtgcgccaccgggttggggcggcgctccgtggggctggactctcagccgctgcacgagccttacgcataggggaagtgagagtgcggaatctggtgagcagcgtacgcttgcccttccgagtgcacattgaacgtttgtacaactcgttgacgagccgacactcggcaattgaccaaaaccacgacgacaatgttctcgccgacacccaatttgtcggcgtgcgcagctgccgtctggacttctgtgccttcccagcgctacgttgcacgctcagcatggcactttcagagtcacgtttgcgaggacaacaacaacaaccgcagagcgtggctccgccgatcgccgtcacttttctgctgtttgtcaacggccagctgattgtgaccggtgtacggagagtggagcacatcgacgaggccttacagaacatggagacgatggtcaacagaagcacttacaggcgatagtcgaaactcccccaccccctccccccataaagtgcgaccacactttcacttatatttttgcgcatacatttaaaaaattatccaagtaccaaaaaatcaatctcatcatcatcatcatcatcatcagtgtcgctttcgtccaagagttccccatcttcggcttcctcctcctcagcattgtcacggtcagcgtcgtcgtcgtcgtcgtaccagccaaacggtctggtgaagtaggcatttccggcgccgccgccagcctccctctcgtcaagcgcaacgaccagccctttggtgtacacgggctggtacagcttggtgccgcggcgcgtgaacacctcggcacgcttcgtacgcacgaagcgggtgcaggggacgggcactcgctgctccgcgtcaggcatcctgatcgggggtagcatacacacacacacacacacacacacacacattccattgttatcccacccaccccctcgtgctcaccggccgaagaagttgagcaccaactgacgcatgcgctccaacgggagcagtt

SEQ ID NO: 8696 - DNA, 3457 bp, Heterodera glycines
ctggtgcgcttctgatcactactcgaaaaatgagtgattgaattttcactaaaaagttaagcctaaactttttggcctgtataaaaaggaattaaaaatttttaaaaatttattcatctccctttttgatagaaaaagcatcagagtgcctaaactaacatgtaaataaaatttggtgcgtttcagaaccctttctgaaaaaaatatttatgaattaattatgcaaaaaacaaataaataatgaactctcttccttaataattttcctgcaccgaaggtactcactcggccgcttcgcggcctcgtggtgggccttcggtgcaggtcaattgtggaggctgatgcttcacaaggaggaattggtgcaacaatcagccatcaatttcccgacaaaagtgaacgtgtcattgaacacgcatcatgcactttcacggctgcgcaacaaaattacagccaaatcgaaaaagaggctttaggattggtttttgcggtacaaaaattacaccgcatgctctacggcagaaaattcactctgttgaccgatcacaagcccctactggccatcttcggatcaaaaaaaggcattccaatatattcagccagccgacttcagcgctgggcgttaattttgtcaaattacgaatttgatattaaatacgtcaacacaaaggcattcggaaatgccgatgtactttcgaggctcatcgcaaattacccgaggccatcggaagacatactcatcgcaaacatctgcaacgacactgattgctgtgttaattttgtttttgaggcaaaaattgagcaacttccgatcaccgcgaaaataatagcggaggaaacagcaaaagacgaaattttgcaacaaattagcgctttcaccaaacaaggatggccacaaaagctgaacgacattaaattgtctccttttcttccaaaaaagggacaaatatccgaaatcgaaggatgcctcgcctacggtgaacgaattatcatcccttcgtcactccggaacaacatcctcaaatcattgcattttgcgcaccccggcattgtgcgaatgaaagccattgccaggaaccacgtttactggcccggaattgactcagaaattgaacgagtggtgaaacaatgcgaggaatgccactcagcggccaaaaatcctacaaaagcgacccttcagccatggaaggcagcaaacggagtttttgagcggattcacattgatttcgccggcccgtgcgctgacggccaaacatacctggtattggtcgacgcctactcaaaatggccagaagtatggcaaatggaaagaacatccagccaactcaccatttcaatgctcaaatcattcgtgcatcggcttggaattcccaaagaaattgtctccgacaatggaagccaatttcgatccgccgaatttgcacaattctgcaaagaattcgacataaagcacaccttcacgccgccgttccacccaatgtcgaatggggcagctgaacggtttgtcgacatttttaaacgatcaatgaaaaagtgccgtcaagagggaaaagattggcttcaaaaagtgcttttggcgtatcgcacgacaccaaacacggcactcaacggccattcgccagacgaacttttcctaggacgccgcatgcgcacaagaatcgcacttgtccatccggaaaaacaaaaactccagccaccaaacttggaaaattttcaacaattccaagggcagtacatcaaaaagatggaaaaccaattcaacataaaacatggagcaaaatcagccattttccaaaatgaggaaccaatttatttttggaatttaaaatacaataaagccacttggcttccgggaaaaattatcgaaaaattaggcacatctccgacgtatcgcattttggcaccgacgcttggccgagccattcatcgtcatgccaaccaaatcaggcgacgtttcccaattgaattggaggacaatgatcaagttgtagaaaatgatcaaacccaggcacaaaatccgcaacaatcgccgatcgcgcacaaaccgcagacaaatcgtcagcaatcgcctgctcaaccagttcttttgcgccgatcaggaagagtcaaacaagcacctcaacgactggtcctggatccgacaaagcctaaatacggcttaatccgatcatgaatcccaaatcgagggacattcgacttaaggagggaggtgttggatagggatcaaagatcactttcccatcattgttatcgacttttcccctccccctttctctgtcttacattatttccattgtcttcctctctgcctatctcctccacatttctctgaccccgcgtctttataagggtgcccattccctcactcatggctctccgctccattcattcgcattggacatttttattattttattctcctccgtcgctgcactcctccgacctcatcaatttgtgcatttatttttatttgtgtttattaataaattgttgatacacaacagcttcctttcccccttcttcatcctcctcattctcattgttagctttttcttcttcaatttgtacaaaactgaattgttcaaaagaactgatcaaatgtaaaaatacataaaatgatattatattattaatttaccattttacttttccattggaaataaattcacttattcattgatattctgttccatcacttactttttcttatcttaaattattcaatccggttttatgaacgaatattacgcgcaatatgtgcgagtgatgttcgtacacacattaattattatttgctaatgtcccaagcgacgcatccataaaatttatgtctcattccgcgcatcgaaatgaatgtccggcgataattacagccatcgatcatcaaaacgatgatgaaaaaagtgcaagcaaataaaaggcactgagtgagtgacaataagtgcatttatcatttgttgcgtgcaattgtgcatcattcgcttttttttattgcgttatcgtatttttaaaggtgttctgattactgtactatttctgatcagtgatcaatcagaaatcaaatgctattcaaaatctgagaaaacattcacttttttggtccccagggctgcttttcctccctttgtttgtcctgtcaaatcattcgttttgtttttaatttgcccctttttctctcatcagccaaataaatctcttttattttgtccctttcacttttattccctcccttttttcctttgagttggtccattaaagaggtgacaaaactcgtttagcttctccccaccattttcatcatttcctccccttttaactattttcctctcttttaccgattttctccgtttttatgtgctcttctctttttctctgcttctcttcctctgttttctatcacttccctttccctttctgtcatcttgtgttttactgccaaccgactgactgaagagag

SEQ ID NO: 8697 - DNA, 1883 bp, Heterodera glycines
tctagagtcggggtcaattcttaaataaattaattcattttagaattattttacctttatttaccttaaattaaattattattattatttcttattttaaaaattacattttattttctttgtcaaaatttgtccatgaattcccttttcttttggacttttttccatttttgtaattcaatttcctccttggccaaaaaatgttaaaaggagaaaagtgaggaaattgcatagcaacgctcgccgtgagctgtgctcggctgtttggggaaattattccttttttactgcgttttgaattgacttttctcggattatttttcttcaaattaaattttcataccaatttatttttagtaatttccgatttgtttatttatttatttgaatttgcttccgtacgtaaaatattttggccaatatttacgcattattttgtacatttccgatataaatatttgcacaatttgccattttcggtatctgcgggtccgtccgccgtcctcgtctttctccctgtgttatcaatgcgctgctaaacgggtgaaatgctaccgcctccgctgccgccactttaaaacaatcgccgctattaaaattgctaattacccctgtctttatcatcatactattattttattaatattgttgcaaattgactcatcgctgtaaaaataaattttgccgtaaatgctgaccaacaacagtcggaacaacgacggtagcaatagtgccgctgcttttccttctgctactgctggaggtacagtagcagtacttggcgatgccaatgcgatgaatactgtagaggcggcaacggtcgaagaggaggacagtatactgtaccagatggaacgcaaatacttttgttgtccttacgatgaagaaaaggagcaacagttgaagaagacgggcgaggaagaagacactccgtatataattgacattgtgggacaaatggggaattaaaatggggaattatccaatttaattatatttgcgcagttcggcagcagtcccttccaatttggcaattctccgttggtcgcggcgcatgagcgcgtgttggagttgctggtgctggacaatttgggcattctccgcgttggcccgttggaccgttttgtcggattggccaaaaatgtcactgagctgatgctgagcgacaatcgccttggctgggccgaggtcggccaacttttcggggcgttgccactgctgcgggtgctcaatctgagcagaaacaacgcgctgaatatatcgccccggggcgcggaaatggccgaagcgcgaacactcggtcagaagaggggagggacaatagccctgatcagaatctgatcagttggtggtccgaaaccatgccaatgttttcctcaatggtcacatcgcagtatgaccaacagatagatactctcgatcattgagttattctgttgtcccttcggtcatttgatcaaaattgtccaaaaccatgacgaaagtgacatatactttgttcgatgatacggcgcctttgatcactgatcaattatgaaacactcctaaagtctactgagtccctcaatcactctgatcaaacctgctgatcagatactgcttgtccatgatgggccatggccatcatcgccgcctatttcttttttcttctcagatgtgctcattctgaatgatctttcgctgtctttcgtcactctccgccaccttttgcctttcgcgcccaacctcagagagttgcacttggccaaaaatcatttcggcgacatttcctccctccccgcgtcgtcgaccgccccaatttcgcactctctgcgcgaattgcatttgaatgagtgcgcactttccaattggtgccacgtgctcactgttttgtgccattttcc

SEQ ID NO: 8698 - DNA, 1781 bp, Heterodera glycines
attaattaccattattttattcgtttattgccttttctttattttttttggcattgttgccacccgtactttttgtcctctattaatttttatttatttttatgcttatttttgtcctttttattcagctgaatgcactatctctgaacaacacaatgctgtccaattgggaggccattgagaatttggcggcaattcggcatttggacgaactgagggtggcaaatgtgccgttgttggccacttattccgaggaggagagacggcacctggtgaagaaaagggaattcagtaaaactgaaaacaaataaatgccaattaatgcattttcagattattgggcgacttcgttcccttaaactgctgaacggctcgaaaattggcaagtcattaaattcactcatttaccagtatttgatttggaaagcttaaattgcattttttttttctcttcagacgaacgtcagagagaagaatcggagcggtaaaaattaataataatattaatattaattagctctttttactaattatttaaaccgacaaaaatactttctttttcaaaaatttgatccttttgcagctttttcattcgctattacgctgagggagaaaagcgaccgctgatttacgagcagctcattgcggaacatggcattttggagcagttggtcaaggtggacctgacgccgaaaagccatgcccgggtgagttgaggcggcgattgtccatcagcggattgatcagtgttgggaagactgatcagaatactcatcagacaaggcattgcaggtgctgatccgctgcgaagagtccgaatgggtccgttgttgggttcgtctgcgcctttccggcactgtccacggactgatgcaattcgcggagcatctgacgcacattccgctcaagtgatcgatcatctgatcagtctgcagcaaatttcccgatcactttggcagaatgatgcgcctcttctatatagaaaggggaggaatcgatcctacggagttgcgagtgccgggcaaacagttgcgactgttgcacattgaggacggcgacgaatttgtcgtgcagtcaaaaatgattctctgtgagcgaccacggcattagacgttgttggcattttgtgcaaaaaagcgagacggatggaaaatttgaaaatattcgatgaggcggtgaaaaattacgccggaggaattggcaataattcattaattacccaccaacaaatactcaaaaattcaacaaaccttctttcttggcttaccgcttttaaatggctttaataaagttttgtgaatttgtcggttgaaatgaaaattttgttttgtaattaaaaaatagtaatttaaaatcatccgacagataattaacccaataggaaatatttgaccaaattggtctttctttctctttacacttacattcgttgtatgtattataatcacacatttacaaatccacataatatgtacatattatatatgtattttacattttcatttgaaattattttaataataaattcgtgacaacaaaatccgatgacaggaactaataaaactgctaaatgaaggacaattaaaattgtttatttgaatgtgagtggtttggtttaaaatctatcgtttgagctgctcttatttttaattaaaggattgttgtggggtacacttcagttaggcgctcacggttgggcgccagcacgttttttcactataacttttttctttgacatccaaatccaacaatcttggtatcattgaaaagcgtaacatgtt

SEQ ID NO: 8699 - DNA, 1036 bp, Heterodera glycines
cgtaagtgttctcctggatgccattctcgacgaggtaactgcgcagaaccatctctatccattcgtagttgggtcggtcgtaaaaatccaggcggtcctgaaaagagggggaaattgaagtgggcataatcggataagcgtgtgtgaataacccacaatgtgttccaagattgggcccagctgtgccgggcatccctgcaacaggtcggacagggcctttcgtcgcacttccgatttgtggcttagacggcgtcttttcattttacctgtctgaaaatgtatgaaatatactcaaaaatgtccaagtgccctcctcccactcacccggtgctcgctcctcacacggctccatggcagtgaaccggtgtacatgtcgaccagcatgtagaaccaggactcgatgtcgtctcctcggcagtagtcgcttctcgcatgcgctgagatcgatgcgtacatcggcgtcccacgaaagtgcgtctttttcctctgccgtctatgtttaccctgtgaaaaaacaaaaaatcataagttcttaaaaaaatgattggggggggggggggagcgatctcacggttttgctgctgatgaatcggcgcgcaagtccaaagtcgattaagaagatccgttggcgctcattggtttcccgtcgtccaattgcggcgttctccggtttgatgtccaagtgaaggtagccgatgctgtgcagcgtcttcagtgcgtggagtagctgaatcgacacgccaatcgctgtcccagggctgaacattccgcccgccttcttcaggagactgtaaagcccacgtccggtcaatgacatcctgaaaaagttgtggcaaaacttaattttgatggcataaggtttcaaacggcactcacacaatgtagttaaacgacactttttttccgcgttttgcatcccgttgaacgtctcggccatcgtcaaagcagcgacaaaagggctccgcgcctgctccctctcgaagaaggcccaagtgaggggtaattttagcctgtaaaaagtggatatatttaataa

SEQ ID NO: 8700 - DNA, 747 bp, Heterodera glycines
ttcggatccgggattcggaattgttcgaaaaggatgccggattcgtgatcagcaaccccgaaaactcttggaaacatgttttcatgactatgaaacaaaaaaaaaatttcgaaaaaaggggggagggacaaagcacagtatttattaccaatatttctccccaaaaatgtgttcgggttccctcgcgtgtcccctctcctggttcacaatcagtagaatgatcttattttttctgaaacaaaaaatattttaattaattttttttcgcttccaggaagaataatcgagtcgactggaaaaaagaggtgagacgaagctaaatggttcaaattaaaaaaaacaaaattgctttttagcgaattacgaaccaggaaacatttggccaaatggtgagtttttaaatttgtatccgaatcaaacaagtcggctcttggttaaaaaaacaggacttcgaactcgaaccaggagagtcgaaattcaaattccgccaataaaaaattttcggggaaattctttactccccccccccttccctctgtttcccgaaaaggaaataaaaagtccaaatctcaagagaaaagaaaaacacatagaaaaaccgatagcggcccgacaaatgcggtcggacatttgcggccaacgaaacgccaaattgtcattcctttttcaaattaattataccaaatatttttatttaacacattcaccaattattttgttcaatgacttataataattttcaactaa

SEQ ID NO: 8701 - DNA, 2652 bp, Heterodera glycines
  unsure (1)..(2652): unsure at all n locations
tatannagtcattgaacaaaataattgggtgaaatgtgttctatctaaatattntggttaattaatttgaaaaaggaatgacaatttggcgtttcgttggccgcaaatgtccgattttcccttgggccgcaaatgtccgaaaatggcccttaagaaacgggccgcaaatgtccggaccgcaaaagtccgaccgcatttgtcgggccgcaaatgtcctataaccgttgatttttgttttgtttttcttcctgatgaaacacatacctaaaaatttatttcaacaaaaaaccaaaggctgtccgcacaatgatgcatcatcacaatcaccatcactatcaacggggtggtggtggacgaggtggcggtggtgctggtggtccatgggcattccccgcgtcatatcgcggcggtggcgttggctacaacaattatcaccttcacaaccaacagcaacattattactaccaacaaccgcaacaccgaaaccactaccacagcaacaaccgtttcggcacgcaacgccattaccaagcggcggcggcgacgacgggcgcgccaccggcacaacaccaacaacaaatgcagcaatagtgtagtggcaaaaaaagtgccaaacaaaagatgaaggggcgcgtggagaggatggggactgaatttgttgaaaaatgagcaaactgaacggcaacgaatgggcagatagatgacagattttggcattttatttgttttatatggaatttgtgatgagtgacaagcaactgaaaaggggagggggtcaaaaaagcgaaatttttcttgcatacaaattttccaaaaatccacaaaatttggtataactctttaaaaatgataaaaatttcgaacttttctggcggcgcctatcgccactgctgccactatatcatttttttaaattatacaatttttttattattttagagatttattggaacttttttagtaaattcagaaaatgttcgttctctcacatattccatatatgctttgcttttttgcaaatttaggagatgcgtttaattttaaaattcttaagacatttaagcggtaaaatacactcaaaaaatttttttttctctagaattatgtcctattttttttaatgagtgtgtggcattatttactcaaaatattcaactaccattattgacttcatttttttcattcgaattttgtatgtgaaccctttctaatagttcattattattattcattatctaacctaacacccaaattgtcccaaccattttggcctcattttgtttcttaaatggaaggcatttgccaaattatactgattgaaatttcctacgattattttttttaattgattgattgattgtatcgctttcgaaaaattatcttaattgatcacaacaacaacttttgttaaattgatttaaatatggagatggatgaaaacataaagtttggttttgtttgtacttacaatggcacaataatttttatttggctatatggcaacaaaattgtttttagtgggttaaaaattggttaaatttcgagaaaaaaaactgaaccttctcagtttttttcaaaattttctatggtaattttaggcgcagaaaacgaatctgacatttattttattaatccatttttgagttacgactaaattttattcattagcgattaacgggagaaaggattcaaaattgtgtggcattttattaaaaatgataaaccatgccatctatcacaccagtatttattgggtcgactcaagtgttcatagaccagtgatagattataaagtccatttcaagctgcagttacagattacacggcaatctttttaaatttatttataatttgcctcctgtttaattaataattttgaatttttcacgtaaattataatagagaggggtaggcacaataaaggtgccaatttataaatgtaaaatactttgaaaaaaatcaaaataaattcatcatttgtcgagcggatccgatcccatggcaaatggtcattaaaatggaagtgaaaattacaataacattaaactaatgtatctttgcttgtgtttttgtttgatctattttttcgggtgttttagtgaaggcgcgctgtcatttcgtcccgcgtcgtttcgtcccccaagccaaaatgagtcatttcgtccccaaatttctttttatttataaaatatttagtttttaaagtgttaccactaaaaatttttctgggtttagttaaacaaatcataaatttacgaatttagacgtatgatgaatcgtaaaaaaattgaaaatcttcaaaaatgtcgtaagcgcaagtttttggataacaatgacagtgaaaacgaaacgctatctgctgatcaccgtgaacaaaatgagaacaacaacgaccgcgacgatgattttgaagaacacgccatcgtaaacttcgaacttggagaaacgaaaagaggaggtgtctgcatttggtttaatggtgagaaaaattttttcaagaaatattttcgtttttaagggttccgatttacgcacaaacaaaatgagttgtggagatgcagtgtgcgtgactgccctgcacgcgtaaaaattgtcagcaaaagtgacaacggaatgtccggttaccaaatgcaacaagatcacagtcacttg

SEQ ID NO: 8702 - DNA, 3301 bp, Heterodera glycines
  unsure (1)..(3301): unsure at all n locations
ttcatctaatttctctgtgtttgtaagtcatgtactcttttcatgtcttcattttctttgtncatgtatttctttctctctgtntatgcttgcncaatacacactctttctttcatctaatttctctatagtgtctgtgttactctttttatgccttccaatttctctacactattttcctcaactttgtttctctatatcttcaattcttcacttcactgacaattaatagtatcgattgaccctggagacgaggttggcaagcattgctctatatttcgccacttgctcataattatttttcatttacaaattacttttttctaatttaccccccccccatttaatgattctaactgcagtcctaacatgtttattctagcatttatttaaaaatcgaattatcgaaataaatgattaatatgtagattaaaagaccaaaatctctttttaattttaagatttatcggaatgtggaattattgagattttttggctaaaaaatgctagggaacacgggcagacattgaaaatgtttttttaaatttaaaataaaaatctttaaaaatattttcattttgtgatttttaaaaatagctatttaacaaaggaattttatgcatcaaaaaatttcaaaaaacaaaataatacaattcaaacaaataagattaacatttttaaattggtgtagaaatcttgtacatacctaattgtttaggaattaattaattttaaattttatatgaaattgttttacttagattagaaattaaacttgcattaaatatttaaatacaattttaaatatatacagccacagcttaaatcaactatatgtattgtggcttcagttgaacaaatttaaaaatgattgcatctaatttaaaaatatccagaaacaaaattaagccaatcaaatgaaattgttttggaatttttcgttcccaattttgtcgtctacaaacattcaccataattattgatcaacagtaacaacacacacaaaaaaatacagtagtccatccattcataatggacgatgattacgacaattatgtgccccaaatttcgaccatggactacagtctgttgcagccgggcggaagcggcggcggcggtgccacgggcggtggtggcactgccggcatgggtggtagcggtggacagccgcaacagcaacattttttgtacgatgccgggggcgggggttgcggcacagtgatgccacccggcgcggtgacagcatcgggcggcagagcgggcctccctcccggcagcggcggcgggcacccacaatttggggggcacttcggtgccgccgagtttggcggtgctatgccaggacaggttaatatgcctaattgtaaagctaaggatggcttatattagtcaattaaacgataatatcggtgcggaggcgggggaataaatgacatgacaaattatatgtgtgaatggtggacaaactttgtatattggcaactcatgcaaaatatttttttgcccgaggggccattcgaaaatttaattgcttttagtgtccgatggttgcctaataagcacctcgtttaatttgaaaatttaaatatattttgttttgaaacaaatattcaaaaaggctctattcagtttatgcgtccgatcaatgaccatcctcactttcttaggctataacatttttttttctttcttatttgggcaactaaatcatggactaataacaatagacaaaaatcttcatggctatactcggaaaaagctaaattcatatgttccatattttttaatttttctataataattattattatttcttgcatggacgcctaaactgaaattagtgccaaaaaagtacaatttttatttaaaataaatgttttcaatgcctaccaatgccatccataacatactcttgaaaatagaaaattcgatcatttccacccgtaggcttacccgcctggctattgtgtgccgccctcaatggcaccaccgccccatatgcaacaaatgatggcacaccgccagcagcagcaacagcagttaatgggtggcggtcagccgcagtttgacccgcgctacggtggtgggagtgcagcggttgtgccaaaaatgtccgccgctgcggcacaaatgatgtcacagcatcaacaatcaacggcggcttctggcacaaaagcggggaaaagcggtggcagcaaaaagggtggcaaaaaagcgtctgccgccgccgctgcagcggcggcagccgcagcggcagaagcagcaggcggtggtgccgtaacagtgatggaccatggaggtaatcaagcgccatgcgccgcggtaggaaagggaaaagccgtgatttgccggcttccaagcgcgtcgttttgtctcatgcgtcatttcgtccaccaagccaaatcaagttaattagtccggcaaatttcccaattttttccgctttaaaaagaaaatcaatgtatttaatcaaaaaaaaatttttgggaaagacaaaaattgaaataacaaacattgagatcaataaattctaagtgatatgcaaaatgattgaatattttcattattccttttaataaatacttttaaattaggcagtaaattttcatttaaatttatttcgatgtaatttcgggggttaatcattgaaaaattatgttaattttttaaaataaaaaaaaatggggcaaattaactcattttggcttgagcgacgaaacaatacagggtacagagacataatgatgctaggacgaaatgatagggcaccgagtggtcaaataaatttgaaacaagcctagaggagagggcaccatcaaattacaaggcttttgtgccatttgcgtatatgccaaaatcggggttaaaatttaattcgaaatccgaatccataaatttgtcataaacaaatagtttttttttttctaaagaaaacaaagaaagtgtcgcgatgagaattcaaaaatttattcattatcaagggcaaagagatcacatggaaatgccattgacagatgtgaaaaagggttgaagtgataaatacgtaaattaaatatattaaaaaaacactgaaatatgtaagaaatacatattacataaataaaattgatagccctgatagcaaatcccaccgtgggatctcacaaagtgtaaatgcggggcgggattttgcagggatgtggaattggcaaggattaatcccgtgcgatcctgtcccgcaacaaattttaattccaatcccgcagcgggattcgcaaatttgaaattgcctatcccttttccgaatccctttcgctgtctt

SEQ ID NO: 8703 - DNA, 984 bp, Heterodera glycines
  unsure (1)..(984): unsure at all n locations
ttctaaatagcaaagccaataatcttttccagcaattattttaagtgcaattttataatgtgtgttttgaagtttcttaaattttcaaatattaattttttttttaatataaccaagtatgttggcaaaaaaaaattaaattaatatccaaggtttaatattgaaaaaataaattttcataccaaaaaaatatgttttgtaaataaattgaaataaaaattaataaatttaaaaaataaataaataccttttaatccataattataatgtatctatgtaaacaaagtaaagtcagggcaaagaatgaaattaaaaataaataaataaagaaagacttttaataaataataattatcctaataatcaaatgaattcattaaaaaccaattaattattaatattttgaataatttctatcaaaaataattatttattcataaatattttaatttaattgcttattttttaatcaaagtatataaagaagaaatattcatgaacaattcaaaaaaaataaatttgcaatgaagttattttaaacctaatcaaataatattttattattgctgtaaaaagatcaatgattattttcatataatcgtaacaatacattgtacttaattaaataaatgattatttattacaattactaagtactagagaccggaccgggccgggcccggtaccggtttttaccgggcccggaaaccggaaccggtgatttttggaaaaatccggtttgaccggttttccggtttgaccggtttttgagagaccgggcccggaaaccggtcgttttttaaaatgcaacccggcccggaaaccggccttttggaccggttttgaccggttttataatcaagccaaaaatgtttctttttgttcatttttctttgaaaatgtctttttggcataatgtttttaatttttttttgtcaaatgtcnnagtgaattttttattcctaaatgttgcttctttataat

SEQ ID NO: 8704 - DNA, 3327 bp, Heterodera glycines
gagagatagaagttgaagaaaaaggatgaaagagatggggagagagaaagaaagagttagagagggaaacgggagagaattggaaagagagatagagagaagagtgatagagagaaaaaagtggagggtgagagagggggaatgagagataatgatagagagagagtgagggagaaagagagatggatcgagagagagagggaaagagatggagaaaagaattatagagagaaagagaaggagggagagagaggtgggatgagagagagagagagagaagagtgattcagagagaaagagggagggagagagagagaagagtgattcagaaagaaaaagagatggagagagagagagagatagagagagagagagagagagagagataaagagagatggagagagagagacaggggaaaaggagaagagagagagagagagaagttggagagaaaggaagaaagagatggagagagtgagagagagaaaaagagagaaaaagagagagagagtgaaaggcgagagagttgagaaagagacaagagtgacggagagagaaagagaaggagggagagagagagagaaagagagggagagagagtgagggggaatgagagagagagaaaaagaaaagtcatagagggagagaaagagggagggtgagagagagagacaaagagagatggggagagagagagataaagagagatggagagagagagagggaaaggagaaaaaagagagagagagagagaagttggagagaaaggaagaaagagatggagagagtgagagagagagagagggaaatgggagagaattgagaaagagagagcgagagatagaagagtgatagagagagaaacgtggagggttgagagaggggcaatgacaggtaatgatagagagagtgagggagaaagggagacagagggagggaaaggagaagagagagagagagaagttggagagaaaggattgaagagatggggagagagaaacagagagtgagagagggaaacgggagagagttgagaaagagacagaagagtgatagcgagagaaaattggaggcttgagagagggcgcatcacagatcatcatcgagagagagtgagggagaactatatacagagagatgcatatacagcaatatggatagcatatcggaaagctttattcaagctatattaacaagcagaatgtcaaaacaaatttatggtcaaaaagttggaaaatttggttttttgaactcttctgatcataacttttttaagccttaataaaatttttcagaattttgcaggctaatagaggacacttagagctttcgaatgatacaaacaaagttgaatttagttgacaaagaaaaaagttatagccaaaaatatgctggggccgaatcgtgccggggcgaactgaggtagaccgtgttttacggctattctctacgtgtcttatttgtttttattaaatcatattcgttatctttttcggtacaataataaaattgaaaaatattaatatttgtcctttagaaatggaacataaaattcgatgtataaattttttatttcttaatgataatcatttctttgtcgctgcctctaccgtcattatattatttttttgttaattatatttactaatttattatttacagccattttctttaattaatgaaatgtagagaccggaccgggccgggcccggtaccggtttttaccgggcccggaaaccggaaccggtgatttttggaaaaatccggtttgaccggttttccggtttgaccggtttttgagagaccgggcccggaaaccggtcgttttttaaaatgcaacccggcccggaaaccggccttttggaccggttttgaccggttttataatcaagccaaaaatgtttctttttgttcatttttctttgaaaatgtctttttggcataatgtttttaatttttttttgtcaatgttcaagttgaattttttaattctaatgtttgcttctttataattattaaataatgtcttttttgtttagattttatgcaaatgagtcttatttggcaaattggcctatttaaaaaaacgtccaagactacagcaatttgtctcgagtgccaatcaaatgaaaagccgaaatatgaattcaagctcaccaaaggaacggtcaaaagcttgcacacccatcttcactgctttcacgaaaactccgaattctctgaaaagctgaatgctcttgaatcgaaagctgaaaaggagaaacaaaaacagaagccaatctcagactttcagtcgtcctgcggaccgactttttcggactgtaattcagccaaatttttttaaattatttaatttttgtttcagcacaactctcctcgtttgataagaaaattcttcattttttggtgacaaaaaacatttccttcggcgctgtggatcaccaaacttttcattctttatttccccatcaaaaagtgaaaagtgaaagtttctataggtgatgagttacattaaaagttatgagaaaattacatttttgaaattttcagaaaaactgccttgccaattgtttaccaacgtgtcagacataaaatcaaagatgaattaaaagaatcagcatttattacactgacaactgattgttggagcggaagcacttgcaaccttctgtggtacattattactttgtttattaatcatcatgggttttactgcagcctaaccgcgcactcaatttctaaatggaagtctatgtcacgtgttttggcaattacggaattttctgaatcacacacagggaaaaatatcgcgctcaaaattgaggatttattgctcaaatggggtattcctaaggaacgtgtgcatgcaattatctcggattcagcagccaatatgaaaagagtgataatctaattaattttctttacacttgctcttatttgcaggcatttgttgagagggatgaaaatgaaaatcgaattttgccgatgccaaacggaccttgcgctgctcatttattgaatttggctgtacaggaggcgttgaagagagatgaatcaatcagcagtttattggccaaaactcgtcatattgttggccgtttcaagcacagtaacactgccttcagcgaattgaaaaaaattcaaaaattactcgatgccccttctcatactcttttgcaggttaaagttaattagaattcacttaattttatttatttctaatgtcattcagatggtatgtgtccggtggaacagtgcgcttacaatgtgtgagaggctgatagaacaaagggcggcaatcacacaatatgcagtcgacaaca

SEQ ID NO: 8705 - DNA, 766 bp, Heterodera glycines
tgaggtttaaaataaggcggagtataatttaaatgctctactgagaagagtccaggtgtatataagccggccaaatctttgtttcttgtaaattttaccaaatcattctcctcactttctcaccacctcttgccatggctattaatatgagtgacaaaaaatcgttaatcaaccaaattctgggtgaggctgatttgaccattagcacgagcggcataacagtgagcggaccccgtctgtcaaccccccgctttattccttttgatgagagtggccgatgccgctcatgtaaagctacagaggttgaggtagacacaatgacaacaaaggagggtatcaccttgtggtgcacccgagtggacaaaacgcaattcatccctttcgatgtcgtctatgatcttcctgggcattgcttcttccgtgtaaaaaataaagcgagagtgttcaatgtcccatacagtgatctatcctctgacacaatcagcaccactaccaccaccacaaaaacaacaacatcaacccaaggcacgcagactgaggagcaggagttgaagcgtaaggccaaggttgcgcttgacttggtggaagcaggactattggctgacgctatgcaggacggcgcgcggtggaagaaagcaaagactgcaattaatgtgcttggcaatcttttgttggctgagtcgttgagcaacaacaacaacaacaacaaagccgacaaaaaggatgaaccccctgtgaacggaccatcaacgcaaccaattgtcaa

SEQ ID NO: 8706 - DNA, 4487 bp, Heterodera glycines
tcacatcatcatcaatttgcggtggtttttgtcactcaaaatttatttgagcgaaaaatcaaagttgctcgtctgtccgcccaatacctcgtactgatgcgtgcccctaactccctgttgtctatacgcaatatcggagtacagcttttcccgcgtcagcttgactttttccttgacgcttatcgcaaagcgacagcgcgtccctatggctatttgctgattgacatgcacgcttcgtctgatcccgcgttgcggcttaggacaaatatatttaaggatgaacaagacgaggatgagggaacagtggtgttcattcccaaaaatggggcaagttaaaaaacctcaacaacatgtaaagattggtcaactaataaaagacaactccaattggctgtgtgccctggcgaggacgaaatcccagaaaaaatgtaagaagttgatactcaaagcaaacaccgaacaactacttgcactggtggaaatttgtttgaatcttgtagcttcacggttccaattgactacccgtcagacaaaaagattaatgccatatgtgcacactgttcgcaggatgagtagggcgagaagtgagcggggcgccaggcgtgctattgtacagaaaggagccggatttggtggactattcgctgcccttttgacgcctgttttgatcgaattagcaaaatctgttgtatccaaaaacgcataaataccgcgcagtattgtatgtttcatatgcattcatccaataaatggcaaacaaatttgttcttatcccgcaagaaatttaccgaggtctcacctcaatgtcggagacgggtgacattaatttggatgctatacagcacgacttggtccgttccaggggtgaacgaacacatccctccacaaaaaatgtgcactacaaccagcagcttaggcgctatttaaaaatgcggagggagcttacagataggccgtcaaaagttgagctgacgaaagggataagtgtgctgttaagaagaggtggagaagatgaagatggcgaagttgtggacactccaccccgacctcccgctccaccacctcctcctccaccgcgtggaccaagacctcccgctccccctcgtccgccaccgcctgggagacaccctccgcgcggaccaagtcctccagctccaggtccctccccgccaacaagtcctccaccgcgccccgaacgtcctcccagacctagtagagcttctcggagaggtggtcgtctggagaaatggtggaaaagtcgatacaatatacagcgacggcagccggtggtgcgggaccttctagcagaagcagctgctgccccattgcccgaaagtgacgatgaagatgactatatgttggagagtggattcgcgctgccagcgccgtcacagtactatggcgatttgcctgtgctaccagacaatgcgaacgaaattgaggagatggacactgctcagcacaggattgccaccagaagaaaattacaaaaggatgaggcaaatgatgatgatttacgaaccaaaagatttttggtttatcaccgttcacctccacggctcccatctccgcctcgatcgaaagaaaaaactgaaccaagaccacctgcaccgcgtcctaccgccaagagagaaaaacaacaggcaaagctggattggaagaaaaccgaacaccctactccagcgcctcgggcgaaaagagagccagaacttaagctggacccgcggccatccacgtctaggcaagccgggtacttccctccctaaacgccgaaaatcaaaccaaaatatgagcaccaaccaacaaaaaggcccgtaccataccgtatcccggaaagagaaccaaaaattgaacgaactccacagcagcagcaacctcctcctcctactgctgtcgtcgaagaaatgccctatgttcctccgcctaggagggggaccaaacgcccccaccccgtaaatgatgagaatggtgaggtgcacataagaaaacgggtgaggcaaccgagtagggtaagggtacagtattcgccagagccaggtccatcgacatcagcacaagcttatgaacaacaacgacaacaacgtgaactgtttgccattccgtcaaatcagctgaccaagacacagagaattgagcgattatacatcaaatgtaaccattatgcggatcgtatgggcgttcggggaaatacaattaataccgcaaacggcaaaccgtttgcgcatagcaatttgcgaatgaccatcaagtatataatagaccggagagcgggcagccccaccattaaaccaccaggagcgaacctattggaagagcttaggcaggacccaattttgtattcatggacggccccaccaaagagaccatcgcagacccgaacggaacgggcaatcaagaaggaatttcgcccgaaaaaatggagctgatcaacaccactcttgacaaaatgtacaatgatccatcatccccagcggcattcgcaggtgttacagcgctgtggaaagaggcgcgaaagaagattaaacatttacggaaaaaggacgtacagcattattttttaaaaaacgccccgcttccgtaaagatgaatttgtgcgaatgagcagagataagggacaatttgagaagggatatttaccaaattatggagacgaaattctcgagattgatgaggtgttgaaagcggtgcgtccaattcgatacaaattgcgggatgaacatggtgagaaattcaagggcagcttctatgagcaggagttggcaagcgtgagaaaggacgcagagacaagctaccgtatcgagaaggtgtacaggaagaggaaaaaaacggacgggaccacagagatgcttgtgaaatttattggctatcccaatcgggagtgggttcatgagtcccaacttgtataaaagcgttcacatttttcaatatttatgcagataaacaatcatgtcaaacagtttctttgtgtttttgcctagtaatgtgagtgattaccctgacaatcagccgaataaattccgtgttcggctcccaaaacctttagattttaacggctcgtgggtgtgcggactgcacagtatcagttacccctactcatggtcaacattggcacattggatgagcaatggattgacattcacttcaccgaccgcagagcgaccgatgaggacagacagcgagtgatcagagtgccggtgcctaaggcatcgcatagtagggttgaacaactgagagaatttttgtctgtcactttgaggaatcatagcggtgcaaaactacaacctctccctcgtgaggtggaagagaatcggaatcgtactacaacaaagcctctcggctcgccaccgcctttgaaaatacagaaaagagatacggtgtttgacgcgaatagaaaacagattggccctcctccattgcataatgaaaatgatgacgatgaagaaattattgaggagtcaccacctcatcatgaagaagatgatgaagggccgattgaagagtcaccacctcatcatgaagaagaagatgatgaagggccaattgaggagtctccgccgcattacgatgaagagcaaaatgatacagtaacagctcctgtcacaccaaaagtgccggtacaagcgcctgtcacaagccctgcgaaaccaacaatagtaaaaacgccagttactccatctgtaacaacaccagcgcctcccacaactgcaaagccaccagtaaccgtcccttctccaaccacaaaaccgataacaccgaccctactcctaccacgaccacacctactccaaccacaaagtcaacaaccagccctccacctactacaaccgttcctccagcaatcacaaagccatcaaccagccctccacctaccacaaccgtccctccaccaatcacaaagccatcaaccggccctccatcaacagaaaagccaataacaacggtgcctgcaccgccaaagacaacaacaacaacaagtacgccagcaataagtgcagttcctagcccatctgttaagccgacgattccggtaccgccgtcgtgttggtactacggtagggtcggaggcgctgagcactgggcaacgcgtgctggagcgagtcgggaatgagggggtgccatttaaagaggcgcttgtcagtgagggaaagcgaggaattgataccgttctcgacaaaggaggactaccaaaacagtttggaagcggaaaacggagtataaaaagaaagagaacacatctacctagtcatcagacactaattggacgacctattgtaaaacaggcaaaaaaagcgtattcgatcggacgcttttggactttattaattaaataaatggctttccataaaatcgacaacgactcggtgaactcaatcaccaatgcattggactttttccgtataccctctacaaatgtgagcgtctcatcatcaaaagtgtttgagcttctgcctagcaatccgcttaccgacacaccttaccatttcaaa

SEQ ID NO: 8707 - DNA, 3838 bp, Heterodera glycines
  unsure (1)..(3838): unsure at all n locations
tcaaaaagttaatcaaaaatttatgattcatttgattcacttatatttgaccgggctcatttaactcagtttgttctcataaagtgcattagagccaatagcaggccaaagattctaaattctgagctcagctttgaaatcagtatttttgccccaaaaccaaaaagaatttttttttcccggtttatcaatttcaaatatttccaattaatatatgattggtttcgtttggaggcattatttacaatggcaatgaatgagactgggttagaacatcattttaacaagctttccattggatttccctttatttcaatattataagctttggtcagtcagacagctttctaaaaatcaaggacttgaattcgtatttcgtccggtactccttccttctgtgtcctcacttggcgtaaaatgagacaattttcattggttaatcgtcactgctcgtccgtatctgttgcttgttcactttgactttcggcatcttgggcgtttttccgcacgatgaacaagtgccaatgcttcggatggccaagcggtggccaaatgcctgttcacgtcctcatctagtcaattgccgaagatgctctttgcaccaattgagaattcttctgctgtccaatggttggcaaccgatgaacaaatcaaatcggtgattaacaagtaaaaggtgactcaaaaattttttgatctatttaaaagcatatttgctttaaaaaattattcaatgattttcatcaaaaattttacctttttttgcggcacgttttttcaaaattttttaaaacatggcgggggaggtccggcggtgccgataggcgccgccgggaaatttttgaaaatttcagtcaatttattaacaaaatttgtaaaaaatttttaattttttgaaaaaaaaattcaaaaaaatttccgaaaatttccgactttttatcaaaaatttcggaagtcggaattccgactccaaaaatgtcggaaatcggaattccgtgccatccctgttgtggatctcttggtagccaccaaacaatttttatttgttcgtctcatcgagactaattttgtattgcatatttcagttggagaagggcagatccaaatgagccgatagttggcacggtgaacaaccgaaaaacgagtggatgttgttgatgaaacttttgccatggagttttgggtcacttgatcactaatccggcaccatttcgaccaattttccgcactttctactctaacccaatgaaatttggatttattttttcttccaattcttgtccgggattcggaattggtcgaaacggatgccggtgatttaggatcactgtgatcactaatatggcaccgtgaatctgcagaattgtgacggaaaaacggcattgatggccgcgtgttggaaagaagcttttacagtactcaaaaatgcaacgttttgtctctaaaatttcaggacagtctccgcttatgcaagctgccatgagcgacaatttggaggcgtgctgtctgctggtggaggagtgggtagcagaagtcaaccaaccaaacatcgaaggcgaattcacggcactgatttgtgctgccagccggggatatttggggcggaaatgccgaaatggtggacatatgttggaagaatttggaaaaacaaaatgatttgcccattttcggttttaataatttacttgaacggagagatcaagaagtgacaaaagcccgcgagactcccaaccatcgcattttgaaaattgcaaaagacagttccaaatattttctgaataatttatttacaataaattgggtaaatttgaattttcactgcacgaatttcaccccaaattaattttttggtgcctttttttgcgattttggtggcttatgccgggctttttgtgtctttttgacttttcatgccttttccgtcgctggaaaatatgaacaaaatttgtaaataattatgtaaatttataagaggaggaatatttaaaaatatttaaatcgcttccaatatttataattaagagaatgtttttgtctgggcagaccaaccgtcgcccagacaaatcgccgccccgacaaacaatcatcccgataatctatcccgataaagcgtgacccagacaaatccacccagacaaatccacaccgacctatcgtatccggacgaatcgtggggcagtaacataaaatatatcaaaaaaaaaccagtccataaaatattctaaaaattctttatactcaggtgaaacaatccattcatgcataaccaatacataattagataacatgcctttttttgcacattaattccgacatttctatgttgacttttattatgcttttaattgcattttttggctttttttgaaaaatccttagcaaaaatgcaacaaaaaagaaaaatacacccctaaaaaatgaaccgaaaaaaaatttaagaaaatacaccccctaagaagtgaaaaattttctcaaaaattgatcgccaaaatttaatttttgttttttgttgatatctctctcattttgtgttttgctccacataaactaatccatctccaaattggatatatgaatattttttgtctgtgtgtgaatgtttgctttgcttttccatccgctgtcttttgcttttgacatcatttccttggcccattcattcattgcttccttttcctgttcctgtcccgtccccagctttggcattggcatgctgtacttttcacctgccatccaaacaagctaatggcaaaaaaaatggataggataaaaagcctgcctcaattaatttgtttatatcatacgaaaatatatttttcaaatttttgacccaattttgcttttactcttaaatttatgtaaaaatttttaaaaaattcaaaattttcaggaataaaattattttttgtttggaatttagatttttccatctccaatttatacaagttcagttgctttaaagcaaatttgataaattgtatgccatttttgcaaatattttttatttggataaattttttgaaatgtattcaaatgaaaggtgaaatggttggaaacgtaactgaaaatgaagacattgtaaagaaatatttgaagattcccgaaacaaaagtaaagggaccgttcacaaaacatttctcaaaatggattgaaaggtgattagaataattatttaatttgaaaaataatcataatttattttaatataagtgactttttggccatttgggctgttcttggccaaattaaggaaattgagttgcataattacttaaaaataacagttcgttcaattaaaatataaaacacccatatcagggatgggagccgacgccgtcaaaaaatttcggaaatcggagttccgcggcacaaaaaatttcaaaattttcgacaatcgaaaatttgaattccgacgcacaaaaattcgaaaaatttctacaatcggaatcacattcctgatccattgagatattctatgtatcatggttaccgtggtaggacgtaaaaaatgtcggcattcctggtttcgggaggcccaagtggcatgaaccgaaaaagattgtggcattaggcattaatctggctcaatgtttttgagcaatgagtactcaatgtacgattttgcgtcatccgccctcggatcacaagccagttacggaggcaaaactgggccggaacagcgggtggcaaaagtgccaattgtgttcatccacggaaactcggacggcgcactggcggacggtgccgaggaatggcccaaggatggagtgccaacattgagcactttcaccgcatgnngtacacgacggccgagctgtacgccatcacatacggggac

SEQ ID NO: 8708 - DNA, 1465 bp, Heterodera glycines
aggtctgtaaaataaaaatagcccaaaaatccgcaatttttttctctatttaataaattttatttcatctttttatcatttttttgtaaaaagttataaaaataaaagtgattttggaattcgggaccaaaggggggtgcacatggtttttgagtggaaaaatttttctcacaaaaatcttccaaaaatatgtcattagggctatttgaggctgctgatcactaatctgacatcagatttcagttattagatcgttaagccctcagaatccctgtgtgattggggattctgcctcagaatccttgcgtatagagtgatgaatcccatccccttaaacactcttatgtggatggtgaccatccacttagttaatgatatgtggatgtgggcttggtagtgttcagcgaccgaatacggactggatccgtagtccgtatttttcgatccatgtgtgtttttatggacttacgggttttacgggttattgagcccgtaattccatcatacaccgtgtagttaggtgctcagcccgtaacccttacccttatccgtttattcgaaattgatctctaatagtgatgaagatgcttgaaaacgaaaattttccaaatttgtgaccatgattttgatcgaccacaatactttaacaatgatcaatgcttaacctcaagactcgaccgaaaacgaagactcgagacacggattaaggttttaagacgcgagggcacgaatttctccaaaaaattttggtcaaattctctggcgattatgttcaactccccccggcagattatggcatttttggaaatttttcggacccggctttcgcaattacaatcgcccgaattatgttaaatccataataaacctatcttcattagatctgtgaactgttcaattctgctccgacttcggcgctttgttgaagcagtgttgatctacacggatgccgaacaaatacacatagtcgcgcactcaatgggcgtcacattggcacgaaaagtgatccaaggtggatcggcacatattggaggtgatggtggtgacgagaaaagtgccagccctaacaagtgccatcttggcaatccaattcggcaccgtgtgcacacattggtcggcattgctggtgccaactacggcctctgtctgtgcacggcaaatttggctgtgctcagttcacccgcttgtaacaaggagaccggcttttggacacattctgacggatgtgccgccgccatgacttataaacatcatcaaatggaaagaagaagacttgaagagaagaggcattgtgatgatgggaaaagcgtgggaacagaatgccaaagcaaggaggaggaggaggagcaatattccaccgtgttgcgggagctgaacgcgccggacaaggccaaagatgccatttttgtggtgagtcatgagcgaaaatgcgttcggcaccgtctgtgccaccatgcattttttt

SEQ ID NO: 8709 - DNA, 1258 bp, Heterodera glycines
  unsure (1)..(1258): unsure at all n locations
aaattatatggattaccatatttttctgcgcatatgctatgagaaaggggctaaaaatagcattctgcgttaaaattttgattttgtgaaggtttttagtccatataaatccatatttgggggttttcgggaataaatccatatttcgccatttttgggtttntagtccatattttggccattttttggaaattttcacaagaaaaatgaaaaaaaaacgaaaaatacacccctaaagatcaactttttggaaatttttaaaaattacaccccacaaaacacgaaaaatttgagttttcgtcgtcattttggcatttcaataaatattttcgtcatttttttgcgaacatttctttttttttaatgagaattttttcgaaatttggcaaacttggaggtgtttttgatacaacgaacaacaataaaaaatatgcatttttaagttttaaaccccattttttggttgtttattgtactttttaggtttatttaagcaaatattaaatatgcacacctttttttgggatttttgggggtttacaacatatattttggcattttttatccatattttggtccatatttggccatttttggcctttttagtccatatttcgggcttttttagtccatatttaatgtccatatttcgcgttttttagtccatataatttacaaccctaataattaggcattttaatgtaattttaaatgttggcacataggcttagaatcgttttattgtatttatattattttaaatgttaataatatcatatttattttttgttaaatttatttaactgaataaaatattgtgtaaagcataaatcgtcgtcattattgattcttctattaaactgtttgattaaaaaaatttttatcctattaaatagttagaaaattttataaccctacaaaaatatgtaaatgtatgttttaagaaaagatcctcgttttttctgtttttgtcactcgccctacgaatttcaattcataaaaatttatgagtttcgctcattattagccttagaatttatgattttcaatgctttctttttgccggcgccgcacgctaattaaaaaacaacaaaaaactagaaacctataaaaaaataatttaaaaatgataattttgagtttcgttcgttggctcttagatttcgatttttcaaaatttttatttgttgaagtctcgccctaaattttttttaaaaaacacactaaaaaacgataagatttttagtttaaaaaaaag

SEQ ID NO: 8710 - DNA, 4884 bp, Heterodera glycines
cttttgttccacaatggcatttttgaacggacgcgctttggcattctgaaattttttcattaaattaaaaagtgtccaataaacgaacaaataacaaatttaaaaagcttttattttttattcaaaaattatggtttacgaaggactcgaaattggccttttttttactattcttgaatgtctaaaataaggcgttgaaggaggtccaaatagtttgaaaaattttcaaataaataatggcaaaattttatgaaaagtggaaatctaaattgtgcaagatgtgccaacaaatcgtaaaatttctaaaggggggggggtcaagaggcaaaagggggcaatattttaatttttaaaaaacaatattttttggccttaaatttcttttgtgagctgggtagcccaatgtagaaccaatgactcgtcttttttgaattcggtctctctgcagtctcgagaccgaaatcttttttacaccaccaaaagattggctttttggcaaaattaagaaataaattttgtttatttgaaaatcggaattttcgaatttggttatattcaaggctttatgcctttttttgcttggttcaattcccttccaagtagttgattttagctctttatgttttgtatatttttgaaaggattagtagtttccttaaaattttcaagaaaataaatagacaaattttgatgaaaatctgtttgttaacaagtcggccaaaaatttctgtctctctttttctcacttcaattttttcctcttacaagaatgtcctccacccgttaatttgattaatttacaataaatcacttttttcgtaaaatttttaaaattcttttttttacaaaattttcacaacaccatacacattaaacaacacagcacttttcatttttgcacagcacgcattcgaaataattgattctcacgtggaatcagatcagcagtccatttccgtggttcaggaaattattctttcaaattttaaattttttttttgaaaatttctaattttcatcacttcgggcaatggagcagggtcaccgcaatatggcaacggaagaccgtcaggcccaggtggacagggcgcctgaaaaagaaaaaattttcattttttttttgtggatttaagtaaaatgggcatacatcgaggcctggcaagccctggaaaatgcaaaaattatttacaaaattaaaaattgattaataaataaaaaagtaattgaaaataattgggttcaaataaaatataactttttatatttgattaaaaataattaaaaatatttaattaaagaatttatgaaaggaatcgcaaacttttctattaaaatttattatttattttaaataaaaaaaaagtaacaaatttatttttaatttcctttttaaaatatctgtaaaaaattagtctttactgatataattttccttatttttatattattattaatattattttttaaattcttcaatatttatacaaattaaaaaaaatattttcaatttttattttatcttttaaatgcattttgatcatttacctggtcaccctttggccctctgtcccctttggtgccgggtgggccaagtgggcctgtgtcaccctttgggccgggcagaccctaaaaattaaaaaaaaaatttttgaaaattttttcgtacaatataaagaagtaaaaaatggaaattttggaaaacacacgtgcaaagagaaaatttaaggaaaaatatatatttacacttctcccatcgacgccaggcggccctcggagacccattgggcctgggaggcctagaaaatatgtaaaaaattatttttacatattttttcagctacctggcaacccaagagttccttgtggtccaagaggtcctgtagaatttttttattcttggtttttagttataatgccaacctggtggcccaggtgggcctggcaacccgggaaggccaggcggaccctaaataaaatgccaaaaattaaaaaaaaattgcattttatgagtaatatataattaattaccctcgggccaggaatcaccatctttggttgaccatttcctgtgaagacggtcggagtggcaggaggcgccttggatttttttttagagatttaaacattataatggttgatttttataaaaaatttaggtttttgacgcccatgaaaaattctgttatttttaaaattatttttgtcaagacattccttggcattttgttcatttgaaaaggatttttaggcaattcattggatttcaagaaattggcagcaaaaaatctctgagaaaaccctaaatatggttccaaatcgagataggaggccaaacccgatggaatggatttttggaaattttcttctttttttttacgggttgtccaggcagcccgggtaggccgatgtcaccgcgttcgcccttttcaccgccatggccgggcaggccttggagcccgggcagaccgcgtggaccaggcggaccgggcacagtgtgaatgccgaacggatgctgggaaatatgttttataattagagacgggaaatttcaaatttatttatttaaataatttctttatagttatggctgggaattatattgattataattctcaaatctttttaaatatttacgaccaaatgccgaaattttgaccattgttctaaaaattatagggacttcaatcccgcgagatcccgtgggattggccaaatggtcgggagggatcccgattcgggatcccgaccgaatcccgcccaatcaatcccgattttggaaaaaatggcccttaaagcttgataccgtaaagcaattaggcaattacggaagtggccccttagaccaagcaagatcaatatagtaaatcttcctcggctattacggtagtggccctaaaattgtttaatacagtacctgagcctggctgcttaggttgcgcaacagttgttccttcagcatgggcaacagttgttgcaccaatgcatgttgttgtcgctgataattgatgtcgtcgccgtactgtgcctgccgctctttgctatacggtaattcttgctcttgtattgctgctcccgccagcagttgtttctggtttttgtggtgttgtttatggtggtggtggtgttgctacaatagatatacgccacaatttttgtgcatgacaaaccacaaaacagtgtgtaaaagtgtgagaaagacagtcagacagacagaatacggaatgccaaaaaataatttaattactgtacctttcgccctttcttgcccggttgacctggcagaccgggcgggcccaaatcgccctggaaaagggtaagtgtcgagaattattttttataaaatttaggacatttttcattaaagcttttcagtccgtaattatcgcaatcaattaattaatagattcaaaaatgtatgtaatcgataattaattatacaaaaaaagaaaaaaagaaaagcttctatttacctatttgttttagaaaaatttattattattttttttttcgcttttttacaaaaataatttaattaaacaatcaatatttttagaattttcgaaaacaataccattttaatccctaattaaatttatttcaaaaatattaaattcgctaaattaaattagaaatcttcaattttaagcgccatcccacccaccttttcccctttgggcccagacggcccaggtgggccttgaagcaatgtgttggtgccaccgccaacatgtgccaacattgacggggccatgcctggcactcccggctcgcctttggcaccctgaaattttaaaattatttaaaaatttttgactttaaaaatcaaagaaatggaaggatagtgaaatcggaaaaaagaaagcaccggcactccatcacgacccggcaacccatcacggcacggctggtagcaagttgccgtgccattgttgatgttgttggcattggatgaggagatgtgatggtatggggggccaagagggggtgctccaggctcaccctaaggccgaaaattttttgaaattaaaaaaaagtggctctactgggtataaaaaattttaagagaaaccccaaaattagtgtatagaagaaaattattcaaaagaaatttaaactttttaattttttttaataattttaaaatttattcacgtataagaaaaacagtttttagatacccgaaaagaaaatcaaaaggctttttgtgaaaattaaaaaaaaaatagaaatggaaattctgagatagtgaaagaatttcaatttttttttgtttgggcaatttttcaaaggctcctcagaaaatttgctgaatgaaattattataaatcatttttacaaattgtgcaagttctttaattaacgctggattaacaaaaaacaaaatttttcatggaaaattcgtgaaattccaacaaaaaaaaacaccttaggccccggaaaccctcgcggcccgacaaggcccggctgtccgatgcgtccgtctcggcctggcaagcccatggaaccctttaaaaaagatggacagaagaaagtggggaagaagcactgacagaacacaaaagacacaaacaaattaaaacgaaatgggtaaaaaaataatattaatagaaaattattaaataaagaaatatttcctaaatataaatttattttattatttttaatacttaaaaagaatttttctaaattttttgtttttataaaaatatgaaattattttttaaattaattagttactaataattttatataattgttgttttatttattattttttcattaaattcatgtaaattttaaagattttttatttataataataataaaaataataattttaaaaggttgaaaatattatttcatgcagcaaaagttaatcagcga

SEQ ID NO: 8711 - DNA, 1373 bp, Heterodera glycines
aaaaaatcgtctaggaatatttatctaacaaatttgtcgggaaagctgtataaattatgggaaaaagctttttcaaggaaaagctgaaaaattttcaatcgcatcagaaagcagcctcaaattgttcaacaacataatgtaaaaaaatattacgcaagaaattatttttagatcctttttagaaatggtgcataaatttttattgtaaatagtcacaaaaaaacttttttttactcgcaatatctaccagttatcatacaaaaaggcaatagttaggctttgagatataaaacaatcgtctagaataattatctcaacaatttgtcgggaaagttgaatacatttcagttgcaataggcatattggctctatacataaatgtagagcaggtttaaaatagaggaaataccaaagattaaaaaattggtggttatgagcttagtctggttggtctggtcatagggtcgcagagagtggagatagatctttttgttgatacatttgaaaaagtagagctagggtagatctattcgaataacttgaaattcgttcatatgtcctgacagccaatcagctgatgataggtccaggtccatgccatttttcggcaacctggatttttcctggacctggattttcctggatttttgtccaggaaatccaggtccaggtctaatgtgaaaaaaatccaggtccaggcaaaaaacgaaaaacctggattttcctggacaaaattttagaatttgttattttaagtgaccgatgtttttttcaagttttcaaaaaatgataaataacttagaaacacattattattattaattagatatttttagaggtttataagcaattaattgattttttcaaacatttttttgattattaaaatgagtttcaaaaaatccaggtccaggtctggatccaggtcccgaggagcctggatttttcctggacctggattttcctggatttttgtccaggaaatccaggtccagatccaggtccaggctttttcaaaatgtcgatctctagttaattctctaacgaaggaaaagccacacacgatcgcatggacaaaacccaatttcgagaaagcatttcgtatcacaaaaaatggtatttatattatatcaccacgagaaaattcagcaaaatttgaaagaccactttcaaggacgttttcaaattcaagaacgtccttgaaattttttgatccgttttctcctttggctttaatagcccaatcaaatgtatatctattggacaaaagaaaacagaaaaaaattcatttaaggactcaattacctgtgtgccttggtcgcctttgggaaataaaataaaaaatatttttaaataaattaattcttaaatag

SEQ ID NO: 8712 - DNA, 1733 bp, Heterodera glycines
  unsure (1)..(1733): unsure at all n locations
ttggctcagcgagcagatttatgtctgaggaacagctgagagcgaaatgcggcagagaagcggccgctttttatacgaaaatgcaacggaaaatattccacgcgcaattcccagtggnnnncggggaaaagaacgaatgtgaaaagacaaagcggaaagagacgacaaacgaaagtggcagcaaaggcaaatgaaaagggaaaatgaaaatgaaaataaaagaaataaaaaggggggggggtaattagggcaattaggcaagttaaaagggaggaaacgaaagggaaaaaaaggatggcaaagtgcgaagtcggatcatccattatttatttgtttgtagtcccttcaacaatggctgtgactcaggcaacaatttttgtgacatcaaaggttggcttaatcaatcaaaatatttgaaatgccattcttactattcttttttggaaataatttctgcctgtttttaatagaaacgaaagaaaacagtggcgagactgagtgagtttaagctgaaattaacgggaggaaggaggcggagcagcaccgacagcagcacaaccaacgcaacgaaagcacaaaagggaagcagaggcagcggcacagccaccgaaacggtgccaacggagacgacggcagcgactgcccctccgacacggcacccgccgctttcggcccccgtctcccctctcccctcttcaagtgctcctcttcctcccccgtctgttgctcctgcttcatcctcaccatcgagccgttcattttctgctgcttcgtcccgtcgttttgcgtctccgtctcccgtccctctcccttcgctgcactctttcgtcccctcgccctctcccccgcttttcccttcctcctctcccattgtctcttcttctgcttcttctgttactcctttgcccctcctccgctcctcctccccctccgtttcgccatcctttgccaattttgtccctttttctccgttttttgccaatgtctcttcttctgagcggaatcgaatcattcagctcctcgccgcccaatcagtacctttccgctttgcttcaatggttgaacagctccgcaaacggactgagtcttccgaaagtggccctgctttttcgttcccttctgatgaaaatcgtcgtcttccttcttcctcttcccttccgccgtctccgtctcttcccgtctcttcccttcccttctccgtccgttctttctcttcctcttcccttccgccgtctccgtctcttcccgtctcttcccttcccttctccgtccgttctttctcttcctctcctccccctccttccgctgcttctcctcatcctcacctttattaccccactgttcctcctcctcccccacttccttcctcttcttctcgccctctttctcttcctccccactatttctcctcctcttcttccttttcgtcccttccctccacactctcttcgtccctttttctccctcccctcctccctttcccttctcttccgtccccctttccctcctcctctccgtgggttattaaccaattcaatgactttcatcaaaaggacgtcccttcacaagcgttcttcttcgaaggttcgtccttcttctttgaaattcaatttttagaattcctttcatttttcagttcttcctatcgatgacatcatttacaattgattttgaattctatttatttatttttattgttattttttgtgtaaaatattttgatcaaatccatc

SEQ ID NO: 8713 - DNA, 1409 bp, Heterodera glycines
gaaaataagccctgatcagtgatcttctgattaatgatcattggccattgtgatcgcttatcagtgctcttttggaaactgatcagcagaggatggaattttgaagcaaatgcctaaatttttggcccttaatacgtagaaataagcacgaaaaaaaattgagttttaagcttctaggatgactttataatgcctattttttgcttattttgattgttttgtgcctaaaatgccatccccactgatcagtgattgatcgttggtcactgatcagttatactcacgggttctccgtttggaaagtcccttaaaatgaatcagaattaaaacagcaaagcattcagtcggctcgaccgaccatctctcgacacttcctcgctccatgcttgacggaatgcctcctttttaaacggttttttgtttgatttttggcacttttcccttccgctccccccatttgagtacccttaaactccaacgatccgctctcgttcaaatactgaatgaccgtctcgcaatctttcgctttgtcgccctttgaccaatccaggagaagcaacgggaaaatgttggatggaaagaagcgacgtctgagtttccgttccgacagatcgaaatcgaaccaaatgccaccggagccgtcacggaaaagagcctcaatggcctcactcaccgactcggccaaaaactcataaaatttggcctttcttaaattcactcagttcgaaaatgccgtttctttcactgccattaaccgtggattttccaaatactctctgaaaaagtgtgccattatccggtaattggccgccattagcacattcaaatccaccggcacaatttcattggtccgaatgccttttcgagtgtcttaaaacagaaataactgaactgacgcaaattgttgttggcatttcaacgcacatgccatttcctcgtcattgtcatcgaaggaaaaccaacgcgtctttttttttgggggggggaaggggtggtaaagaggtaattggcatttatgacagtattttttggcaaaaataccgaaaaatccatgccggactcacaagcactgtaaggggcgagcaaaagagaaactgtgtaatgccacagcagcagatgattagttggttggtcacctgtttgttgaggaccaaatgaactccaagtcgtcccgggaggattccatggcgaagtaataatccaacataagactctcaggacgaggacagttggccatggtctgtcggaagtgcgaaatcaaatgggaagaattcttggccggaaatagacccccccccccctccgaatgccattcgacctcaaccgctgaacatttcgccagcattttttattcttccctaatttaaattgagccactttttggcactcactctgtactggtaagctat

SEQ ID NO: 8714 - DNA, 2519 bp, Heterodera glycines
gcgccggtattatttcggccaaaaatgtttgtcgcccgaagcttcgtaataatctctgaccattagggtgaacacgggaggctgtgaacggcgactaaaccttttcgggaaggggggaggggccaaattggcacaagcttatgctaatttaaaaatgccagctaaaaatagttggcattttgcattaaaaacggatgacgaacacggactgaatgttgcccgagttgggaatgtgcccgcgcacttgcagcacgtgggccatgttcagcagcactccgcgcgccgtctccttcatctgggacagaagcagtcctctgacaatccaaaaggtgtcccaatagtaataccttaaggggaggggggggggaatggcaattcaatcgcaaaagcgcacatttggaccaaattgccggggatgagaaaagtgtacggcacggcgaggaaagggtaactgaacaacaaacaatggcacgaaatgggcgagaagggggggggtgaagcattgcagtgatcagaaacaaatgggaaaagcaacggaccggtcgggatgttcaaagacgtcgtcaacgaaacgccgtgccaattggggccaaattttgtgaattgcggtggcgaacattctgaacccggcgcaaaggactgaatttactcaatgcaattcgacttcatttttggcgatgtgattctgtcaagaaattccaagtcggccgtccaatctttcacttgcgcctcctccaaatacggccgatcgtcgaagttttccttgcaaaagcggcgaaaatcctcccggtaaagccttccctgctgatcaaagctgcttaaaacggattggcatttggcaaattcctctgttcggtgctttttccatttgcttttctctttcgattgttttttgttttgtttttgtccacctgtcaaagtttttcagaatgacttccgcctcaaatcgcattcgattgcccgggcattcgttctgaaggccgaagtaccaagctgcccacataatcgccccttcgcagtaaatctcccggtaatgtccgatacagatgggctccgagcagttcactttgacatggtcacgcgtgaaaacatccgaatctttctgaacatcggtgaaaaatgcaagccatttttgacgagggattggcattttgccaaatgccattctccgaaagaaaagtggccaaactttgtggaagaagaaagttgaaccattgccaccacttgagaacaatggcagaagagagatcaaaagctggaaaaagaaacagtgccgtggcattctgagggaaattggcataattaatggaaagatttttaattgtttagcgaaagagaattgggccaatgaatggcggcacttaagcaaatgaatgagaatggaggaaaagcacttcacaacagaagaagccgaggaaagcatttggaacacaaacattggctttgatcgttcgtttggagtgaaaagaattgaaaattggcaaactctgccgattttgggggaatttttgtcaaacaaaatattgttaacggcaacttttttactcatccgacagacacttcttccactaaaacatcaaataaattgtccaagaaaaacttcacccctcctctccccccccccccgccaattagtttcttaattcaattagcaggcgtaaaacaataaaaaaatgagttaaaccaacggcaatttatcaaatataaatatgaaattcaaataatcaagcgattgtcgtataatgatgggtcatcttcaaattcaatcaacttcagcatcatcatcatatcttgggccaatttcgccgatgttcagccattcgttcgttggcacccgtgccgtccaactgaggtcggtctgtgccgacaccgacgcgcacagcgccgcctcgtccatccaacaaaattccgagtcaattccctcgtgggccagcaacaattgttggtgatccgttggtgttgggtaatacgtttgtgtggcggccgtattttgcgattggaggagcagacaaacgttactactgctgaagggggaaaagcatcaaacggaaaagggggggggtttcaatcttgtacttataaagaataaaaggtgtagagcaagaaaggggcgcgcctgttgtcaaccatgtcttcgttcacttccagcaaagttgcgcgaatgcctgcacgaatcacatagtccacccttaaagacacactgataaagtgaatatatttttttgtttttttgaattaacccatcactgtcgcgaatgatgcaaatgcgtgtctgcggcgacatcggaagaccaccctaaaatgtgcgattaaaccggtcaaatcgaagaggtatgccttttttccctttccactcggctccaatttgctacggtccacgcctctctttcgccctttgctttcattgcttttgaccgacgaagtctttgccaacgacatgtcccacaacacttgggcaatgtttttgcactgatcccgcatcaacacatgggcttttgtccaacgtcagcaccacaact

SEQ ID NO: 8715 - DNA, 3042 bp, Heterodera glycines
  unsure (1)..(3042): unsure at all n locations
gtcattagtttatgggtgagttcaaaaaattataaatttcgtttataacctaattttaggacgacgagtatggcgaggttctattattggaattcatgagagaagcggagagccatggcggggagattttgtacacggacacggacagtatttttgttaggcacgatcgggatgtggagccgatcacgacggggaaatatttgggagaaatgagcgaggaatacggcggctatgagattgaagaatattgttgcggaggggcgaagcagtacgcactgaagatgagaaacaatcagacgggggagatcgaatacgttatgaagattagagggattacgttcgatgtggacaacaggaaaacattgcactacgacacattcagggagatggttctgaactatgggaaaggggaggtggacccggcattcttcgtctataagaatgattttgggtgagtttttaaaaattatttgcttcattaataaatcaatatttaggccgacaagggattcgaaagtggtgacgagggagaagcataaaatgtacaggccggtctgccagaaggggatcatcgatgaggagcttaatgtgatgccatttggattttgttaattttgtatttttttttgttaaataaagttgaataaaaattaaagtgatattaggactagcggggtggaacggtctaaagtgaaggcccactcctgttagccgtaatatttttataaaaaatccagcagttcaaggggaaaatagcatctatgaccgttattctggtacatagttatacatgggagttgagggaattgtagcttgacacggtgtctcgagtagagatgctgttcgacagtaaccccgaggaaacctcggtaggcaaaaagcctgttggaacctctaaatgcgatgtcatccggtgagataaactgattgtgcctaaggtgtctcgttattagggcgtgtcttctcaaaaatttcaaattttgtttcttccgctgtcgtagaatttctgataattcgtgaggttcgcaatcgttaaaatcgcataaaatttcaacgagagaattcatttttttgagcaccagtaggcattttcatattcgttgcaaatccttatataccattacctcaccgccgtatgatgaatttttaccttttctctttatttttaaaattctgagaaccgaaatacagatgatgaccactaccaaatcgataattgacaaaaaatatacccaaatatttgaacttgaaactttaattttctcaaattctttgaacacgacaaaattaaagaattcactatttgtgtctgccacatatttgggaagtatttcgtttgagtcaaatcgatctttgtatattttcttctctttaattagataaatttgtccctcaattattagtaagtcggtaaatgatgatggcatagatccgatcggtttagtaataatttcggtgccattatgatgtgtccataaattctctattgtactaatgtcaatctcgtctattcgatcgtctctgattacaaaaagtcgaccatcaatatgatcaaatctaagatccccactgggaaaattcctgacaaccatttcttgactccctcttgttatcgaagtttcatttgtcttttcgttttggaaaattaaataactatgatcgttgtaataaaagcacgcccggggccttaattgtcgaaaatcctggtaaagcttaacattagttggtccgctcttttctattgaattaatttcttggattgataggctccaccctgaaatcagattcctatttatcgtacataatctcgagcgatcgaatccgaattgtctttcatttaccgaactctttgtcatagtgagatacttgtcgtcaaaaagttgtgtatcagaaagaatagtaaccctttctccactgagttgaccgactatcgttaggagaacaattaaattaaacattactgacaaaattcttaactaatatatcggacatcgggcgaaccttatatagaccatcaatgacctcacaataaaggattccggagcaccgttgtgttaaaaaataaatgcaaaattgaccacacgcatctgagaattgatgttggacaatacgttcgttaaagagaattcgttcgaataggttaagatatgaacttaaatcttcattgggataatcgcccaatgaatcaaaatattctatttctgtcggcgaatttacaaaacaagcgacccagtgttcacctattgtgcccgcccggtcagtattcgccacaaaacagtacggaaaatgcctgtccttcaattttggcatcttgtcggaagcaaaaaccccgataaaatattttcgggttgtcggatgtttggatagaaatatttcaatctcatgagaattcatcatatgcttccgtcgctactgagcacacgattagcattaatagatagaatcgaatcaaattcccccagaactatcatctcatacccgccgtcctttataggctcattaaactgcaccttgatgctggtcgttccgtttcgaatcaattcaaaaccagcggtatcctctagagtagaggtcatcgggatgctgaagaagcaccaaccgtcttcaaattcttgtatattgatcgacattgtcctttgatccgtcgctccatgcccgcagctccagatatcacatcgtctaacacaactagcttncgaactgctgatttagtttctcctatcctacaaacttcagagcagcaatatgcggcggtaccgcgtggcgaatacatcgtcttcccactatctgcctatatgcacaccttcgactacgacgcggctagttctctgagctactgatttcataacgcacagacatgcggctcgacgtgctctctaagcgtatgtctctcngtgtaattcacagtctacgcgcgtctgggacacacaaacatccgccgcatcngtgtatacacacgtccctcctgcgacaccacatggtctcgagtatacagaatctattagtgctagagtacgactcacggaagctcgacacctcgtc

SEQ ID NO: 8716 - DNA, 1335 bp, Heterodera glycines
  unsure (1)..(1335): unsure at all n locations
agaggtcatcgggatgacgaagaaccaccaccccgtttacaattttttgtatattgatcgacattgtcctttctccatcgtccatcccgagcnccgtatacatgtcaacaaatgctcgaatgtatttgtttctatcaaaattaagagaatagggtgacccggggaaaatgtttccattcgcttcgacactgatagagcgtattttggcatgttcaaagacgaagggtgactctttaggatttccggtatacgcaccggttgaaacaaacccgacgattaaacgtctcggaacaatgcttgtaaaaacattgtgtgaaagatcagaagtgccacgcgggatgaaaagactcctgatctcaatttttctcataggatatttggccggggtggtttgtagctgattgcttattatgttatttaatgactgggtaacatctactgtttttacataaattctaatatcgtgtatgttaatacgatatgtgtgcgggttcactatgactgcatttccggaaacatatggcggtgccataattagaaaatcatcggtgttacggtgtatgctaaaaatcacgtcagagttattaagcaaaaaattgggctgacgggcgagatcaaaattaagtttcaccattgtttcacattttgcaccatcagcaaaacgtgacgctctgtttttaaagccactgtttgtataatcatcctggtcgacatcgtcgacataatagcaggacgcttcacagagaccctttttgacatcttctgaaaatcccaattcattcatcatatatgccctaaacgcatagtaaatgccggaatcataagactaaacacctgaaattgacacctttaaggttttgacaaagctgtgcccaaaattttgaatgacaccgacgtgttggtcagcttcactgtccttggtaatcggaatccaattgcttttgtcttttctctcaattgaagttgacaaataaagaaaagttttattgagatcgcaaaactgattatctgaaaaaagtctaaagatatatggcccagattgatttattgctgaaagagggagtaattccctaatactggatttattaattgcaacgttcgtcggggggatatcaaacagcgaaaggcccccctcgagaccatcctcactcgccttgtctattttcttaagagttgacattttttaattatttgtgttatttgttctatttatacctttaaatgaaacttaactgatcaaatacccgttttcgattcttattagtgatcagggccttttttcctttcccacattatgtaacttgtcagtaaagttagtcaacccctgtcttgaat

SEQ ID NO: 8717 - DNA, 7026 bp, Heterodera glycines
  unsure (1)..(7026): unsure at all n locations
atatgtaaattaaaattaaataaaaataataaataataccccccctcagaaaaaaccaagacattaggatgaaaaacagaaagtggaaatagttaaaaaatatgaacaaatgaaaaacgaaaatggcaaaatgaaggacagcgaaattgccaaaaaactgaaaatttgccctggaaaattattggagctgagaaaggaatttcagcctaattataaaagtaacggcggaataaattaattgtttttaagtgatgactgatgactcatcctaatttattttccattttctttcccttttttaaaaagcgcgtgctttttcaatggaagaaaaacaaaaatttattcaccaatttgacaaaataattggcaaaaaggagcaacaatcggtgggacgaaaggacaaattggaaattgctgaaagggtgggcattaatttgagaaccattgacaaatggaaaagcgaaatgggcttaaaaggtaaaatgggaaaaggaatttaaatcatattatttaaaattttaaatgaaaagttacgaaagaaagtcaaagaattgcccttgtaaaagaatactacagaataaaaaaggaagacccaaaagtgccgacaaaagaaattgccaaaagtttcaatgccagcaaagcgacattattttattggaaaaaacaatttgacaagaataattatgagtcatcatcatcaccggatggaccggaacaattaagctggtaaaaagcttctgcatttggattcccgttcactgcccgcctctctaattatccccaagtcgaaattccgtgccatccctggttcggacggactttctgccatggaaaaattttgtgttttttggcagctttcttccaaatttatttcacctatttttactccaatctttgggtattgtaaaatttagatttaaaaaagaccaactgacggcttttttcttacgtgacgaagacgaagtgctgaacaaaaaaaaggaatttgtctttttatatttgctcaataattttcaccttttcttcggtttcgcctatttgaactaacggcacttctcactttcaccgattcgtcccaaaattttgcttaaaagataagggagacacaattaattaattgaatttaaattatatcaataaatgcattaaaataatctctttttcttaaaaaattaaaccaaaaaaccaactaaatttttcatgtccatttaaaaaaaattttaatccctcataactttcctaaaaatgctcagaaggcaccaaattttatcattaaaaagacagggaaaagctaaaaataaataaataataaaataatttttttttgaaaagctttgaaacattctttcttctattcttataacaattcatctccaaattttttcatccaattgaaaatattttgatttgaaatgttcaaaatttttgcaatttccttttcacttatttttggattttcttttttttattttccaataaattttgattttttccattttttctttctctgttattttattccgaatttcgaattgtttcatccattctaattattttatgaaatactccgattttcttaccaatttcggcataattttggttccattcttttctcgaatattttcttttttattttttgcttatattcgtttgtcagttttctgagttccaaactttttagggcacagattagatttaaaatttttatttttacaaaaaattcaaaatgcgtttgaaataacctagagccacatcagctaaaagagagagtaagtggaaatgaaaaagaaatgaaaagaaatgaaagggagtcattagaaatttgtctcgcataccttccttatttggcgcccccacaaagtgtccaagccacgaaatgtccaaaagagtaaaaacccacgaaatgtccaaaatttttcaaaatttataaaaacaaaatgagtctaatttaggatttttagggtttttcggggtcactgaatacgaatataacctttatattacccgttgcctaaccttaggcccatccgaataataaaaaactcaaattcgagacttggacattttgtgggtcagcgccttatttacataccatcttttattatacacggcgattcaattttgggctccaagtacaaataagtttattatttatttagtaatcagaacgccaaaactttgcaaaacttaaaattttccggggattttcccttgcaaaagcacaagagccgatctcgagttagaaaatatactttcaaaaaacaaaatagaattcgatagagggggtcaaactatgggcctatgcaaaatttgaagaaaatttgaacatagggaaaaatttttcaactaggtgaaattttcaataattttaattcttttttagccaagtccacaatttaagggccaaaccaaataaaatttacaatattctccagaattttcccttncaaatgagcataanatggttttatttgctctagtattcaccaagttataagctanaaaaattccataaaattgtcgatgctgtacgtaactaactcttattgaaaataattttttttgacacgaaaacttttattaataaaaaatatttctgcattcttctttaaaagaagaaattgaaattaacacttgcacttggagatcaaaaccaaatcgaaagtgattgttttttatttgtgtgcatgttttagtgaaaaatacctacctaaattgttttttcatgagtgaaaggggatgagatttgaattttgttaaaagtcgaattgatgatataacaaatattttgatttttcatttgtttattctatttgcaagaaaggtaaaattttgtgattttgcttcttaaatacggaaaattaattttctccctgctaaagggttttatggatcaattaatgaaattttagcaatttttagggggtgtcgtaaacatatgaccatgactatccatgagggttttaatgaagtgaaacaaggcccgaagcagccgagaaccccccccccccccaaaaaagacaaggaactctaataaataagaaagaaatgctgtaccaatagaaaacgctaaatattttgaaatagaaagacgattaaaatgataaaacacaaccgtccgctagtaataaaaaaaggaggtgattttgttttaaaaaaattttgtgtcaattcaaggtgcaaatcgtacaaattttcaaaaatttcactgtgctgcttgttggcaaaattgcaataaaagtgttaattaattatcgaatgaagttagtgccgcggaaaatacttggattcaatggacttcctttgttgggattgtctcacggtttttttgatcttgatcccgaacatcattttaggccgggctcatgcccgaggcgccttaaaaaaagtttattgaaaaagtggattttttaatgtaaactattaatattcaataaattagtctaaatatgtctattaaataaatatgcaaactcgaaatcaaattctttgcttgagtatcaacctatgtttcagctggtcgctctttttgcggccaacggacgccatattttcattctttttcaatttaattacacaaaatttattgttttaatttgttcaccaatgattttctgaaaatgaattcttaattaaataaaattatttttcagcaaatttttcaatcctttccactggtgaatcatttcgtttctgtttattgaaagcatttgatgaaaattaatgtatgacaatgctttttttgatttatcgcttcgaatcgtcccattttatattcatttaataaacaataattattttaacaaaaaatgttaacattttcaaattttatatttttaatgtgttagtagacacatgaaaatagtacgcgaaaatgagagagaaagaaatgcaaaattttcatcactccatttttttttgctcttaaaacccctgagattttcttcgtgattttttcactatcgaaggaaaaagaaaaattcataaaaattgttcttcttttacaatttccaattttttgtgttcttctttctaaaattttgggtccggattggaatgagaaaaatatcgtggttcacgatccaggtcgtgatgagaaaaatatttgatttcaaatcggttttggcagaaacgcctgatccaggcacaggtattcaaaaataccgagccgagctttacaaacaatggtttcaatccaaagtgctaattcctatatatacttttttattttcccctgactttccgatgacaccgaaaacttaaatttcatattttctgtaaaattccagcacacaaaaaattccaaaatgaacgcaaacaacaaattgaatatccgtagcagcagccttccagcggtgcgtctgctggttggcgttttgctgggctttttcatggcattggccatttctccatccaacggttttccacgcgctgccgcacaccaaacgaaggcatttgccgaacaaacggttaagatttttttttttgctgtttccacaagaaaaatgctaagtttttccttattactatggtcgcgatttttgttacgaaaaatctcgtaatagtaaactaaaatagtgaggaaaatgccattaactattttagtgatgaagagccaaaatagtgatttctagtgacctgtttaactcagttgggccggcacgtttgggccccagcatgtttttgcgctaaaacttttttctgtcgaccaaatccaacaatcttggtatcattcgaaaatgtaacatatttagaagctatttctaaagagngggttgcaccccccgaccccgccccgaccccgaaccccgacatttttggccatttttcggggttaaccccgacccgaaccccgacgcttccaaccccgaaccccgacccttaaccccgactcggggtcggggttaaatatacacccctaagaatggcatttttgtgagagaaagtcaagaaaatttaaacaagttttgaatttttgaaccattttgccaaatttttattaaataaagaaaatttgctttcttatgacatgtattgtggtgtattggttagtgcatgcatcacactgacattactgtctttcataagttcaataaccattgacgttctcatttttaatttatttttttgtgattaatactagagttcgggtacggaccggatccgtatacggatttttacggatccgtagtccgcattttttgggccaatacggatttttacggactacggattttccggatttttagtccgtaatccgtatgggtgcctagtccgtactcttggtccttatccgtattttctcaaaataccgatctctaattaatacattttttaaacaaaattatcaataaaaatagccattcttggcataattgttaacagattaaacccaaattttcaaaaaatttttactttcgttgaaatttaaaattcaattttcatgactaaataaatcatgaaaacaatatatttcaaaatattgacaaaatatcgaaacaattaaatttcaaaattcgcttggccgagtccaaaaattcgtaaatcttattaaaaaaattggctcaaaatcgaaaatattcagcactttttgggcaaaatctgttaacagcccatgcaaattttcaaaaattttcccggcggcgcctatcggcaccgccggacccctttctcatgaaaagtctttagaaaaagcgcgccgagaaaaaaagatggtttgaaaaagaaaaaagtaatcagaaatttttgatcattttttgaataagattcacttttttcaaattgccggatccgaaaccggtttccggattgggaaaaatttaaattttcacatgttaatatttgtaaaaaccggcaaaatttcatttattaatatagaaattcgatgcaccagaaatgtcgccgccaaaaagacataatgttgccgacaaaataaaaaattttaaaattttcaagatattaaagcatacaaaaatatttattataaaaaataaataaataaatataaacaaataaaactttattatggaaattataaaaaattttgactatatggcataaggtaaaaatttaaaaaccccggaacccccgaccccgaacttgctgaccccgacaaccccgaaccccgacttttctaaccccgacgttcgggggtgcaaccctaggaaaaatgtttgaaaacataattttgaaaggagagcttttgagggttttcaaaattccaaattcgatagtgccttaaaaaaataatttttcattcttctaaatctgaaaaacatttagtctagtggctataattattcgtgcattacagaccttcatttgtgagatttggtttttaagcattctaaactttttccaaaaatttttagagctataagactgtacttgttaatacaataattctaaatgagtcgaaatggatgtcagcaaaataagtttcctgggtgtatttttcaattttcttctaatatgtaagatatgtttttatgtgccaaactgtcaaaatcaaaaatagttcggtgaaaatactatttttgggcttatctcgccaagattaaatgacaaaaaattttgtaaaaaataaaaatccgggctctactcataattagagatgggatttttaggttttacctattttttttttgcggcttatttgttagtatgatgagagaagaccaaaaatagcattttctccgaacaattttcgatttagagcgactttttagcacctaaaattacctaaaactggattttcggtcaatagcacctattttggcatttttcgagttttagcacctattttggccttttccagaaatttcatagcaaaaatgcaataaaaacgaaaaatacacccctaagaatcgattccaaaaaattttaaaaatatactcctaaaaattgatcaaaatttcagaaaatattcccctaagaaatgaaaaattttctcaaaattcgtctgcaaaatttatttatttattttcttgtccagttgcaattgagagggcgaaattgataaaaaaa

SEQ ID NO: 8718 - DNA, 1903 bp, Heterodera glycines
ctgtgtactcactcatgttctcttacatttttttaaaagaaaagaaacggatggaaaaccgaaggcatcgtcggccgcaacaaaaagcgtcgtcgccccaaattgttttccccatttccatttcccctttctcatcatggcgattgccccaaattttgttgttgttgctgctggcgacgttcctcggccatgccaatgccatcgccgacgccggaccatcggcaacggcgtcctctgccatgggcaacaaattggtcaccgcttcgttggacgccaactgggcacacacttcgctggtggccgagacaaggtttgtttggctgctgcgcaggatgccgtacttttttgtaaagcattgggtgccatggaaagaaaaaaagtcaacggggcagggtttacatttttgccacgcaattttcaaaaaaattattcgattggcccatcagaaaatgcgtttttaattgcttcaaaatttcataagattttctctcaagactaacccccacacacgaaataaatctttttgaaaattaaaaaatcccattatttaaaaaatgattcaatttttcagaaaataaataaatacatatccatgggtgtttgttgcgtttcacaagttttttttgccattttagtgaatttcttgcttccgccgacaattcggcgttttggcgcttcatcgacgcgttgctggacgagcaacatcgctcgggcaatggcaccggcacaagtttgtcctgctcatcatttccaccattttctaggcgaattcaaatcgatttcttcatttttttgagctatatgtaccccttttaagatgattttttggctctaaatttgactcagggaacttgccataatttcatttttgcgtatttgtctcacaattacccaagccgaggcatgctcgtatgtgttcgccggaagccaaaaaagctatttttgtattggctaaatttaataaaagttgcgactgggaaatttgttcatatgcctgttctttcaaaaattttgaaaaattaccagcgattttttgggaaatttttttttgaaaaacattaactaattcatcatgaaattttagaatagcttgtaaaattttccaaaatttttttccgttaaatttctagtttgaatttttttgttaatttttttgacggagttaaaatgagctacttcctctattttactcctcaaattgcttgcgtaatctttttgtgtttcccttttctacagctgtcacctcctcgccaacaaccgcaaagtcggtgacgacaacaacgcacgaggccgagctggacatggcgctggcgagtgctgccgcagcggcacaactgcgccacgacgacgacagcgacgcgggcagggaaagtgacgagggtggcggcgatggcgaactgcagctgctgcgcttcgcgctcgcgctgcgcctgcactcgccgcgcgtgcacctgcaccggcaaattgcgcgcgacgtgctccggcgtgatggcgccggcgaggcggcgccggcacagtttaaggtgctgccggaaattttattttttttttgaaaatttgactatgatttgttaacagatttttcacaaaaaatgaccaatttttgcgattttgagccaatttttaaggaaaatttctgttagtctttaaaattgcaaaaaaactccactaattgtaaggtacaaaaaatggttggccaaaataaataaacaaataaaaccccggaatattttgctctttttctggcacttgtttttcgtggccgcattatatgttggaaaatggggaccaaaaatgacaaaaacctgtgagtcactaaataaatcgaaaaacaaattcaagaaatttctctcaatgtggcgcaattttaagcatattatgcaattttttgtactatttagtt

SEQ ID NO: 8719 - DNA, 4972 bp, Heterodera glycines
  unsure (1)..(4972): unsure at all n locations
ggcaggtcccacaatgagtatcctgtcgtcttcaaatggcattccgatgctcaacctgccaaacatgtgtatttgactggttcatgggacaattggcgtaagaaaatccctcttgtgaaatccacccacgatttttctacgattatcaatctcaatccaggtcagtgatttcttgttatttattttttcttgtcaatgctttcgttaaggacgttacgaatacaaatttcttgtggacggtaaatggatggtcgatgatacaatcgcaaaaacagacaatcaggtgcttttccgtcgttttttattttggtttcatttattcacagatgggaagtcagaacaatgtgatgtccattgatgaagctgattttgcggtggcttaactttcccttttttcatctttaactccttttccattgttaggttttcgatgccctcgacaaagatttggcctcctcaaatgctggcgaggcaatgcgttcgatgaattcgacgggtgcacagccatcgcaagacacgccaaacgatcgcgagttggaacgtcttcgcgaattcactcaacaattgcccgaccgtcgtgattttgaaaaagctgcaaaccctccaattcttccgccgcatttgcttcaggtaattaattgtgcaacttaaacggaattttgaaacttttataattgcctcattataatctcaaaaaattgttcaagaaacatttacatttgtgtccatcattgtatactagcattacttttgtttgttaaggtttttcttttaatttaacaatatttcaaaaatcttatgccttttatacatatttcgcgctttttaagagttttttgtttttattttatttcattaaccggaaatcaatgaaggattcgccatttcaggttattctgaataaagatactcctgtgcaatgtgacccgaatgtgctgcctgaaccgaaccatgttatgcttaatcatctttatgcgttatccattaaggacggagtcatggtaaaactttcattccatttattatctttgtttcaaaaaagctgttggggaaaaaatttagggaaccatttaaaaaatggcccatcaaattatgattattttaacaaaaccttataagggcggcaataatgctatttatgataggcctactcattttttcagaaaatttttcttaccctattggacttttgaaaattacggatgcaccccaaaatttcgccaggacataattcgccgaagaaatttttttaaaaaaatttagaaattttcaagaaaaaaatcatagaatattttttatggaaattcaaggaaaattattgaaaatttttttaacgatttttggaaaaattttcgaaaaaacttactaatttattataaacttcaaaaaaatcgctgaaaattttttaaattttttttcttgaaattttcttataaaaaattctaagatttttttcttaaaaaatttctaacaataagtttaattatttttgcggcgtaatttcggcggcaaaattatgtcccatccccaaaattaccccaaaacctttttggctttttcagaacaccataaaggagatatctgatcaagtgggtgtaaaagattttcgatcaacataaaagttatctggcgggagtcttgtgactcccggtcccggtgttttgtccaagaaacagggacctgcagtccggcaaaatcccggcgtggccctgatccgttccgggttctaatcatcgactgtatgcttctttgcattttataggcgccaaaatgactcaacttaattttacttaaactttacaggttttgagtgcgactcatcgccatcgcaagaaatatgtgaccactttgctatacaagccaatttaactgataccacctcgaaatgatgttgacggggttttgtattttgtatattcagagagaaaatttattataacgacaaatcaacgcacattttcattcgcgttatgtttatattttgtgtccatcatttcattgtctatttttaaactatttttaagtgggatgtaaattgactgaaagttacaatgagtcacttgaccttattttattttcatgcaataatataattggttcacaaaaaatgttcaattaatcttttgttaataatgagtgcttcccaaagtgccaatacattccgttcgaatgcgccgttggttacaggagtttcacctcatcagggtgggcattggtcgttttactattacttccttttccaaatttcaaatcaaattaattctactgtgtaattgtcaaatgcataggtccacctggcactttgatcacaattcgtggcgaacgatttggagaggatgccaatgacctcgtgcgctcattgcacttttaatgtgaaaatggttttatggagtaggttgccctggtcatctgcggcaccgattgtcttgcgactgccaaatggaaatcctcctccaaaattgtggctcgtttgggcgggcaggcaaagcgtgggcccggggacattgtgatggtcactcgttcgggaggacgtggccaatcggcggttcaattccgagtgttcatcgagcagattgggccgttgcaagagtcagctgtgtgggtggacgaggcaaagacagtgccgggccgaaatttaattcggaatgtgcaggagggcggagatccggaagacgcacttgggctgggcatcgaccagtccgtttcttttttgtcaccaaaaagcgcctcattttcagacaaacgaagacggacatcgccagtctgatcaaactttttcctgatggaacgggcagccgaaagatggaaaatttcagccccgagtggtatttgctggagaattacaaattggcaaggtccctccctctcctccctttttttcgtttttttttttgctttttgcatttctttccatcgcttttatttgttgccatttctgttcagtgtttccgatttgaagcgggggatggccaatttggagaagcaaatagcgcatgaggaagaatgttcgaaaaatgtgcacaaggccaacctcttccttttgatcagttgtgtggacgcactcacttcactccactcaaaaattcagtcgaaatcgaccagcgaagattggccaatcagtgcgaaattggcagaaaaagtgatctgaaataaatataaaaatcatctttttaccgtttgaattctctctcccccttttttccttttaatgtcacttttatacaaaaaaatctgttcttttttatttaaattgaaggtcgaaaaggctgcaaaaacggcggaccgtctcttccgcgatgttttgactcggaaagaccacgccgactccacgcgaaatgccctgtcaatgctgacccgattccgtttcattttctttcttgctgagtccattgaaacgaacatggccaaagtgagcgacatccaatgaatgtaaaactttattatttcagggagaattttcaacaattttgaacgattacgcacgggccaaagcactttttaaagacaccgaagtgaatttgtttaaggaaggtgagcaaaataattgggaagacaaatgtatgcctaattaagttatggcggtgctcgacgaaaacattggaaaacttcgcgaatgcattcgcagcaaattgatggacatttccactcccttcgaagagcagaacagactgatcaaattcctgaaaatactcgaccccgagtcggaccccgcctggtacgcactgaaaacgcactaatcgaaggcattccatttctgttcagggattgcatgatgtcttacaacgggtggttggagaacattttatgggagttgcaaatccattttcatgggaaatgtaaatgctggctttcatttggcttttcctttttatatttcaatgctttagcgatggaggcgcaccaacggacttccatggcttatgagacggtcgatgtgtctgatcttttatcggaggaaaacaaatcgcctcaagactttcgccatgcttttgttattgaccttttgggacttcttacagaaaaattgcaaacattttggaaaatttctcaaaattttgctgtgactggtcccaccacttccgctgctgtttctgcgcttagtcagacagaggctgaccaattccaagaacggcaaatggacatcgatgtgagttgatcggactttgtgatcacttttggaccgaccccttcagcaaatgttgaccaacaccatcaacgttggctcgtggctgttgctaaatgcgttggtgcctgacgcactgcccgagtcggtgaacaaacaatacaaagaccgattcgtgcaatggcctcgtctcagtccaaatgcncaatgggatgtcatgttcccctccataaaaactcttcggtacgttcaattggtcaataaatccctgcttttatttcatttgaatttnaagggcctcaataaaaactttgactgaatgtctgagccgttctcaccttcagccgttagtcgaactttgtacaacggtccgtctcaaatgtttgggaatgttagtggagaggggcaaagaaggtgggcggtaaaagccaagcaaatattatgcatttccaacgtaagccatccgtttgtttcattgtcagccgttttgctgcttggtgcccaagagaattggcgcgtcgatttaatggccgacccgccgcgtacggcgctgcccgaccttttcgagacggaagtcaacgaattggtggctgatgtgaaagtcatcctttcttccaacaatttccctggggaaattgacctttttctaaaggagcgttggcgacaaatggtgcctttttggcattgtttttcgtcttccatttgtgaattgtttttagatcatcgacctttttgccgtccttttgctcggtgtccgcgactgttacgaccatttgctcaaattgcgtcgggagaacaaacggcccaacactttgttggacaatgtgtcattggaagtgttgatgagga

SEQ ID NO: 8720 - DNA, 4294 bp, Heterodera glycines
atagggcttggatttttaggctctaaaaactgccaaaataaaggtaggctttaggctctaaaaaaaaaccccaaaataggcactaaaaaatgggaaaaaggcactaaaaaacctcattttagggggtgtaaaatgacaaaatgtattcaaaaaagtaaaaaaattcagccaaatcagtattgagataaataatttttaaatcacaaattcttgtcaagaaaataaataaattttggagatgaatttttgaaaaatttttcatttcttaggggtgtatttttgaaaaaaaattttgggtcgattcttagggatgtatttttaaaattcccaaaaaatcaattcttagggggtgtatttttcgtttttattgcatttttgttaataattttgggcaaaacgccaaaataggccaaaataggttctttcaaaattttttaggctttttaggctctaaaaataaaagcctaaaaaataggcactaataactcgaaaagtagcttaacaacagcccaaaaaaacatgtttttcgtgcgtttcaggccacagggagctcaggaaaaaataggcttttgcctaaaaatccgagccctagtcatatattgagggtaataattagggatgccaaaaatatggatataaaatcgctaaatatggccataaaatatggaccaaaaatcgcgaaatatggacataaaatggaaaaatctcaaaatatggaaataaatggcaaaaatgtcaaaatatggacataaatttttcaaaattgagtgcaaaatttcttcaaatttattggttgaaattgcatatgagatacatttccaaattttttgactcggtaaggcgctttgacaaagacggctttcgttttgcaattagtcggtcaacattcggaaattggtctcgaattttttcggcaattacgtgcaatcattttaaaagaaaaaaaacataaaagctaaaataaaaatatggaaatatggacataaatcgcgaaatatggaaaaatatggaaaatatggatatagaaatccatcctacaagcttcaaaccaagctaaaaacatgtttttcgtgcgtttcaggccctcaacagtccaggaaaaaatatggatatccatatgattggcatccctagtaataattatacaaaaagaaaaaataagtcgacttaaacagtaaaattttaaattttacaaattttatcactttgagtcaagacttttttccatcgctgtatttaacccaaagagacatcgtactgattaggcccggtctctatcggttaaatttgcacgtttcgcgaagtgcccatttttgcacagtcgcgaaacgcaccatttttacaccatttttgcactgtcgcgaaatgacatagcacccttttcacgaggttattccccctccccaagtcccaaaaaccccaactcatgggatcattctgttttattgccatggaaattccctatttcgatattttaagataataaattcagaaaaacgcaaaacttcatataaatttgaagggctttgtatttttttgaaatttactaaaaaaaaattatttttttatttttgtcaaaaattctcccatgaaccacaaattctcgagttttttgggtcaaaaatttttttcctaaaattctctggaaaaattcaaaaaaattttttttaatttctaaagttttttcttgagaatttctaggtttttcgaatgccaaatatactcttaaacttgaaccacttcaaaaactttgcaggtttaagaattatatgaaagaaatggtcaagcgattcactgatgtcaaatggcttgcgcgtggaataaagtgaatttgccttcctcccccttaattaattaatgctttttaaaatatttttttgttttgccaaagtatctttcattcctccattttggcccctttcccttttttcggtccgacttcgtcccgtgtgacattccgccccaaatgtttcccacggccaccgtttggtccgctgaacgtcttcggcgcgattacgctaatcatttgcgttctttgcccgctcaattgcacgaagcaaagagagcccatcgcaaaaagtgagcgagcggcaaaacttcgaaatttaaaacaaaactgaaaaatgttgttttttaatgcaggctcaaccaaatcggagtgttcaagcaaatttctgaatggctcggcgaattggaaatgcatcgccgcattatttttgaccaatggaaggcgcttcagaagcaaaaagtgtgcaatttaataagaaaatatttgataaaattaaatatttttgttcgggtcgggatcactccgccgcaattttttggcgcgagcttttttggcgcagccgttttggcgccctatataaaatggtttttttttgcatcgtaaaatttttttcaaaatttggaaataaccctgtcaaaatcagttttttcctgctgtgaactaccatatgacgtaattttgctaaaaattaggcaaacctatcaacacccttgaaaatccactgaatattaactttggaccaaaatataaaagttaaattaggcaccaaaattctgtagcattgctagcaattgtattagcatggtactttaaaagaaaattacttaaaattatgcacaaagaaagcaaattaaaattttttgaaaatttttaaatttttaaatactggcatcaaaaaagccattttttagggcgccaaaatagccgcgccaaagtgggcggttccctttttattcatacgtgaaataattggggggggggattgaaaaaaattagtgtaatttatcacaagggaaccacacgaactgtgtaaccaggggtgcgatctgtcctggtttggaggtagcgaccaaaacttgttctgattttttaaaataaactgataattttgaaaaatttatggcagaatggcactattttatcaagaatacataagatttgtgcaagtcctaattttcgaccccaaaatctgattttttgggcccgatgtcctgattttgaaaaattttcgatcgcacccctgactgtaactaactgagtttcggtcggctgaatttcggcggctgagttttgtcctgctccgcatgaccccctccccaaatgatcagaaaaatcggtcaacgtttcaaaaaacgtgagaaaatatttaggttttaaagatttataaaaaaaaattctaaactcatactagagaccgtactggacaatccgacagtaaactaaaacttaaaaaaatattttcgacatatacggactatttcctaaaaatatattcgagtcaaaacactttcgcaaacttaacaaatttgaaaattaaaaatacatgttaagaaacaaaaaaattagagcttacaaattagcaaaatttaaaaaggataataccgtattaaaggcccgcatcgatccttaattagccaattccgctttatttaccgattattaagttgttttatgaaaattaaaagcagaagacagatattagaatttgttgtgcaagactttaaatgaatcagcaaaaaattctctatcaaaagtttcatagtttttaatgcaaataatgattctttttgttaagacaaaggaatttgattaccgtgtttggtccgctcagatgctcagtgaacttgaagagaataatgcgcttactgtgggttattttagttgttttgcatttattttttcattttttagattgaccattagcaaaaaagcaaatgcttcttcctctgatttcgtattacaagggattcttttttatgaaaaacgcaaaagtatagctaaagtatgtatgaaatatgtacaaaatgtaaataaaattttaaaaatggttattttttagaaaaaaaattcctcgtaaagggtgaaataggaacaaaatagcacaaaattgttacctaaatggcgcagaatcacattttactattttaaaagttaatttttgattgattttttaggagtacatttaaaaaaaataattttatttttcacaagaaattactataattctcagaaatcttcaaaatagctaaaaattgcaaaatatgtgcaaaaaatgtgaaagagttgtataaaaatatttacatatataatatatagaaaacccgtaaatatgtaaaatatataaataaaagttacaacttttgttcgcaaatacaaaaaagaaagtgttttttctaattgtgtaaaatgttaaaattgaatttggcgaaaaactttcgtgtttacctaaatacatatacttttgttccacactgtctttacataaaaaagaatccctactgatta

SEQ ID NO: 8721 - DNA, 785 bp, Heterodera glycines
tatcggcaccaccagataggctttggcttaataatcctgtagaaattgaatcaaaaattgcgtcatttggtcaattttagacaaaatctgttacaacaccacattaaatttcataaaatttctcgcagatgtcgataggcaccaggtatggcacggaaagacttccggtttccgacatttttggggtcggaattccgacttccgaaatttttgatgaaaagtcggaaatttttaaaatttttatttcaaaaaactagtaagttttgtacaatttctgttagggttgctccccgacccctcggggggcaaaatgtcggggccggggacctcggggggcgacatgtcgggggtcgggtcggggggagctcaaatgtcgggggttggggaccccgatcgggtagtgatcaactaaattttttaacaaaaaaaaagcattttttctttttaaatgctcgaaatcttccttttttcactttaaatctcagggccctgtcccggtagggcaaccgagaaccgggaaaaacaagcactggtaagaatggtggtcggagtgtaaaattagtgatgaaaattggaattaaaggaaaaattaaaaaataataattaatatatactttaaaagtaacgcacacaattatgaaaatggtctagaggctagtcttcttgattttctattatcattttttaagaaagcccatacaaattgagcatagtaatctcacttttttgttgaaaatctgtcaaaatttccctcggcggcgcctatcggcaccgccggacgctaa

SEQ ID NO: 8722 - DNA, 4415 bp, Heterodera glycines
acgcaaacggcaaagtcggcaccgtcggacaacagcaggttgggatcgtaacggccactgtccgcgaagggataggaaaagcaaatgacacgggcggaatggccataggacagcaaacggaagggagcgcaatctgagaaaaagccaaataaaacttgtataaaaacggaagacatagagaaagagtgacacaacaaaccgtcggaaaagccttccaaaagttgtgccataatcgcatgacaggcattcatcatcttaaagaggaaaagaaggcaataaagtcggttatttaaatggtcattccaaattatgatttactaattgaaagatacagcatttatccatcaaaacgaaaccattattgagccgtcgtcacgcccatggaacagtttgccctgagtgcccacataaattgtcgccgttacaattcgttcgtcgtcctgaaacactcaaatagcaacatatatatgttaatgatgtacaataataagtccacctcagtgtcgaccaatgtcggcggaggcggcacgagacgagcccacgcctcggaaatgtgttgtttgatggtcggctcataaactgaataaatgggcgaaatgagtagagaagcatgagagtaaatttatgggtggatcaggaatttcggagggagaaaatcaaagaagttctctttttttctcttcgggtcgaaaatttttttccagtgttatttttcaaaatgagcaccagggcgaaaacagaaatttgtagatgtttacgccaaaaaatgataaattttgctattttgagtcaatttttcaacaaaaaaaaatacggtaaattcgatcccgccggggaatttttttgaaaattttaatgaaatatgataagaaaattgtgccagttttcaaaaaatatgtaatttttcttgaaaaattttttaagcatacattgagaaataaaagcaaaagtaatttccttgtcttggtcacaaatggcactcaccgattggtctccgatggcgaatgaattcgttgaccaagaagtccaagttgttcggaatgtgccacatgctgatcgcgccctgctcatcaactcggtaggcgaccaccacttttttgtcactgtttcgcgactcatcgaagaaaaattggacgggcgtaagtgaaggctgaaaacgaaaaaattccatcaatttatgaaaaacatttacctttaacggcgttgaaagagtcccttttaatagtgcaaaaacaaatgcctgctcaatgttgaacacattggtcggattttcgccaaatttttcgcgaatttgcctgccacaaagttttctaaaggtgtgcaaaaaatgttggcataaatttcaaatttttcaattattatttttactaaaagagcctccctactttcgtggcaattggaacaacacaattgtggagtcggcaaaagcaatggccactttgtcaatgtcgacaatgacaccgtccagcgcctcaatggcacattccgacacaatcagctggtccaaagtacttgggtcaattatctgataacaaaacggggctcataaattcgaaaagttcgctccattccgaattttcgcatcagatttgaaaactcgcaatttgtggcaagaaaattaaaatccaatccaaattttagataaaaggcacaattgtcataaatttaagaccaaattttcccaaaactgtccacaacagcagtgtgtacctgccatgaattgccacacacaatcagcatcatgcgaagatttttcggcgaacaaacgatgcttttcacgccgtccgccccagtggccaacactttcgactcgcactcaaacgaaacactcgccccacagtctttggggtcaacattgtgcagggaccagagcttgacaatgccggacagcgaagtgccaaccaagacatctgaaaaaataatttttatgagtggcgaaaaaaaaattaaaattcgaatcttttttattcctttttttaaattcgcaaaatttatggccaacccatcggagtggccaaggcaatggaagcggtccattcgggctcaattttggagcccaatgtgaacagaacgttgagatcgtagggatgcaaaacaatgacatcggcatagtcgccaatgcaaaacagcacattttgggctccatttttcagtgtctgaaatgacagtttttaatttaaatgtgtttttatgaaaaaaccgatattacttgcaaattggtgtttgaattttattaaaaacttaaagggggggggaccttttggtttggaaatttttcttgaaagatattgcctagtcgtgaaaacttgtcactaatgttgttggttttaaccattcataatccctaacccgaattagaaccaaaagtagaaaattcaaatttttggacttcgatatttgttttacaaaaaaaaatcttcgtaaccaaagggtcctccctttctttggtttttacaaaaattcacaaggcaccgatttgcaagtagagccgtaactcgtacataaggcttgattgttcgatgtatgaagttcgacttgacactgtcaatcactcgcccatcgattgaatcccaaagacaaacagtgccatcttcagagcaggtaacaaatttcctggaagtcggtttttagtttcgaacttattattgaattcgaattaattgaacgaaaagaattggaattttcattacaaattaaaaaaaaacatacgatgtgtttgataggcaaattggagaaatgcagctgattgcactctctaaacaaaaaataaaataaaataaaagaaaaataatgagaatgccaaatttcataaaaatctcccaaaatgccgtcatcaccatgtgccaaaaggaccatctgcggttggatccagccgagtgcctcgtcgaccacccattgcatcacttgaccatcaatgctacccgttaaaataatccgcccattttggaccgatgaaatgcgcacaattcggctcttcggcgcttttggaccccataaaacgacggggagaagcaacgaattagcaccaaaggaattaatcctttcggaaattgtcatgaaataatttaagatcttaaaggcagtaaaaataaagagaaaatgagtcattagcagtcaaccaatctaatcgaatttaaagcatatgaaaaagacacgaaaagcattaattaagaaagaaaccgtgatggttttaggtcaagagctaacaaataaatgaataagccgaacgaaaaccggaatttttaaaatttattttgttggcattatgtttatattttattttggcatcacctagccacagttttccgacaaagtttgagcaaaatcgtttaggtacctaattactgaattgcttttctcttttatattaccgccgctatgagttcaaaatttatttttaggtataagagaacaacagtattaattatgtcggtgccagcaacgtccgcaaaaccgatggtcatcgacatcagttcactttccatcgatgaattgtccgttttgcagcaacaattcgacgcagaattggcattcttcaatgattcactgaacgagttgagaaatgtcgccgcaaaattcggccgatgtcaggcgacgttggattccatcagtccgaaggaattaaacaaatcagcgctggttccgctctcagaatcggtacctattttatatttttgaattttatttgtcattatttcctaatacaggtttatgtcagagccaaaatgactgatccggacaaatatttggttgaaattggcaccgggtattttgttgagatgaaccgtcagcaatcatcagaatattttaaacggtgaataattttctgggaaattttttctttcctttagttaaataacaaattcaggaaatatgcctttttggaatcgcaagttgagacgataagccgtaaaataattccggaaaagcaacaggcgcgtcaaacgattgtggcagctctgcagaagaaagtgcaacttgccacttcgaaatagcgacttgcgatcatttttgaaccacatttttgcccattgttttttccttgttacagtgtctataattaaaattggaactatccaactccagcaaattaaacaaatttcattttttatcattatattttgctttaattttctattttatttgacttttttgtagaaaaaatgcgttcaaaagattgcaaatctaatccgaacagtgcttttcttcttcgtcttttccaaaacaaaaaagtttgtctttcaatctttttattgaattaaaaaaagtaaagacaaaattctcagagaattgatggacgagcgtgggaagaccttagatcggttcaagtgacttttgatccacggacaaatttaagcgccgtgcatttgggcagtacgaggtgtgtcgatggttctaaacccccgtaatctttg

SEQ ID NO: 8723 - DNA, 1196 bp, Heterodera glycines
atcacttaagtgaaaatccctccaacactcttcctttactcaaaacatttttcttttctttctttcttccacttcgtttctccaaaatgtgcttcaactgctgatggttttggcgagaaaaatgattggtcacagatgggactgatctgatcaccgcactgatcggtcggccgaccatggctttggccatgccccaaaatatccgccaacttttggtcgtttttgctaattttgttccttcgcccaattccgaaacattcgctgatcattctgcagaatagcagcacaatgtttgatctgctgggcttgattgctctattttacccattttctctggtcatttatcattcccaaaatcaaacaattaaatctctcccttaaatttgtttaattcatttccaaattatccaccacctttttgccccagggattaatcccatcctcattttctgccctccccccccccctccctctcttcccaaccaattaatttccgtgactaattggattccctctcccccccgtccttcggcggattgacgggaaccgaccaacacaacgaccaatcggcccatctccccttctcttaaccccctccccacgcattttgggctcccggcgattgcccaatggagcatcacgcgaagtgctccccgcccgccttgccctcccgccgttgttggctcatgtcttccccagggatttgtcccgtcctatttccccccgccctccgtcgatcacttttacgcggtcgatcacctttcagcaatccctcccctattttagtccttcccttccgccaatgcctttcatccaccaaattcatcgctcttccattttcctatttttcctcctcttctccgtccgtgccaatgccactgatgatgaaagtgccgttgcttcttccccctctctcactccgtccggcttttggctttccaccgaattgctctccgtcactttccacaagggatgtctgagcaccgctttatgccatcagccggcgttcaaattggtgcacacgatgacactgaacggacagaagtcggcgatgagttggcccgtggacggcggaggaacggaaatgctgcaggcaagtgatcagtggagaacggaacgggggaggcggggaaagtgatcaaattgaggcgagagggcaatgatcaatgagtggtaagggagatggacaaatgatc

SEQ ID NO: 8724 - DNA, 3173 bp, Heterodera glycines
ttttctccgttttttctttcctttctcaactttctgtccactcataaacaataaaaatggaaagaatgagcatattttgagcattttatcccttttaaggaccgccaattgcgtcagttcgtctcccattggactgtcggtgatcccgaggatgtgtccgttgcatgtcaaattgcgggcattgatccctcctttggctttgcccgcgtgtgcgacgaaacatcggcacgacgcgtgttccaagaagcgatggtcagacggacagtgatggtgagcaaattgggggggggggagacaaaactgatcagtgtatgagtgatcagaaaaacaattgccgaccggatcgacacaatcattaattaatttaattagtcgaattattagcagagagataaaaatgataggctaatctgatggccatatgccatacaagatttcaaatattactctgccaagcattggatcatttataccgtactctttgttaccgtaccatccgcttataggggataatatgtgcatttgtaactgtccccaaaatatgaaaagcatttcgagccatttgtttgtttgccctcaacaataacaacaacaaccacctgctgctgctgatagaaggaacaaactccttccatcaaacatcttcagcagttttgggtgttgcatttcccccccccccctttccccgcctcactttccgtcattgtccccccgggggatgggtcatcatccttctcactctttgcttccccctcttctcatccccggctccttccccctctcgtctcccccttacttttctcgactcgcttccattgctctccattcattcgctccccgcggagtctcacttttctgcttttctgtcattgttcttccccggtcatccattcctcccttctcccccccccctttcctctctatttgctaataatctctcttttcctcccctttttcgtgtcttcgcatccaaaacaaaatccctttattccaccacctttcagcacaacaacaatgccaacatcgccagcatcgttcgggcgaagcggagagacggcgccgctgcgctttccccgcgcccgccgtccgcgccctctccgccgtccctcactgctgacaatgggcagcactttgctcaacaaatggtcgtggagatgcgcggccgttgcttcaatgccacgttggccgtccgagcccatctcagccgatgtccatggtgtccggatccaaatgtgcacattcacgtggacggatcagagggaagcgcccagcaggtgaggaacgggagaacgacgtgaagcagcagcagggtgatcaatgatcagttggagaaaaatcaatcgataagaagatgaggaaaagggatgatcagactgattaggcgtgatcaggaagatgaattagagagcacaaaattaagaaattatcagcagctgattcgaaaaccagagaagggagaggggcggataggtatactatcagtgatcaactgttaggtggatctgcgaccagatttttatatgtgatttttgccaccaatcacttttccttgcctaattcccccccccccccccaaagggtgccgacgggcgaggaaatgatgcccaacagcagcaacagctgaacagcgccgactcgctccttttgctgcataacattgtcattttggcactgagtggtgccgttgttttcgctttcaccggtaatttttacatttaaaattggcataattttcctttggaattttgttcattttaaggcctttgcgcagtttttgttgcccaacggcgtcatcgccaaaataaaaaacagcagaacaaaaagacgggcggagggaggagagaaagcggcgggggaaaaggcgccggaggcgtttcgtcgacgctttcgatgatgcggggaggaaggcacgagagggggaagaagcgggcgaggaagctgcttagtccgcccagggcacagcagccaatgcccatccctcagcaagacggggagagcagcagcgaacagcagcagacgatgattgtgtacgggggagcgagtcggaggattgccggaggggaggagcacgaggaggaagagaggtgggagaagcgacgacatgggcacaatgttaagggtgggggaagggataggtgcaaaaagaaggaagtgtgggacatggggaccggaaagaggggggggggataagatttgggaggagaaatatgggtgcaaaaaatgacataaaattgatgccaccggtgggtcagtggtcccgatgaaatggacagtgaaatcggagacaaattggagggtttagggggagtgggtgaggagataacatctcgaggagtgaaagacaaaaaactaattggaaattggcgttggacgggggggtgaccttgtcgaacgaattgcgcgcgttgtgacataattacgcccatttcctttcttttcgctcgttcatcccttcaatttgagggaccaattgccaactaaagacaaaaaacatttctttccattgttttgtccagcaggtacgacaccccttgggacaacaagtactgcttggtgccgcgccaatggctgttcgacggcaacggcagtacctgcggcgtggcgccgccggcaccgcttcaagcggccgacgcggcatggaaatttcggcaccctccaacgccgctgcagcgtccctcgccctacgaccattcgtcctttccatgcgacaccagcagtggcaaatacgcaacttgtgccaatttgggcagtgccgtcgccgccgcccaaacgaagtcgccgatgatgggaatgatgtgctcgcagagaacggcggcagcccacagccaacaatcgcaattttacggcacaatgccaacagctgatcagcaaaaacattcgatcggcggaagggcagcagcgatcactgctgatcagtcatcatcgttctgtgccagggcagcggtggtgccgaatcagccgccccctccgccgcccattgcgcttctgtcggtacggcacgcacagccaaaacatggcgaaaagacgacgacgacattcacttcgcccaacacttcctcctcctccgactcgacgaggcacgacgacagcggattggactccgtttaagcgatggaaaagcacagaaaaatgagtccgagtgaagcggggacggtaatccttcggaattggtg

SEQ ID NO: 8725 - DNA, 4472 bp, Heterodera glycines
  unsure (1)..(4472): unsure at all n locations
cggtaccggtactgaccggtaatgcaaaaaccggtaccggtaccaactttttccaccggtaccggtaccggtaaaaaccggtaattttccaacgtaaaaatttttggacaaaatttttcaaatacaaaatttttattcagttttcgcgcgagtgcctgttttttagcattagaattgttcagaagtatatgtatattgagggtgaccaagtttttttcaaattcaggataaagaacactaaaattcagatgtagacctcaaaattcagattattgcaaaacaagggatcagcggccaattttccaattttgcgaaggggtctccggccatgtaaattaatgtaaatcaatgaccttttttgctttcaacaccgcttttttcgcggcacgtttttctcaagacttttggggaacaaggagggncccggcggtgccgataggcgccgccgggaaaaattttgtattttttaatgcgatttgttaacagaatttgtaaaaaaagaccaattgattaatttttgggtttttaggatgcttaaaatgaaagaaaaaaagttggaatattttttttaattaaaatttcaattaaaataatggtaaagaaaatatgaagaatattctatcccagtggggaattgaacccaagcgagaaataataaaatcagaaggtttagccacttgaccacttatgcatatgaacaaatgctttaaatgaaaataaataatttaattttttttttcaaaaaatttctccttcttcaccattccctactcttttctcacccagacccccattcttaccagtgcaaatttttaccggcggtaccggtactagacaaaccggtaccggtactttgatttttgaaaaaaccggtaccggtaccggtaccaaaaaaaccggtaattaccggccagtaccggtaccggtaccggtaccgagcaactctaatttaaaatttatttacttttttcgaactctgtcctggaaagagtgaaaaatgcgttattatgctcaatatatcggaactagtgcgcagaaaaaaaggcatatgcctcaaaagtcgagctctaattattatatttttcatcttccattatcggttttaacaattttggggaggaaataagcaaatcgtaaatttcagtgcattcgggatcactaaatcagattttaacatttttgcggcacatttttccaaaaaacttggtgaatgtgcgaggggagaggtctggcggttccgataggcgctgccgggaaattttttttgaaaacttgaattagaaattagccaaatttttcataaattccctcttttagatgaaaataaagcactatcccaaatcagaacatttcttagaagtaagaacaaatagaaaccctgattaatcagaaaaaaataaattcaaaagaaaacgtcaaccggtatcgaactcataacaaaaaattgtgttagtcttggaacactaaccactaaacaacaaatatttttaaaaatatacgtaaatttactttatttactaaaaatttgtcagatggttaaaaaaattcaaaattgcataaatttttctttttatcccacgaatatgccataagggtgtatttttcaccccgcgggggtggaggtcgcgggggtctgactcgcggggacgggggtgagccaaaaaacctgtcccgtccccggggacggggcggggttcgaacccgttttcacccgaccacaaattatttttttaaagacaatgtgccaagcttttttttaaatttttctcagtgacgaaatgatcggttattgttggaactaacctataatggactgcagttaatcactatttagcattttgatttttgagaaactcattaacaatcataaacaagcacattatgcattaacagttttattcttacctcgcaaaaaaaacaattaattaattatatattataagtgcgataaggtcggcatataaaagatgacacaatgaatcagtgaattcagtgttgggcatgaaacaacacccgaaaattaatacaaaatcataaaaaggtctgacaaaaaataattaaataaaacagcaaaaaggaaaatttaaaaatatacaataataaggaagttcagttgctgaacaaagtaaaaagagagagactcacaaaaagcataagataaaaaatacccgaaaatgaaaaccaaaagaaaagaaaggaataagaaatggagtgccaataagaaaagaatgagcattggacttagccttcggcttcaagtactaagcctagcttcgcccaccccttgtcagaatgattaacaaagtgggaaattgcggccagcagactcgtaaccagagaaaaaaaggaacgagggcagagtatgcgaagatttatctgcttttgtcaaaaaataaaaataaattttcatgtgtcgttttgaaaattaggcggttaggtgccaaagaagaaaaagtaacattttgtgtttgtatcaatatttaatttttagagagatggggaaatttctaaaataaataaataaagtgcattttcacccgagggcattccccccccccccgctcaatcccctctggttacggtttgaggtaaacaatcaattcgataatcaaagctcgttgtctttagtgctcatcggtggaaatttgacaaaaggtctccgtgcaaaagtttttgcctttaaaatgctttgagccaccgcttttttggcgcgtaaggaagccatttcaggtgccatgtaagtgagcacaaattcatcggccaattcagtgaaaaaatgcttttgaaattcaatgcgaagatcgtctgaagcaaaaagagggaaattaattaaaaagaggaagccgacaagcctaattaaatggccattcaaattgattatttttgcatacgttcgatccgttccaaaattgccaagtaaaggtcaatgtttggcagaactttctggaaggaaaaggcttaaaattagcaacaataattgcaaatgcgccgaaagtgttagcttttttgaaaacctaagtgttaagaaaaaaaaactaaatttgctgaatttcctgcaatggtaaagaattgtggttcctatttaacttttttattttggactcagattcagttttcataaaatgttccaaccgcaatgtaaaagggcgaggaaaacgtttcccgttcagcaaaagcggagacccatccattgaggtcgaagtcggaggtgaaatatttgcgaaattggcgcagttcgtagaaacactcgttgatgagttcgtatatctgacaaagggagaaacccaattttaaattggttggcacagtgtttgtctgtccgtttgtccatgccaactgaccctcttcccgggaaattggcacccggacgtgtagccaggctcactcggtggttggcacttcagcagttccctcgttttttcatatttcccattcagcggtctgcccatggcaattgtttcaatgccttaaaaatgaacaaaaagcatatttttcaaattcgcaaaagtcgcataaaagaaccgaaacttactcatcgaaagcgcgggaattccgacggggaaaagttcacagagaatggccaaatggtcgtagcggggaccaaccggtgatgatcagcccctaaagagaaagtcaaataatcatagtacaaattggttgattaaatgtgcctatgatgaaaaatgccaatttgaaactgaagaatgcacctgaaaacggtcgaactccttgtagacgcgtgtcatttggttcacccatgactcgtggttgcgcacataatgcatcgggttggagtggaaacgcatcggaccgtccgcgcctttgaacgccgacgcgccccagacatttctcaaggaaacagaacatcggttagggttgtgaattttgggaaaaagatggaaagcctgattcaaaatacccctcaccaaattagtgggtaattaatttttatcattccttcccaggcatggcatacctaaacggtttcaacgccatccaatgggaaaagggcaaaaacatgtccaagtcttcggcataagaccaaaggacgggttccaacttgtcggtcatttggtagtcggccaattccttctccgtcatttggaccttaaaactgcgcaaattgggaaggcacgtccatttttaattgcattttataggaaaactgattggattttttgttaaatgtgagaatgtacaatgttaccaaccaacatgtcatgccatgccaaaatggtaacctgaaatggaaatggcaaagaaaacagtgaatgaaaatgagaaaagttacggggaatttctctttgataaacgaagcgacacggccgatgtgccaaagaattgtctgaaaataaaatacccagtatataattgagcaattagtaatgataaatggaattcaatattaattagctacgagtgaactatacatttcccccagccaatcgttcccatttttggcgtgaaacgaa

SEQ ID NO: 8726 - DNA, 1299 bp, Heterodera glycines
  unsure (1)..(1299): unsure at all n locations
ttctgcaaattataaggacggtggcggattntgggatcaatataaaaaagtttttttttcgtttttttcaaaatagcattatgagaatggctttagtttgtcaattttcggcgcaaattgcttattttttttaaattaaaaattgaaacattgttttacacctaaatagttgataatgaattagaagcttttaccctgaaaaaactattcttgattaaaaaaacaattttttttgttcgaattcgggtctggagttcggaattgggcaaacccgagttaagatccgttatcagcaccctcaaaaacgcctaaaaattggttttgagcaccaaattaaaaaaaaaatgaaaattagggacaaccattcttcaggattgccgcctggataaaaagaggacactacattaagttaaataaatggtttcattttggatttatattataggtccgtctcattttgtcttctttcttcactattaatagggctcggatttttaggtgctaaaaatccctaaataggtactaaaataggtgctaaaaaccccaaaaaaggccaaaataggtgcgaaaataggtgttaaaaattgaaaaaatctagaaataggtaaaaacctaaaaatccaactcctaactattaataatcatacacaataggcgatagataatgcattcattaaatttaaaaaatataactacctaattaaatttttctctttaaatttcatcaatatttttttaaattaatttattattttttatattcattttattatatttaatttaatattttaaattttggcgatatgatatagtcgtaaatggtcattgtcgaaacggcattgtcgaaaaggtattgtcgaaacggtcattggcgaaacggtcattgtcgaaatgtccagccaccttgcataccgattgagaaaaattttgcgcatagaataatacgtctttattttttgtttatacgttagttcaaatgctataagaaaaacaaattttcgaagactcatatcttttttctaactcatcaaattgcttagcatttgcttagaaaaagcttctccttaccaagagctttcgaatgatattaagtttgtccaatttggttggcaaaaagatccacaaacaatttccaaaaatagcaattttttttggacaaaaataaagaaaaatattcatgttgcacaacggactcgaaccaccaccctttgtccctttactatcttacaaaaaccacttcgccacacatgcaaatcttttttggtacagcagctcattttccggacgctgtgtacataa

SEQ ID NO: 8727 - DNA, 2617 bp, Heterodera glycines
  unsure (1)..(2617): unsure at all n locations
gtgtcttcgggtatagataacgcagcaaggaaaagttgaaaaatggatgtaaaaagacaatnaaatgttttaaggtgtgccgagggtgtgtatttcatgtttgactctattgcattttagccgtcaaatcgatganccatccatagtttttttaggcatagaaactaagtatagtcaatgattggacgcctaaagaacaagagactcaatttttttttttttttttgctgttctgtactcttttttttccggcacgtaatctttaaaagaatttaagccagtacaatttttataattacaatttctcattcattcccattgaattagtgttttcactattccgatatttctatttgtaaatcaattatacaaatggcgacgagtgaattccgtccgtccctccgtctccctcttttacttctgtttcgactcgtaattttccaccaacattcccatgccatgtccgcctgcagcacacgccgcgatcactgcgaaacgcccccctgaagaaaataatcaacgaaatattcaaacttcccccgccccgtccggctttacgcaccttcggcctgcagtcggttcgccgcgtgtgccaacaatcggacgccggtagcgccgaagggatggcccaatgagagagagccaccccacatattcactttttccaatggcaaaagcccaaattttgctttgcgtttcatataattcttaaaccaaaagttgatgcaaaagaaataaagaaaagtgtttgtacctgacagaaccaatcagaatcgagtgccttcaaattggccaatacttggccagcaaatgcttcgtgtatttcgaacacatcgatgtctttgattgacaatccgacctaaagggacatttcccacataatcaatcgcttgccaaaactcactttatcgagaagcttcgggatcacataggcggggccaagcagcagctgatccttggggtcttgggcgacgaacaaagtctcacgaatgaacactttcggccggtagcccttctcacgcgcaaattcttcagaagcgagcaaagctgccgatgctccatcggtgaggtaggaggagttgccagcagtgacacttccgtggggtttgatgaaggcctgaaattcggagatttttgttgtttttgtgatggttagctttgtagcagagagatccaatgactcaattaaaaaaaagtcccttggaaattacaaaaggaacccccccccatttcctcttttaattactgctttcagcttggccatttgctccatcgtagaaacacgaattccgttgtctttgttaactgtcgtccctttgtgtttcccggaggtgacaaacatcggaacctgacaatgagaaatgcgactaattgtttacaattagccgattaaaacggcgaattttgaaatttgagcatcatttttccatgtgtcagaaaatgctaaaaaaatttatttcgggttgggtggaggggctattactcgttccatccctgattccgtactcaccacgtctttcaatttgttctctctaaaagctttgtcggctaaagtatgggatcgaattgcgaactcatcctgctctctgaacaatatcgtttactttatttgttaaatgtaagccctcaccgtctggacacacaaaaagcggcagccaatcggtccccggaattgcccatcacttcgccggttgtgaattcgcttacggccggcaactcgggagagaaccaattggaggcgactgttttcaggtgcttaaatctctctccaaaacttttggccttctgcaaatcgatgagagaaagtcgaacctaaaaaggggcttcgaatgggtaagcgaaccaaataatggaacaaacctttctgttgtaacgaattggaaagtcagagagtaactcgactcctccagcgatgcccgcctttaaatagccagtggaaatcattaggctaatattttgaattgaaacgccggaagaaatacacgcgagagtgaccgtattgcaagggatctgaaagcagaaaatggaccaagtgaccattcgaaaaacatttagaaatcgaaagcacaccgaatcagggaaaccggcggtgatcgcagcctcacgggcgatattgctcgttttgcattcctgaacgacttgtccacagataatgtgtccaatttcatcaaaaggtatttttgttcgctcaaccaatgcttaaccaataagtcagaaaagtacaactaatttatttatacctttaagagcgtgtctttgaagatcaacagccaacagctcacggaaagttgtattcgattggagaaagggagtacgtacagcatcgataagcacagcattcaaatttttattgggcgatgatgcaacagcagagaatttttgctgctgaagtaaaacagaagcgagcgaaaaatgccgcgaggacgaacaattgaagttgcggaaattgcaaagcatttcttaatgtaaccccagtttcgatattttttatattaagatgcggtcgaatatctctctctcactaatttttttctgcttacaattcaattagttcataagcgggagcgggaattttgacaaaaaccgggaccggggccagaaaagtcgggaccgggac

SEQ ID NO: 8728 - DNA, 1781 bp, Heterodera glycines
taagaaatgctgtgcaatttcgacaacttcaattgttcgtcctcgcggcacttttcgctcgcttctgttttacttcagcagcaaaaattcgctgctgtttcttcaccgcccaataaaaattggaatgctgtgcttatcgaagcgatgcgtttgaagtcaaccagcatcgtccaggatgatgcaatcactgaacatggccatgatgaccacgggcatggacaccacgcagtcaattatgggccgccgattacctatgactacactcctataccatctcaaccttataaggcttgtttatttgtttcaattttttgtaatataaaatcagaaaatatgttccagagttttttgggattgctgattctaaatcaaacatccattttgattaattctaagtcactgactgaccagattccgaagtaaaatcgaaattccaaaaaactagtctcgatgatataatctgtttgatttactttgaaaatgctcgagaaaaaattcttagtgacgaaacccggaatccaacatttggccctgagacaccctttgcatatgtatgatctataatattagatttgttgctgaaatttcctttttcatcgggactcagttgtccatccaccactcaaatgaccactggtcatcttctttcactcctagatggatttgtcttaccgaacccaaatgcgaaatttgagttttgacggacccgctgttcggaataggccaaaatggatgtctgattgatgatcatcaaccctgaaaactcggaaaaaggcggtgggggaggtgggcaaaccaaagtattaaccaacaaacaaatgatttgtcgttgcatttgttttgatttcgtacatttaataaattaaattgcagaaggtctataaggaactgaagcagaaattcatcacgtatttggcgatgagcttcgtctttttcatgttttgctgttacgttggctattccactgatgtgctgggacactccgcttggaaacttccgggcagctaccgtaacagaaaagcgattaacgcgcgtttggacgcggaggaagcgaaggcaaaggccggggaaggcgagcaataggaagaaagattgtcaaattgtaggctataattttgttctaattccgagatgtattgtaatagtgcgatcattaattcgttttcgaattgtatttgtttgttgaatgcaacattggacttggtaaggttttgtggcacaaatatgttgtttttctcttcaaagtcactggaattattatttgagcgaaaaccaactcgtactgccctgactcgtaaaatttttcgacaaaaagaaatcgtaataatttttaaagtcgaaattaaacatttaactctcttaaaattctctatttccttataaaatttcaaaaatgatatgattttcatccaaacaaatacccaaacccgtattcgaacaaatagttgaaaaaccaaatcgtattttcactcaaacctacttaaacatacactcatgtcaaaagtattgcaccaaaacatgtatgcacaaataactcaatttttttatttatataaaattctcaaaaattttctgctaggctaacttttgatgctgatcaaaaaaagtcttttggaccaactttatcagatcactccttcatggtgatctgaaaagtcaaaaatggcttgaaaccggaaaaattttcgaaaaaaattcctaggggggtcgcgaaaatttttctgggaaatttaagtagcctatcagatataggacaaaattctctaccgaattgactttgg

SEQ ID NO: 8729 - DNA, 1291 bp, Heterodera glycines
cagaaaaattttcccaaccccctaggaatttttttagaaaattttcccggtttcaagccatttttgacttttcagatcaccatgaaggagtgatctgataaagtttccaagacttttttgatcagcatcaaaagttagcctagcagaaaatttttgagaattttatatcaataaaaaaattgattattcgtgcatacatgttttggtgcaataactttttttccaccaaaaaggggggggggggggtttgttgagccatgatcgattttctcgacggcaaagaaactaatcgggaaagtttttgggtattcattagtgcactatttaatgttttttttggcataaattagacatttttcacctcattcctttttgagaaaatcgttttttggtgcaatactttaacgaacagttaattagtcaacattcgaatgttaaatttgaaaaaattgaatttcgactttgttcgaattcgggacgttttcgcttttatctgatttcctcctttctccctttgttctccgttccatgtcttccttttcccaccagaacttcgaaaatcattttcattcttctgtctcaccaggggcattctttgccgatccgttcgcttagcacacaccgaggcgattaataaattcttgaataaagacaacggccgttagaaaggggcttaagttggggagggagcagttgtgaggatttttgacggattggacagccgtaaaaacggtcttcctgaaaagcaacaagtaaataacccacacccgctctcccccacaatccatcactttccctctcctcccgtcccacctgacttggatcgctcatacattccatcccaactcttcgcacattccctctcgccccctcgtcgattgatctgacaagtaatttcacactgattcatctcactttccgttgccctttttgacccccccccccctagggctttttctgcttcccttttctccctcaaatcacttcccccaatgatttgccccaacttcgttcttttgtcccttttatccgtctctctgttcagttccctttcattagctgataatcaggtcaattttggtgttaattgggcacgcaaattgtcttttggtaaatctttagaccataacagtgcatgggcaaacgatttgtcatcgtcgaagtgtgaagggactgcacgttgaactgagagagcacgacacatttgatcccgatggtggggtgggcaggggacggagggggaggcgtatgggtagaggaggaggaaacggcggaggaagggggacatgat

SEQ ID NO: 8730 - DNA, 2514 bp, Heterodera glycines
ttggttaagctagtgaagcgagtccgccatgaaatcgaattgctgccgccagtgccgctaacgcttcagtcctccattgtttcgtcccgaagaatgaagtgtgcatgagcgcacaatgaacggcaccgaccgcacaaataactccgccgaagcataccattgcacgctgcaactttcgatcggacaaggacaccccaccgatctggaaattcataaacaatttgcgcgagcatcagaaaataatcgacgtggacttcgaacatttcctcgccggaaatgctccgccgctgaaagcaaagcgttaccgtgaagtggacagacgaattttgaggattctggagcgctacaatgaggaaaaaacgcagccgcaaatcgacgatgatcaccaatatggccaaaaccaaaataaccgaaatttgattattgaaatgctcaggggaatttcaagcaattaccaaatgggtaaatgaaactttgttaattttgttaaaactttttattttttctataaatttttgaatatttcttgtcaatgtatctgtgaaaatgaaaatatagcatacagaaaacttaattaatccattttaccctataaaaaatgtttgagacgcaactggcccaagatgcaactgacccccccccccctaccatggaaaaatatgtctcgagttgcggaaatgccaaaaaagcggtttttgaaccggttcaaaactcgaaaaaatggagacggagaaattatttttcaacagaatttatttaatggaaactttttgaaattttgaaggtgtcccaaaaatgtcacgcgtcaataaaaaaattgttgcttttgttaaagaatttctgaaatttatattaaaaattcgaaatacaaaaatttttctatttttgatcagttaatcgaaaaagactgaatcaaaaatgtatgtatagtgcctgtctctaaaattagcgaaggaaaatgttttttcggtaatagtaaagctggtgcccccccccctttttttgaaaaaaatattttttgttttcaaaagaaatgaaaacaggtttcctggggttttagaggtcgctgttcaggaatccagtatccatttcgccctattccgaaccccggacccgaattcgaacaaaaagtcgaaaattcaattttttggaatcacttgttagtctaaaaatggttcaaattaccattttactgaagcagtgatgacttttagttcatttccgtgttcttaaacaaaataccaagaatttttaataagaaaaagctatggtgcatcaaagttgcaaaaaaaagcttatgggcgtgtgaaccgcaatagagtccaattttttgccatttttatacgtccgatttatttacaaaattgagaggtttttcttcataaaatttcatttgatcactgatttgaattatgatcggtcggtcattcttaaataaatcatttcttcttctgttgaccactgtttttgctgggcccaccactcattcattcattgtcagaagacggcccctttgtgatgttttgtgccgcttcttcttccacttcttctggtggcggagacaattgccttaattaagcgcaatttgaattatttaaacaaaattaaatgccttttttaattgctcacccaatgctattattgcaaatgtaaagccaaatgaacacattgtcccaattgttgtcccaattttcctctttcttctgctgttgaaccgccgcggtctccccaataattttgcatcgtttcattatccatcggttgttccatccctttgctttggccaatgtcagcttttcctttgtccattcgtttaccaattcaaacggcaccatttgcattgacggcacacgaacagaaaaatgaatttcgtaactgacggaagaaatggcattggcacggcgaaaatgctaaacaatttggaaacaaaagcactgatttgtcgaaagtatggccacacctccttgaaattgttgatccaatcagtgttcgcttgtgtgttgtaatcatcgcaacgcaatcgcttgggttggccatcttttctcggaatgtgcaaccatttgtacagaatttggccagcagaaatcgttgcatttgttccattaaaatcatcatcaattgcctcgggcaacagaccatatgaatggattgaattcaattggttgagatcagtgagaattgtcggcgaagtgagacgacgcaaatggtccaaatgatcaccaccggtaaagcccaaacagcgaatgtttgtcgaaaaaatgggccaaatttcacgaacaataatgtcccaaatccgctggccatccgtgttgtgtggtgatggaatacacaaaatataattgatgcctcttttgtcgaaaatttggtgatttaagcgaagaaagcgatgacggagtgatcgatgtaccctgaaaaaggaatgaatgcttttattgccataaatctctgattttacttacataatctgaaagcatttaaagcgaattttgctgggcagcggacaattggacaatg

SEQ ID NO: 8731 - DNA, 1136 bp, Heterodera glycines
  unsure (1)..(1136): unsure at all n locations
catatttgagaattatattggatttgaaggataattaaaaatttgtcaataaaaatttcaatttaaatcaatttccgctcttacttttcttcgactcatggccccgtacaattccaattgcatacaaactgcccccaatttcgcgtaacaatggtgaaccgctgtctccctcaaacaaaaataaatttaatgaaaaattcaaaagtaatatatacgaaaattaaagaaatgctaaaaaagtcttcgagaatatgtattttgtagaatattttataaaacaaataaatagcttacatgagacgtcttatggatggcactaaactgacagaaaaatccttgtggacacaccggagacaaatggaccaaatcctgtcgtaatatcttcgaatcgatcagctccgcgtgtgccgacatattgtctaagaaaataaaaattttaggcagaaaaaaattttagagcattcttttttaaacaaaatatttagaaaaaaataatccaaatttacttagttttgtctttccccagccgatgattgttgctgtcgttccactccgtggttatttatttggaagacaaattctgttatttgtgggccacattccaaaacatcttttagctaaacaaataaaattcatttaaattcattaatttttaaaaatttaaaactgtacttctaataaagtaatgtcatttgctgatgaagtcagtctgtagaattcgtgtcgttttatccgtgccacctcgtgaacagtcccttttgttatgtctttgctcccaacggtcacttgcatctcggatgctttgactggcaacacaaaatcgtgcatgacttcatgcctaaatgaaggaaaaggtgataattagggttaagttctatgccctaaaaagtgccaaatatgtgcataaaatataaaataaaacccctcaaaatgccctgaaaacccgaacaatacccaaatatgcagtaaaatatgccttaaaactgcaaaaatggctttaaccatcaaaaaaatgcataagcttttttagacaatttcaaaaaacttgatttttcaaatttgtatatgcaatttcgatttttttaaaatgctnaacaaaattaccattttttatatccaacaatttttttttcaaa

SEQ ID NO: 8732 - DNA, 2219 bp, Heterodera glycines
  unsure (1)..(2219): unsure at all n locations
caatggccttaaatttgaatttgaagaataattagtaaaataaattttgaaataaaataaaggagcggagaacccgaatttaatattaattttgagccagttggatcccgaacccggattgagcaaaactcaaaattaaatttcgaatctcgcatttttgggagagatttgattcacccccaccgctaaacaattaccaataaatttaattaaataataaaaaaagggtcaatggcaactcgtacgaaaatcaacttatataccagggatgtgccgaatcggaatcgtaatcgtaatcggaatcgcaattaatcggattttgggccataatcggaatcggataatcgtaatcggatttgccttgaaatccgattattacacccctaagaattgcggtgggggtcggtttagtctggccggtttagtctggccggtttagtctggccggtttagtcagagggtcgttttagtcagagggtcgttttagtctggcaagctgtttttgtcctacattgatccaattctgatttgtttctcgaaaattctttaaaattaacaccataacagatttatcaatgtgttaacaacaaaaaaataacaaaacattgaaaaatgaatacgggcatatttcataatttcgagaaataccaacgagaaaattgaagatattatcgggattagcattggcatggtaattttgatcattttggtgagcagggttaatgttgttgatggtattgtaaccctgtaagagtcgaagaattcgtatcaacggcacgatattttcgcgtttttaggagggacttcaccagcgatgcatcgtgcgatgtctgcatcaattgacttttctcatatcgaattgtgttgatgaagcggaaaacagttggataaacaagcaaaagcccgttgaatgaaaaaacgaaaaaaattagggtttactttgcctgaagctataaaaaggcggtgccaaactgaaggtttcgctttgtttttattttctaattgggatattcatttatattgtagctaaacatagatattttaagtttttccttgtttataattgacaaaaaaaacattttaagagttatgggcaaaaacagcttgccagactaaaaccgaccctctgactaaactggccagnactaaaacggcccagactaaaaaccgccagactaaactgacccagtccgtgcaagaccatcacctcatgccatgttcaacctaaatcaaatatatattaatcatttaaagaagataaagccgcaattggtaaattatcaaggtaaatggtcaattaattagttataaattactctaaaagttgggcccagcttaattccgcatggatcattgctaactatgtaaggcgcttttcgtgagtcggttgccgcatctaattattatttataacagactcacattcttcacacctataagcaccaacaaaataagcactgacaaaaagaaattcttcgtgaacattaatgaaacaaaaatctataattattattatttttataaatcatttttttaaatcccatatacaaatttattcaaaaaagatggatattaagacatgcaatttgttaggttaaaaaaatttacgaattgaataattacacttttgattgactcttgaatctgcgatggtatttgctttaattttccttttttgcccttgacctaaaaacaattagtttgatctgacaaattatgaatgactgctaaactaatatcaattccgagatacttccaaataattaattcatatttgaaattattaataaataaattaaaggaatattgtgattgtgcatagcaaatttcatttgcattggccttaaaagatgaaaaaggttaagaaaaaatttgtgtgtatgggaacaaaaatgtcattctgttaaatgttactaccaatatcaagaaaatgtcatccaaacattcattgactcatcatatatatattctcaaaaatatctaatttgtgtaataaagtgattagatattcatattcattcatttattcacgttaataaagatttagcatccgtcaatttataaaataataaaatagaaaatgtttaatttttgatgctttataattgtttaagattttatgaagcatttaaagaaagattttgcaaaattgattattaattgactgactacttaaagatcgggaaagataatttaatacaggaagttccattaaaatt

SEQ ID NO: 8733 - DNA, 972 bp, Heterodera glycines
caacccctcgggcccatttgcaacaatttaagcaaaacaaaattcaaaagttgtttggataaaatgtgattttcgttagatttttggttttccgcttttctcattatataaaaataaagtttccaccgcaattaattcttctgctatttgtgtgacatcattcggaactcgtccaaattgtgctaattgctgccaaaaatgaaccgacggtaatgaattttaaaagtcacaaattcgtcgtttatttgactaaactgtttttccatttcagttggatttgcaacgacgtttggatggacattttccccagttttgaccgtcctcaactcggcctcaaattggcacttctttcgccacgtttcaatgcgttggtggacaaacatttcaatggcaaaagcgaattggcaatttggagacgaatcgaaattcgtcgcaaggacaaaggaccagaaacgaagctgtctgtacaaattggtgacaaattggtggaatttccattgcccgaccgtccgttgcccagcaaaatccgttttaagcaccttcagattgagtaattcggaatcagagatttatggcaataaaagcattcatcccatttttaggtacattgatcactccgtcatcgcttttcttcgttcaaatcatcaaattttcgacaaaagaggcaccaatttatatttgtggattccatcaccacacaacacgaatggccaactaatttgggatgtttttgttcgtgaaatttggccaattttttcgacaaacattcgccacttgggctttaacgatggtgatcatttggacaatttgcttcgtcgcacttcgccgacaattctcactgatctcaaccaattgaattcaatctattcacatcgtctgtcgcccgctgcgattggtgatggttttgatgggccaaattcaacaatttctgctggccaagttctgtcaaaatggtgcactctccgagaacat

SEQ ID NO: 8734 - DNA, 1699 bp, Heterodera glycines
  unsure (1)..(1699): unsure at all n locations
ctgcaaaatgattggcgggtcaatggaaaagtttggcnncgcggggcattggccgttgtggcgccgattctgattcaccacaatagcaagtaaaagcacagaagctcaaaatgaatataggtacaaacatatccatccaggtgtaccccaaccattggcacttttaccctgacaatttcctacccgagaaaatggccaaacggaatgccttcgattacattccgttcagtgggggcccacggaattgcattggtaattattggataatttaaaatgaattatcattagcaaagattaaaggccagaaatttgcaatgctgcagctaaagattgtcttggcacaccttttctgccattttcgtttttctaccgaagtgccattccttcaaaatctgcctgccttagagccaatccttcgtccccaaaatgggcttcctctcaaaataatcaaaagaaggtgcgaaattattacgaacgatgaaaagcgtttggatttattgatggatgaaaagatcgaataataaatcaccagaagcgaaatccaaaataaacaccaaataaataaaaaaatgtattcattttcaattttcgatcatctttttccaatttagtatccaaaaaatctatcgaattgtttgaaatcggtggacgtgcatcagattctgataaccctttcgaccagggacgaacgaagctcggcttacaaattagcactcgaaggcgaagccgaatgagaaagtaccaaatgaaaattcgtacaaagttaatgaattttttaaagcgattgaatgtttaagtgcctttgtcacaccccaaagttttggaaaattaaaaaaaattatttaaggatttaaagtatatatttctgttggctttgtcggttcccataaattatttaatcatgtaattataaaacttaattatttgtttttttttaattaggcttcgtttggatcaaagggcgctaaaaggatttgataattacggggaatcgggtgggggggggagagtaaatgtgtggcaaccccatagatatttataccctcggtattaaaacttatgggttctgggggtggggcttttaaaaaaaatgaattttccaaaaaaatgtatcaaaatatttcctaattggccaatgatttttctttattttgttcaaatgtatttttcaactttgggaattctgaccctaaaaattgggaatcaggttgcaccaaagcttcaaaaactacaaggattattcaaaattaaaatttatttaataataaatttcctagattacataaaatatttttgcatttaattttgaattcatttattttctaaatattaataggtaaagtgcagaagaatgttctgcgatgccagaacttaaggaattatttgcagtggaaaaatgaaaattatttgttatttaattttttatatatttaaataaattgttaataaaaatttggatataaaatcgcgaaatatggccataaaatagggaccaaaaatatggacataaatttttaagaattgagagtggaatttctcaaattttcttcaaattccccaaatgtaacggttaaatatggtattaaaattaatttagaggaaaaaaaaatgtacagcttaaatttactaatttttagcgaaaaaatggaattgttattttttcaaaaataatttctttttaatattcaatacaaattca

SEQ ID NO: 8735 - DNA, 3742 bp, Heterodera glycines
  unsure (1)..(3742): unsure at all n locations
acgaactgcgctacttggaccgctgcattcngggaaagtcttagaatgttcctggcagtgccggtggtcgagcggcaactgcaaaatgatttggcggtcaatggaaaagtttggccacgcggggcattggccgttgtggcgccgattctgattcaccacaatgagcaagtaaaagcacagaagctcaaaatgaatataggtacaaacatatccatccaggtgtaccccaaccattggcactttgaccctgacaatttcctacccgagaaaatggccaaacggaatgccttcgattacattccgttcagttggggcccacggaattgcattggtaattattggataatttaaaatgaattatcattagcaaagattaaaggccagaaatttgcaatgctgcagctaaagattgtcttggcacaccttttctgccattttcatcaaaagaaggtgcgaaattattacgaacgatgaaaagcgtttggatttattgatggatgagaagatcgaataataaatcaccagaagcgaaatccaaaataaacaccaaataaataaacaaatgtattcattttcaattttcgatcatctttttccaatttagtatccaaaaaatctatcgaattgtttgaaatcggtggacgtgcatcagattctgattctgataaccctttcgaccagggacgaacgaagctcggcttacaaattagcactcgaaggcgaagccgaatgagaaagtaccaaatgaaattcgtaaaaagttaatgaattttttaaagcgattgaatgtttaagtgcctttgtcacaccccaaagttttggaaaattaaaaaaaattatttaaggatttaaagtttatatttctgttggctttgtcggttcccataaattatttaatcatgtaattataaaacttaattatttgtttttttttaattaggcttcgtttggatcaaagggcgccaaaaggatttgatataattacggggaatcgggtggggggaggagagtaaatgtgtggcaaccccatagatatttataccctcggtattaaaacttatgggttctgggggtggggcttttaaaaaaaatgaattttccaaaaaaatgtatcaaaatatttcctaattggccaatgatttttctttattttgataaataaaattcaaatgtatttttcaactttgggaattctgaccctaaaaattgggaatcaggttgcaccaaagcttcaaaaactacaaggattattcaaaattaaaatttatttaataataaatttcctagattacataaaatatttttgcatttaattttgaattcatttattttctaaatattaataggtaaagtgcagaagaatgttctgcgatgccagaacttaaggaattatttgcagtggaaaaatgaaaatgatttgttatttaattttttatatatttaaataaattgttaataaaaatttggatataaaatcgcgaaatatggccataaaatagggaccaaaaatatggacataaatttttaagaattgagagtggaatttctcaaattttcttcaaattcccaaaatgtaacggttaaatatggtattaaaattaatttagaggaaaaaaatgtacagcttaaatttactaatttttagcgaaaaaatggaattgttatttttcaaaaataatttctttttaatattaaatacaaattcattattctaaattgaaactcgtttaaatgtttaataaatagtgacaaaaatatatgctaaaaattggtaaaatccgctgtattatgcataaaatcccagaaaaatctcattaattaaaaggcatatagcaaattgctctttgctctttattttaataattgttgtaaaattatttcgtaataatttttagttttcaattttatttccaatattcaacagtaaagaccaattgaatttgttgggttttctggtgctaggacgaagtgacaaaaatatcagtgagagactttcagaggggtggcgttatttcagtacggaagaaattaatttaattaattaataatataattattgtaatctattaattatttttctgaccataattataatttcaatatattatttaatatttcccaaacaagttacagttttacgagagaaatacagtgccccaaaaaagtcttgactcaaacctgaaaaactatcttatagttcatttaaatacttgaaataattcatgcttgcacaacttttggtgctgatcaaaaaagtctcttacatcaacttgatcagatcactcctttgtagtgaacgggacacccaaaatacactgaaaatcggggaaattttcaaaatccctagggggttgggaaattttttctagagaaaatgggcaagcccactggcaagagcacaaaatttgctaccgaattgttattggaatagtggttctacgatttgtatatagaaagttatacttggttgaaaattgatcaccataaaaatgatcaatttttgatcaacgccataactttttccagaagcatctaaattaagcatacttggtatcatttgatagcccgaagtgtcctctatttgcctttaaaattctaaaaaatttggttgtggttcaaaaaagttgtggcttgtaaatttcataaattgatttggtaaacctttgtgaccacaacttttttgaaactcaacgaaattttttgaaattttacaggaaaatagagaacacttagggctaccaaaagataccaaaaatgtataattttgatggttttagaaaaagttatgatgcatgaaatttatcaagaaattacttggtcgtgtattttttgtggccgtataaactgaaatagagaacaaatatatttattattattagctattattcaattttaaattatattattaattaattaaattaatttcttccgtactgaaatgacgccacccctctgaaagtctctcactgatatttttgtcacttcggctcaccacggattttaccttatttttttaaattttgactacaaaatggcaaaaagtagtctttttttggctaaaaatggttacaattcctgtttttgctgtccggcgctgaacttttttaaataacactaaataaattttaccaaaaaaaattcttcggattcccccccccccccgtaatttttttctggctattaaaatgttgaaataattatatacatatacataaatccgattataatgatcagactttcaaaaaattttcaaaaatcaacccataaattcaaaaagaatgatttgatcagacacaaaattataaattatttgtaaaatttaaataaaaaatgaagaaactccatcaagaaaatcagttttttgatttttattaatcactatttaaaaatttttttctaaaactctgacaaaaattgatttttaaaaattacggattacggattgcggattacgggaaattacggggtttttggacccccgtaattacggattacggatttccgtaactgagaaaatcgccgtaattacggattacggatttccgtaattgcaaatccagttgcgtgcagccctgccctgaaggaatggtctgatcacctcgttgtcattaactcgtatgttcagcatgaaaagttattgcatgaattttttcatatttttcttaccctatttaaaaagttacttgtcttcgaattttgaacgtattttatgaaacagagcatatccaaattnttgtccacc

SEQ ID NO: 8736 - DNA, 4871 bp, Heterodera glycines
gtagtctccccccacctactggccgccgtagtcgagtgtgcggcggttttttagcgcaataaccaaaatgacctatttgcaccagttcactgcattacatttggtactggtgtccattttcactgggactcagttgtcccaatgctcagatggcgtcggttcgccttgattctttgatttttagacttagctcgtcaagaacgtttgaatgataccaaatttgtacgaatttgaccgttttaaaaggtcaggaaccctccttttcactcaaattttcgagttttaatccggttcaaaaaccggtttaaatgcttttccgcgcccaattttaagcttttctatcgttctcagcacctaagaaaacctataaaagtgttttagtgcgattttgagctgataccgtattcggcaattttactaaaatgaatagttgtcgaacgtggaaaaaccaactttcgaacatttgattttttctggccatttctttgaccctcaatagaattagaaactcaaaacctttatggtgttgaataaaaattattttacatcaaaagcaatataaaatgaaaacgaataagcgagataaagaaggcacagaaatttgaaatggaattcagtactttttctcgggttggcataatttgactgtttacacaatgccatcaaaatcatttgtccattcacaacggaagtgccaatgccgtaccgttcgctttgtccagcacatatttgctgaaggagcgcagaaatttgggatattcacgctaaaatggggggatttgttatttttcatgaatttttctccgaaaaaagctaaacgatggactgacgagtgagtaccttgtagatttgacgaatcccaattttgggcacccaaccgcccgggtgaactgaaaaagcagcaataaacaaaatgaatgatgttgtctccgacaaactatttaaaaattaaaataataaaaaatcacaaaaaaattattaatgttaatccgtagaaattaggggggaaatttcaccataaacatttcgtgctaatcttcgggcttggcccactttccctcccttttttccccagtaatcccccaggaaattcgccatctcaatgctatcacacaatctcggacggatttgttgatgttcgccatccgttccccatcaccccgacgccaattccatcatcacaatgccaatggcccatccccgcctcgccacttcgctgctcgccattccacccgccccaattcgttgctcgctcattggcccttgctctaatcccgcccatcttgcccacccagacgcgcgtataaaaagaaatgaggcctcaacacattatcgctttttctccggccattcgcagccaaattctcgaaatccgacgaaatctcaccattttgtttttcacccatttcatttcttttggcaaatttttccacaaaaaaccaaataaaaccaacaaaaaaatactttgcgttcattcattttccaatttttgtcacatttcacgtttgcttcacatttggccctccccttgggctttccaatttcctgtccggcggctccttcagccgcttgtacccatttcggtccccaaagtcagcacctactgctttggacccattttccttcccttttttgggttttgactgttcggcaccaggaccgagccaaaccccccccccctcggtttttccccgtatttcgcttgcccgatttctgtgtgtcccacagtttggattaagagtctggtgctctcaccgggctgagcttcccaggcacccccctgtttctcctttttttttccttttttcagtttttgggacttctaatttttgatgtcggtgattatacggcaacagcttgcctccctcctccctagcattttgtcggacatttccaatggtcctactctcgaggcattacctaatgagccctcatccctagacgctataagtgtcgccgccgaaaatttctcgcgtaaaatttcccgggccaattccctcctggaaaaatggacatttatccctggcatttctgaccgtggccataaaggaaaagttgcccacggaaatcaaagctcaactctatgataaggaaatggaggaagggggcccttggacgtccaaacaatggcgggaacgtttagcccgggtggtaaaacttaaagaggcggtccatgcaccctgggaaaacattcccattcccaccccacactcgcctcccaaacctcccctacgtctttctgagccagtcagacgagcctttccggtggtgggtgaggtaaaaaggaaaaacaccgacaaagaatgctcactttgtctccgggagggccaccaaccctcgaattgtgtggtttaccggacggtggagcagagaaaagctcgactttctgagcagggccgttgctctctttgcgcccgtaagggtcacacaagggacaattgtctgacaagggcccactgtatccgctgcggtgggaaccatcatattttggtttgcactggcccggcagaaaccccggctaagggtggcaattcggtccctttaggcccccgagcctcgttgggaagacccctccaatgggagagtcaccctcccgcctgttcttcagcatttccccctcagggaaaccaacaaaattcccaaatttcatccgcagtcgccgaaggggactttttccctcctttcaatgagtcccaccccaatggactgaaccgtccaactgcttacctgatgattaaagaaatatttgtgtttaacaataatgggccatccccggtatcagtccctgtcttttttgatcccggctcccaacctgggttcatttccactgatttggtctcactaaccggcccggaattaattactgaggagaaaatgaccgtgggaggatttttgggaaatgcctcacccaatcctatggaatttacctctccccgttttgccgtccgacttcggcgaagagatggtggctgggaaacggtagagctaaaccaaaccgccaaaattatcccgccagtcgaatttttgaaggaaatgcactgggacccatccgagagtcttaaaatgggagcaacagtaaaggaaccacaaattctgctaggaataagagaattttggaaattttttttggggagaaaggaaattctcccgggcctatttcgtgtcgataccgtattttgtcctatttttggaggagaaatggtgcattactgtattccattacccccgacccccaattttttcgcttcacccgtctgtggtgccgttgtgaaagccaaaaggcccgacgaattggtgaagcatttgtggagcttagagtcgataggaattcgggacccattggattctaacgatgatgaattagcttccgacctttttcgagactcagttaaatttaaggagggaagatatgaggttggatggccctggcgcccagggggtaaaattaaactgtccaacaactttttcctggcctactcgcggttgtcaggcctatcccaaaaattgcgttccaattcggagtttcgggaaaagtaccaagcaaccataatggagcaatttaaaaaggggataattgagcctgcagttcgtacgggtggcaacgagcattttattccccaccatgccgtcgttacccccaaaaaattgcgcatcgtttacgatgcctcggcgcatgagaaaggaaaagcatcactaaatgaaatgcttattcccgggcccaacttagtcccggaattggcgggcgttttactccgttttcggtcctccgctttccctgtcctgggggacatccaaaaagcctttttggccgtcggtcttagggatgaagaccgagaggtggccaaattcctctggctaaaggatccttccctgcccttaacccatgaaaatttagttgtttaccggttcaagcgcatagcgttcggtgtcaattcttcacccttcctcctggcttccgttcttcagcatcacttaaccttgaatggggaccccctggggatgaaacggaatttctatgttgacaatctgcttctttgtagtgaaacagctaccgaagcagccaaagccgtccacattgcacgccaagtgatgacaagggcagggatgcacctccacgaatttgtggcagccgacccaacaattttgagtgacctccccgccgaagaagttttggtgggcgatgtacaaagagttttggggctttgttggaatttggcacaggaaaaaatattttttgaatttcctgccaagagcaattttccgaccacccgacggggagtattgagcaccatcgcctctttgtttgatcccctgggattgtgcagcccttgtctcgtcaaggcaaaaatgttttttcagtcactctgggattcagccaaggggtgggattagtcaatcggaccaaaattagagaagaattgggttgccattatttctgagtgggactgccccccagtaacgtttgctcggtataccccgtgtggccaggccagccttcagctccatgtattttctgatgctggtcccaattcatttgcctccgcagtttacctgcgctcagcgcttaacggctccgttcgggtctcgctacttttcgccaagtcgcgactgagacccaaaaagttcaaaaacgatgggttcaccataccccggctggaattactgggacttattacggcaattcgtgccaaaaattttgtcgtttctaatttggatttttcgttcgaaaacatttatttttgggcggattctcagatagtcttatcctggttggccagcacggcctctcagcccattttcatcgccaatcgattggctgaaataagaaaggaaaagggcgccttttttaagttcgtgaggtctacggataa

SEQ ID NO: 8737 - DNA, 1220 bp, Heterodera glycines
  unsure (1)..(1220): unsure at all n locations
tttgaaggtccttaacatccataaaacaatatattgccaaaattntagtgcccaattttttttgcggaaatatttttaaaattttccaacaaaaaaggaattgagaggttcagaaaagaatcgggaattcaacctttcaacattcattcggtaacatgccagttaacacgcgtaacagtggcaagtggcgaataatcattttgaaatgactattttaaaaaaggccaacctgatgttaaaaaatattttttctcaatttcttttattattatcattctgttaaaggccccaggtcaaaatcgtttagctcacaagattactatcataaaataaaaataaaaattttgaaataaatcatatgaaactcgcatatgcaaaatggatataaagagatgattctctttttgcgtctacgcctttttctatgtgacgaccgcacttccgattcagaaatttgaaaaatgcattataggaagatgaaaaaattcccttgattgatgactatgaatgaaaatggaaaaataaaaagccaacaatttcttgtgaattttgaaggtccttaacatccataaacaataattctttttttacacatccgatttacttaaatgtacatatatatatacacaagtgtttgtaattttccctcatagcattcatttgatcactgatctgatgaattatgatcgatcatttctcaattaattaattcatttcttctactgatcacagttgttgttgttcttttgtccgtcactcattgtcagaagacgctcctttttcgctgctttgtcccgcttcttcttcttctgctggtggcggagacaatggtctaaataaagcgcaatttgaattatttaaacaaaaccaaatgcttttttgttgctcacccgatgcaacaattggatggccaaaagtcgatattgttacaatcggcagaattttcgtcttcccattaaaccgccgccgtctccccaattgggcatcgcttcattatccatcggctaatcccttctaattgcttgctttggtcaatatcagcttttcttgcgttcgatcgttcgctaattcaaatggcaccattgacgttggcggcgcatgaacgaaaagtatatttttggcggcaaccactccctgaatagttacagacccggggactgaagtgataaaatggctttggactgaaccgtccgtctatgcctttgatataagcggcctac

SEQ ID NO: 8738 - DNA, 3476 bp, Heterodera glycines
tattttttctcaattttcttttattaattatcattctgttaaaggcccccaggtcaaaatccgtttagctcaacaagatttctaatcataaaaataaaaataaaaaatttgaaaataaatcatatgaaactcgcatatgcaaaaggaatataaagagatgattctctttttgctttaacccttttttctatgtgacgaccgcacttccgattcagaaatttgaaaaatgcattatagaaagatgaaaaaattcccttgatggatgactatgaatggaaaatggaaaaataaaaagccaccaatttcttgtgaattttgaaggtcctaaccatccataaccaatatattgccaaaattttagtgcccaattttttttgcggaaatatttttaaaattttccaccaaaaaaggaattaagaggttcagaaaagaatcgggaatccaacctttcaacattcattcggtaacatgccagttaccactgatataagcggtttagagacaagaatgcctaaatcaattctgtgtgttttgttggagattcatgtgtttttaggcattgaacggttcagtccaaagccatgttgccacttcagtcccagggtctgtaactcttcagggagtgtattcttcactttaaccaaattttgaatttcgactttttgcacgaatttgggtccggaattcgaagttagtcaatatgaatgttggattcggtttctccgacccagaaaacccttataaacatgttttcacgactttttgaacaaaaaaattttcttccaaaaaaggggtcaccccatctatagaataccgaattttcgtgtcaatttggcagtgaatgaatacctactaaattggtacataagcgaaattttaattttgcgaattcaatgcgtaaaaggaactcaaatttttttgtgtgggaacgggtcccagcggattacccgctcaaatcgaacattaaattttacagaattccgtgtgggattaagtgaattttgaaatttttcgaaaaactcaattaatagggcataagttaattatatgaattcattaggtaattgaatttatgtgaaaccaatacatacatatttacaaaacggcatataacattgaaatcaacacacatatataaacgcgcatattacatgcatttaaggggggtacatacaataagtagcacattttcgggaaatcaaaccaccagaaacatcggacaatttcaaggaaacagcaaaaatggcgacagaagaccttaaaaacggaaatttaagcactaaaacaaagtccgaaatggcttacccatcagcgaatgagcgcaatgaagtgatcagtccagccattgctgttgtacaaataacgcaacaccatttgtgcacgactcatagggttgaaaatgccttcaatgcttgtataatcgcgagttgcaattccttgagcctcgtaaagctggcatttcctgtagcgtccatacgaactgacagtacgaccgacaaaaggacctaaaagaaaatggaatataataaaagatggcattttgtgaatgccgtgcctgcgatgatttcatacgttttgtaggtatttgttttacaatgaaagcagaaaaacatcacttgaagcgcagtgtgcttgcgctctaaaaatgaatacataataggttaatttcttcacgatgctttgctacccatttgcataacgcaaattgccaaaagtgcgggaatcgccgaagcaagtaagcgaagaaatggcattgtcaatgtgggaccaagaagcatggaacacaaacgaatgtataacaaaataaaagaaagcggagggcaaatgacatgcctaatgtgtataatgtgtcagatgaaaatgctgcatatttaaatgtaatttaacgtaaaaacataatattgagcaataaccaatgggttgcaattgtccgaaacaatctaatttaattatttgttgaaaagcttatccctctacgaatgtgaaaaaaatcagtttatttcaagtacattcagcagagaatcggttaaaaacccaattttttcgaatttagtgtccaaagtttttgactatgtttgaattagggataggagtccgaaattgatcgggatggatgctgaatctgtgatcagtaataatttttgtgaattgcgcaaatgacgaaaatttacgggctttcagttcgggaaaaaagcgcaaggataaatgaattgtattagtggaaaacattcccttttatgcggcgtttccaaattatagcgttaagaattttttctttttccttcctttttcattatatatatatacctattggctgtttcatcctaattgctgtcagtttcacgaaactcataatcattttacacttcttccctatttctgtttgacttcacttaattgcttctacatttgtttgttttcgctgctttttggtcctacattgacgctttcaattggtttttcagccaacaagtacggcattaatcggttggccagtccatgtttgaaaattcctattccgaagctgcgcaatgttttcctggcatttgcccggctcgcctttttgactttaaggtgacaaaaataagaattattattttttcttttgttttatttcaacgtttatataattttaagattttgccaacaaatccctgcgttttatttggcaaaatgcgtccccattgttcgaatctgaggaattcttacaaattgatcagaatttgcttggtgaaatactcggtcttgatcagttggtgatcaacagtgaatttgcgatttggcaagttgtaattttaaattaacatctattatttaattggtttgtttcttttgcgttaggcactccgttgggccgacgaaaaatgccgtcaaaatgccatcgaatgttccgcggagaatcggcgtgctgcgcttggcccggcacttttcaaaattcgcttccctctgatcccatcagatgcatttgtggagcaaatcggtagataatcagacgtcgtttatcaagcatattttctcttttttgcagttccttctggcgttcagttgatgagtttgtcggtgtttatcaattcaattgccatccgaatttccgtggtgtgcccggattttacactttgaattttcaactcaaattcgaattttcgactggaacgtcgccggggaaaaaattggaaattttgatcatttataagcaggttttcactgaaaattagccaatttatatgtaaaattttgaaaaattttatgggaatttaatccaattcttaggggtgtaaaagtcgcgtttcgcgccaaaaagcgaaatgcgaaacgccaaaaaatgcgaataatgcgaaaggcgaaatgcgaaaagcgaaacctaggcacatccctggtacatatgtgggtggctggacatttcgacaatgaccgtttcgccaatttaaatataataaaatgaatataaaaaataataaattaattaaaagaaatat

SEQ ID NO: 8739 - DNA, 5557 bp, Heterodera glycines
gcagaaattatcgcccgacgagaagaagaaataagacgatggcttcgtaaaaaatgcgttcaaccaatatggtatttaaaaatttgagttttttttgaatttttttaacttgggaatttctttttagcgtctgacatgatctcacttcatcggtcattgcctcaacctgcggacgacgagttcgtttaagccaaaatgaaaaattggactaaaaattttttgtatggtgtttttttgcataattttaccacctctctccgaaattttgaaatttattataatttagaaattttttggaaaaaacgcaacaaaaaatggttccttccctgaaaaaacaaaactaaaaatttttaaaatatcggaattttttggtcaaaatgggaaaattgaatgcttgaatcctaaattcccattttttgccaatttgactgatttttgggtcacaaatctaaataataagtgtccgtcaaccttggaatttttttttgaaaaattgcaaattttcttaaaaatggctcaaattttataaataatacgcattttttcgacagatgcggcaccgaaaaatacgcggacaatttgcccgacacgtcggtgatcatctgcttccacaacgaggcctggtccgtactgttgcgcaccgtgcacagtgtcattgaacggacgccggcccggctgctcaacgaggtcattctggtggacgacttctcggacatggagcacaccaagcagccgttggacgagtacatggcacagttcaaaaatgtttgtatattgggggggggggtgaaaaaatttgcaaaaaaaaaaaaaatcaaccccctctgccggggtggtcctgctggattcaggacgaaactttttttggtcgagtcgaaatttcgggttccggaaaaaaatttccaggccctacagaaaagaaaattcaaaaaaattaaaaaatttcaagtgaaaatcggctaaatttttgtttgtctcattgtcaggttcgcgtgctgcggctcgaaaaacgcgagggactcattcgggcgcggttgcgtggcgccgcggtggccaaaggccaagtgatcacctacctggactcacattgcgagtgcatggaaggtaagcgccatttttggggccatggacatgccagggatttaccaggattagcgcggtcatggttatggtattgagccaggacagcggaccctgtccaacattttcccaaggtttcgatcccttggcaaaatataggaaaattggcctcgtgcctatgttttcaagccatggacttgcttggattttccaaaaaattgcttacctccccctccatctataaaaatcaggaaattccaggttggattgaaccgttgttggaccgaatacacaaaaacgcgtccactgtcgtctgtccagtgatcgatgtgattgacgacaacacatttgagtaccattcgtccaaggcgttcttcaccaatgttggcggtacataaaaaatgtttttttttcaatttttggccctcaaaatttttaatttttcccttaaaaaatttccataaatttttgtttgtttttttcgttatgtcactcactactaatcaactgacaactccggggttcctttcttacagagataacttcagttttcgtcctttttttatctttacgattttttttttttacaattttaataatgagaaaaattatttttcaaccttttttattcctttttttaatgcggctttcttgttgtgttaacatttaatcgcattttttgctgtgtgttttaggctttgactggtcactgcagttcaattggcatccaattcctgaacgggatcgcaagaatcggcgccacattgacccggtgccatcgccgaccatggtctctaaccgagagctataaatttaaaaaaaaactaaaattattaccaattgttgtaaattgtgtgacaatttgccctggcttaactgagaacagtttgcagcttttttgtgttccttaggtattaattttacatgcttacttaacaaatttaattgccagtttcgtctataacactaagcacgtgggcgtaaaattttctaaaaaaaacctgcccaaacgggccaacccgaaaaatttttcacaaaaaaaaactcaaattaatttcgttcacaaagcccaaatcatgggacagtcctgcccttctttaaaaaaaaaattaaaatctcgaggcctaaacagcagatatttttaaatttttaattacaggccggcggtctgttctccattgaccgcgcgtacttcgaaaagttgggcacctacgacccgggcttcgacatttggggcggcgagaacttggagctgtctttcaaggtcatctcacaacacaacaaaccaataaaaatggcttttttcagatttggatgtgcggtggacgccttgaaattgtgccttggtcagcaaatgtcgaaaatttttaggaaaaaattataattttcagcgaatttttggacaattcttgaaaaaaacttactaatttgtcataaaattttgaaaaaatcgctaggaaattttacgaatgataaatctgagaaacaatgaatttttccgcgcctactaaaaattgcctaaagtaggaaaaatccgaaatgctaattaataatttataacaatgttttaatttagttcccatgttggccacattttccgcaagcgaagtccgtacaaatggcggacgggcgtaaatgtgctgaaacgcaactccattcggttggccgaagtgtggctggacgactacaagaagtactactacgagaggatcaacgaccaactggcacgttttttgaggcacaaaaaaatcataaatttttccattttatagggtcggggaagaaattttagaaattaaatataattttgctttttagaccgcttttttgcgatttgtaatcaaatttagtccaaaaatgccaaattttgagaaaatttacgagaaaaagggattttccgggaccagcggagaaaattttgcaaatttgagtgcaatataaatgtgcatcggttttatgccaattttttaataaattttaatttttgaaaattttttcagggcgattttggtgacatcaattcgcgaagggagctcagagaggtaaatgttgtttgcttttcattttataaaattttaaaaattcgatttttcagtcaaaatgaaaattggatgattaaaaaatgaaaatgcatacgaaatttaaattggacgcaaaaatgtttctgaattcatacacttgtgttgtttaaaaaagaggtaaaatcaccgattttaaatatgtaaataggtcccacagtaacgaggggttgaacctgggtaacctttgtgggtaaatccaacacacagaccaccgggacagaaatttaaatttttgaattttcgtttgaaataacccgcgtttttgccaaactgatttttttttaattgtaaatcattaaatttactaaaatttctttttttaagcgactccaatgcaaatccttcaaatggtatttgaacaacattttcccggagctgttcatccctggcgatgctgtagcgaagggcgaggtgagtcgcaatcctaaaaaaatgtgttttaaagcgtccgatttttccgaaatttacgctattttttgggcaagcctataaaaacatcaatttaaacccatccttatagaaatgcaaattccaaaaaaaaactcgaacattttcatctcttcctcttgaaaattcgggtaaattttccacggctttgcttatttttttgttaaaattttcacaaatttgacccaatatcctccaaatttgtttttgtttaaattttattgtaattacggtcttgctttcaggttaatgtactttttaagaaaattggaaaattcggactcttaaaaacaaaatttttataaataatacacgcaaatttgcttatgcttcaaccgctttttggaaatgaaaaactgtctttatctttatataatcgcaaaaaaaaattcgaataattttgatactaaaaaattccatcattaatttgtcaattaatttcaacgttatgtgagatgccaaaactttgttgatcctcctattatttttgttttcctggttctgtcggcttcaaattgcgctttctgtcgcccggtctagacatttttaagtcaaaatttagaaatttcatgtcctttttcttttctttttttctgtgaatgtttttattgctttttctctttcgatgtttccttgccattctgttggatttttaatttcaaaattataaaaagaaaatttggactttttgggtttttttaatttgtttataaaaataatgaaaaaataggtttccaaggcttttcagggtcactgttcacgaatctctgatttttttttgagttccagcggcacgaaaataaaatttaaaaaaaaattcgtcggtctttttccaaattttaattattttcaatccaaaaaatggaaaaaaattttttagggattcctactttcattcattcattcattcgttcgttcatttgtcagattgccaatggtgcgatggtgaagcatcaacggttgtgtctagactgtgcgatcaaaaagcgtgataaattgaagccggttggactgtggccatgccatggacagggtgggaaccaggtgaagttttggcatttccatggcgcccccgccttgcagattcgcaatgggtttgtgccgcgggacggctcgggcaccgcgtcctgtgtggacagcgcggtgggggaggagcaaaacaataagcccgtgattgcatacccgtgccatttacagggcggcaaccaggtgcttgcttactgtgtgtctggtcttccccattactttttggtgcaggcctccaaaaaattgttgttgtggtggtatggcaccccgaaaattgggggggggggcgacgacggcattcaatgacggtcaatcctttcttggcgaaaaaattgtggaagcattttttatgatttcaaaaatggaaaaagaaaggggtaggggcatggtggtagaaaatgtttgagttttatggctgaaggactaaacttaatccttcgtgaaattttgtgcaaaaaaattcgtgtttttaagggtacgaatttggaattaggttgttcccaccagagcagttcgtcctccaaaaaatttaaaaaaatgcgactaatccccgcccataatttcacaatttttttttatcataaaataaaattgctttttcgtatgtttaatttgtctgtccattctctctcatgtaacacttgcttttttgtgctgcttgagggtctgactgataaacaaataacagcaataacaacaacagcacagcaaaatgcacggccacaaaacgctttaataaaaattaaatttatttgtaatttttttttttttttttgccaaaacaaattaccaaattcgctgtgttaggtgcgaaacggtgggggcggttcaaaactgtgcattgactgggccaagcagaacagcagactcggtgttttccactaaaaaattttttttttgtaatttttcaacaaatttttaat

SEQ ID NO: 8740 - DNA, 4641 bp, Heterodera glycines
ctttatttgtatttaagttcgctcacagaaggatcttttgaaattgtgcattgaaaaagacgccgctcccggaacggaagataaggaaaactgaaaaaaacgagataaattgttgacatttgatgctctttttttttactgttgaaataaaccttttcttatttaaatcataatagaaagaataatttaatcatttaatttttcaccagttaatttagatttttaggaaaaatggaaacaaaaaaattcatggagactgatcctgaaaagagaaaattaagaaacaaaaaatattattttaaaaataaaaaagaaataacagaagaaaaaaatttcatcgaaatatcaaacacaattaaacaaaataaaaaatttggcataaatgaaaatacaattcgatttattttaaaagaatccaatccagaggattttaaaaatctattaaaaaatttaattaaaaaaggttgttcaaaaaaagaaaaaggctggcatttggaaaaaatttcatttgatatctatagcgaatcgtttcgagacccgatcatcataccaccacgtggggttaagcaaaatactgtaaatgttgtatttgaagaatttatgcggttgtgtcgcgaatgcgacgaggggaatgatcaaattcgaaagagatcaaattgggcattttccttttgcgttcccccccccccccctttgtttcttatttctctccttttctccttccacattttgttaaccgatcctttgttccccctttttcccttttttattttgtcacttttcactctgcctcatgtttttgtaattggactttaacccccccccccccccccggggggcaagttgtccaaacatccccttttttaacactttttctctttgtctctccccgtccttctcctgcgttttttcgcctctctccttttattcaaatgtgccgtcgcctttctcagcttttttcctcccccttcttctttcttctttgtctccctttggccaatttttgttcacatctgcaaatcgttttttccattttcctatggtacttctgtcgcccgccccctctgtgtctgtttacttaagccttgggctccccccatacacacacacattatataatcactgctcctcttctccccaattttccatcttcaatgccgattgcattaaccccctcggcctttcttctcgtgtcaaataaattgttgttggtcgaagtgttggttggatcagggacggtagagacgggaggaacacacccccctctcgtcactcacaccgcgagaacggcactccgtctgccccccccccccctctcctctcgcctcgccactctctcgccttcagcgtcgccgcccagcgtggcgagtcttgtcgtcctcttcaattgacccaatccctcccccagtttgtcgcccctttctcgacaggttgcagcaaagttataaagagattaatttactaaatgaagaaatagcgttgataatcactacttattcagttccggttggaggtaatcgaatataaattttgttttaaaaatatttttaggtcaatttcaaccgttagatttctttcctccaaaagaaaatggacggcttttagtaaagaataaaacaaataaatattgtctattttatagtgtaatattgagccaattgtatcaattgattaatagtgacggatcggatagaattacatataaacaattcacattaatatatcaaaatgaaaaaagacaacaaaaaatggttgatgaattaatatctagtacaaagattgacacaaacaaaaactcttatggaattgaggatttaatcgtaattcaaaattattttgatactaaattcccgaatagattcttaattgtggctttttctaaggtaaaataaataaattaattttttaatgaatttttttaggaacatgggttaaaaccaatttttaaaggacaaggccatagagaacatttgatatgcgtctttaacgaaaacggacattgggatggtaaaaaaaattatttttaaaataatcaaaaattttaggtttaaaaagcatcaaacaattttttaatgttaaatataagtattgtgtttattgtgaacaaactttccaaagcacaactaaacattcaattaaatgcatcataaaatgcagccgatgtggatcgtggggtaaaatattcaaattaaattcatctatttgaaaatttaggaaatgagtttccgtgtaaaaatagtctaatgaaaccagaagaatgtaataaatgcaaccgtctgttttataataaaaaatgttttcaattacacttggcccgtgcatgcaaattatataataggtgtattaaatgtgacaaagaatatcagaccgatcacacccatgtttgcggtaaagttgcccgaaatttatgtactttaatgttattcaggtgaaaaaatatgcaaagtatgcaaaactaaacatacgaagacggaaagttgttatatcagaaagattaaagtaccaaataaattgccgaaatatagaattatatgctatgatgtagaatgcagcgtaagtaattgacgataaattttaaaaattttatatttagacagataataggattaaagaaggaaaatattttggattttatgagcataaaattaattttatttctgcaagatacacgtgcagcatgtgtgaaggagtaaacattaattgccaaatatgcgggccaaaagggaaccgacataaaaaatggtgtacaaatgaaacccaaaaacctatgattgaatttttaaaatgggtattgtcattcaaacaatttaacacctattgttatgcgcattatgcaggtaaaagcaaaaaaactatgcgttttaatctataattttaagggagatatgatgcccatttcgttttaaaagaactaacaaatttgggatatgcaccacaacttattatttctgatttaaaaatttatcagattaaaattgataaaatttatttcagagatttttggctactttcacaaataaaattagcagatttgcctaaaacttttggcatgaattgtgcacctaaattatattttccttataaatataattctgaaaagaattatggtatgtttgcaacaaaaaaactctaaatttagaaaaatataaagaatttttataggtaaaattctcccaaatttgccaaacatcgctgattattatccagaaaaatttaataatattgagttcgaaaaatttaataagtggtattcagaaaattatacaaccccctttttattaggtatcatgttattaattttttattaattttaaatttagaagaacagttggaaatttattgtggtcaggacactgagattttactccaagctgtcttgcatatgcgaaggatttttttggaaatcacaacagataatgaatcacctaatggttttgatattataaaggtataataattttaaaaaaattaaaaattattatttattaggatgtgactaccatcgctggagctgcgatgcgtatatttagggctaaatttttaaaagaattacatttgccgatagtccctgaaaatgggtttgaaaaacgtgatactcaaagtgtgatagcgactaagtattttgaatggtttatgtataaaaatgccgtcaaaggtcggcatgctggaaatgggggagaaattgaaattagcggtactttgaagcatgctatgaaaataaaaaatatatttagggtttaaagtagattttatatgtgctaaattaaaaacaatcatagagttccaggtaggcaatgaaccctctctattctttttaacaaaaattttagggatgcgcatttcacggtcgttatttcggaaaaattttttttataaaatataaattttaggttgcccaaaatgctttaaatcattccatgtttgtcccaatggaaatacggctgaggaaaattttttgaagacgggaaacagaatgcaaaagttaagaaaagttgcattagaatataaattaaaagtcgaagaagtttgggtaattttttcttctatttttttatagaatttattttaaggaatgtgagattaaaataaaattgaaccctaaaaataaatcttatgataaagaaatgaagaatttttttgacaattgccctgattaaggtattaaaaatatattaaacttttactagaaaaatttagggccaattgacccccgtcaagctttttccggtggccgaacgcaggctttttgtttatattcggaaatagatgaaaaaagtgaaataaatatcgcagatatcatatcactttatcccgcagtatgaaataaatattttaaagaaagaaaacgattttaggttaattattttactccctaccccgttaaaacgccaaaaataatcatcccaaaatcacacgacgttttgtgggcactcccggacgatataccatataacggtaaaaaaaagaagtaattaatagtaaaatgaactttttaaaattatttaggtattctaaaagtaagaattatcccaaaaaaagatttatcacttcctctgcttccttattatacggtcagaaataattaaacaacaataatttcggtgacaaattaaggattcaattttattttttactaattgt

SEQ ID NO: 8741 - DNA, 2897 bp, Heterodera glycines
  unsure (1)..(2897): unsure at all n locations
ttaaagtagattttatatctgctaaattaaaaaccaatcataggagttcaggtaggcaatcaacccttctctattctttaacnaaaaattntnagggatgcgcatttcacggtcgttatttcggaaaaaattttttttataaaatataaattttaggttgcccaaaatgctttaaatcattccatgtttgtcccaatggaaatacggctgaggaaaattttttgaagacgggaaacagaatgcaaaagttaagaaaagttgcattagaatataaattaaaagtcgaagaagtttgggtaattttttcttctatttttttatacaatttattttaaggaatgtgagattaaaataaaattgaaccctaaaaataaatcttatgataaagaaatgaaaaatttttttgacaattgccctgataaaggtattaaaaaatatattaaacttttactagaaaaatttagggccaattgacccccgtcaagctttttccggtggccgaacgcaggctttttgtttatattcggaaatagattaaaaaagtgaaataaatatcgcagatatcatatcactttatcccgcagtatgaaataaattttttaaagaaagaaaacgattttaggttaattattttactccctaccccgttaaaacgccaaaaataatcatcccaaaatcacacgacgttttgtgggcactcccggacgatataccatataacggtaaaaaaaagaagtaattaatagtaaaatgaactttttaaaattatttaggtattctaaaagtaagaattatcccaaaaaaagatttatcacttcctctgcttccttattatacggtcagaaataattaaacaacaataatttttaataacaattaaggattcaattttattttttactaattgtgcaaaatgttgtaaacaagcaaagccaaattttacttttgcaaagaatgtaagaaaatgcaaacatactgatgaagagcgcagtttatatggggtttatacgagcattgaattaaaaaaaggttaaaagaaaggtagttaaaaaaaattatttttattttagcattagaactcggatatgtgatcgataaattttaccggtaaatccctgaagaattattaactattaaaataatcttagagcttatcactttgaagaatttgattccgacctatttaaaggatatgtacgaaaatttctcaagataaaggtaaacagacagacctattttcatattaaaaaataaaatataggtcgaggcatccggttggccttctaatctccataataatgagcaaaaaaaatcattttatacaagaatacaaacgtatttttgatattgaaattaatcctgataatatgtatttgaacccaggattaaggttcatcgcaaaattggtaaataatttgaaattttctttaaaaaaaacgaaataatttagctattgaattctttgtggggtaaattcgggtgagcatcatttaattattattataagatttttttaagaatgagaaataaattgtcaaaaaataaaataatcaataaaccgtcggaattttttgaaatgttttatgatcataaaatagaaatgtcaaagcctataataatgaacaatgacacaataagagtaatatacagagagaaagatggttatattaaagaacatagtgtatcaaatattatcatcgcattatggtaaacaaatcggtattataaagtaataaatttattaaggactacttcgcaagcaagaattcatctttatgggtggttgcaacaagttactaatgataaacaaaataagctactatattctgataccggttaaaaaaaactaagttcaacttaaagtgttatttttttagatagtgtcatttacaaacatcccatgggcaaaactcctatagaatttggcgaattccttgggtaatttcaagcatttttttaaatataattttttagtcaaatgtcacatgaaaatgctggaaatagtgtattagaatttgtatcaggtggcagtaagcaatattcaattaagtataggaatgacaagaatggtcaaatatggtataaaacgaaaattcgcggtaaaatatgttatgttttcttgtttaattgtgctttctttagggataacttttaataagaagaaccaaattgatcatgatgaatttaaaaacatgattataaattatgaaaataataaaaaattaattttcgattatgacaagtttggaccaacaagagaaagttatattttatcaagaaatttacgaaaagaatataaacccattcaaaaaaaaggcattattggaaacaattttgaaattattccatttggtttatggtgaactaagtataacggtacgttattaaaaaataatagtaataaaaattaattttataaaaaaatgtttattattttatttaggtaatgatgtgccaagattatgaattttggaatgatcgcactaatgaactcatttttggaatgattttgctaataatttttttaagtttattaatagttttggtagttgcaataattgcccaatgttttaacaatttttttcgtgctgcaaacatgtaacatggaaagacaaaatttgacgaataaaatataaaatatttgtgatttttttaaaactgtctcaaaaacagtttatcatattttttttgaaatcataatatttttatttgtgtttcagctaataaaaaagaaaatgccgtcgaattttattaagtatcagagttttttgagtggaaataaaaatgaagtattgacaattaaagaattgattgattgccgtttaaaagtttgtgaaaaaaaatattataccattaaggcagatataaaagatttaaaaataaataaatacaaggtt

SEQ ID NO: 8742 - DNA, 4271 bp, Heterodera glycines
aggcggaaaaagatgaccatttcgaagtgaaaataacccttaacgatgggagaagcggcggagaggagacggagagcaccgccagcagaaggtggagggggagggagcccaaggcgacttcttcctccaattgggcccattccgcgtgccgattcgcatttatgccgacactcaggtgcaattagctgggatttcggcacataaaattcacttaaacgacgcgttttattcttcatctattttccttccctgcagctccaatttgtcactccctcactgatcaaattccgcgccgcttttcttgacggagtgccaaactctgagggaatgcttttggaggaacattttttgcgcgtttccatcccaccgaatgtgccattggacatcgctcaggcagagtttcgcctcgtccaaaagagcccatctctggcgctgttcaaccgacgcattgggcagcctatttcgagtggctttagccatggccaactgtcggccggagacattgcgatggtggcgatgggccaaagagcagtggaagaggaggtaaagcacaacaaaacagcaccatggacattgtgaattaccctcaaaaatattttggcatttgaatttgccaatccatggcttaaaagaacgccacttttggattcttccccaaagctcgactttgatttggtttcaattaattggctgttaatttcttaattcaaagattgtaaaaataaaactccgcgtgtgcattgaaccaccttctcacagtgcgaaatgcagcagaaccgccgaccttcgaattcattttggccgagacgaagcacagggtgagtacggtatacttacctgtaaaaatgatattttctgtcctttttttgcagtgccaacaattgtccacaatgttccattgaaggtacaaaagggacaaaaaagtgtgccaatcactgcagatcatctccaagctacggtaacggtcactgtgtcccacttcctacggtaattgtgcttgaaactgttcagcacccttcaaaaatgccgagtgaactccattttatggtatggcaacaacagggcggcgcacttcaaaagggactgaacacgaccatggacactttcacgcaaaaggaattggaccacggctttgtccgctttgaaattgacgaggcgaagggcgtgccggtaagtcaaagaattgctttttgccagggccaaaatcaacatcgacttttataggacacgaaaatgggcttccattttctgttaaacgacggtcgccatcaattggaccccgaatttttcttgttgcaatttgacgaaatattgccaagcaaaaaagaggacggcacaatgccaactcagtcgacattgagcagtacaccgacaattcatttgcctgtgccaagtgtcgcaattgggccaaaaattgaacgaaacgccaaactcggcactgcgccgggtgtccctgcggtgatcggtcctaatttgctgaaggcgaccggcggagggaaaataccggtcgaaaaagtcattttccacctgacaaagcagccaatgcacggccgactggtgaatggctttccgagaactgctcgggactgttgtccgcttctgttcagctgctcaacggctccctggggcggttggagcggttcagtcaggcggacatcgacgcgggtcggctgacgtacgtggcgaggccggacattggcgcgtggagccaacgcgacaatttccaatttaaagtggaggaggaggcggaaaacggcatcggaaggaatgcggggacgagcggagaggggacaacggcacaacgattcagaattgagagcagctactcaaacttggccgaaggggcgccaatcgacgcactgataccccggggaataatcaccgttagcagaggtaatgggatggccaaatgggagagacaatggcaattgtggccaagggaggagggatttggacgaaaggggagaccatgccaagggagagattttgattatgattctgttggtcaaatcgtagtccagaaatggctattgagtttagccaacccccggcacaattcgttgccctccgttccgttttatcactccgcccctatttatttatgtcaattattttttttatttaaatttccaatttttcttttcggtggttccgttgcactgaactcctcccatttgaatctgaccaaactgtccgccgttattgaggacgaaattttcataaagctttttcgcgcgcccgcctttggatggttggagagaattgacgaagcattggcaattgaaagcggcggaggaacgaattttggcggattagcaaacggagagaatgcgggagaagaagaggaggaggaagaggagaagcaaaatggggacaaagtgagaaaagggagttggtggagaggaaaaggaaaaggaaattcaaaatgaaaacggaaaatttaaaaaaatggaaaattaaaatcaaatgggaaaaatttaaaaatggaaaacggaaaattaaaaacggaaagagttcaaattgccctaggccatctttccccagtggcgttcgcccctttcggccgaacaatttgcctctggccactttttggtgttccaccaaaacggaacgacaacaaatgtagcagcagcagcagaaaaagcgggaaatgaagacgcatttacgctggttgtgtacagcggaagggagccaaaccaaagactgaaattggggatgaaagtgcgaataacggacgaaggcactgatcagttgaaggtaaaatagaaaaggcactgatcagttaagaataactgtaaaaagctctgattatttgagggtaaacgataaaaagcactgataagttgaagagtaggcgagcattgatcaggtaatagaggcactgatcactggtcagttaagggttagctagctataaaagggccgatttgtggtgatcaaccgaatattaaaattcaaaattggaaggaaaactcggcctaaattctctgtccatctgtccccagtttatttctaacatttcactctcgataattaattccgtattcattcagatcgactcttttgtgccccacttgcgtttgctgtccggtggttcggtccccttttatcctgccgattttcacgcgttccatccgtcgttgggtccctcccaaattgtctatcgaattgaccaattgcccaacactctccgccttagtctgaacaatttcagtgagtcatatttatccaaaatattcaaatcaaatcaacacatttggacactttcgaaggtttgccgctgttccgacaattcactcaattggacattgaccagggaacggtggcgttggaacacacgccgagcagcgaaatggccaaatgggacttaatcggacttcgaattgggatggaggggcacgaagacggacacggacagcagcagaagggtgggatcagcaacagcaattggggaaacggattttagaaatataaaaatgaggtgtgggggatactgtacaatataggagatgatcaaaacggaggattgggagaaaaatgaaaaaggggagaattattgttgggggggggggtttcccatcaaattgggacaaagctgacatcctctttcttcagcttctcctcagtttgtccactcgcgcgttttggccattcgcatcgacccaatggcacttcacttgcgaaatcatagcgaaattgcaattccccagggcaaaacatacgttctgttgagcaggtgccgaattaagtctaatccggaccgggtcagtttagtacggccggtttagtacggccgttttagtacggccggtttagtacgaggggtcggtttagtacgagggtcagtttagtacggcaagctgtttttgtccaaaatagattctactgattttttccgaaaaaatgtttaaaattaataacataacataccgtatttgctctttttatatgccatggtatattatttttcaacctcctcagaaaggggtagataattggagaccggcagattaatggagactggcacataaaaagagcaaatacggtatttatcaatgtgttaacaacaaaaaaaataacaagcattgaaaaattacgggcgcatttcataattgcgagaaacaccaacgagcaaatgattgatgttatcgggattaacattgacattggcatggtaattgtggtcattttggatagccgggttattgttgatggtattgtattcctgcaaaagtcgaagaattctcgcatcggcggcacgatatttgggc

SEQ ID NO: 8743 - DNA, 919 bp, Heterodera glycines
catcgacacaaaacggtcgacgttttggggtggacaaggcgatcaacgaacttcggatgggatttgctaatgtcgggggcgcaaatttgttggagtcgacggtatacgcgacaattaacagcaacagaagacagcaacagcagcagcagatgatgaacagtgctaatgccaacaataaaatgtaaaggggcaataaagcgcttaattaagaccaattaggaaatgcgcaaacgccagtgcgattgccaacatttgatttaatgaaattaaagcggaaattagccgcataataataccaattaggaggaggataaaatatgtaattcatcccaatttatgaatatgttttttaaatgattaatattttcttttgttcagcatcagcagcagctcttcttcgcctcagaatgtgcagtcgaatgtcatgaacactttgggtgatgttaattatgccttttccgccccggggagtgcccttttggcccgtcgtccgtccattttgcctttgtcgttggcccccacaacaacggcaccctcctccgtcagtgccatcattccgacttttcacgtttcgacggggcggcaaagttcgccgacgcgtcgggtgattccaacgatcgcattgccaccgccgtcgaggcaatcaatgccaaattgaggagcaattaacatatttttaaacactttttgaaggagtaattctcgcgaaaggcaacaaattttggcgtccgccgcggcagcggcgatcgcatcgaaaactgtgctgagcgggacggaaacggtggcgatgaggcggaaaagtttggagccggagagagcgcagcggaggggcagcagcgaagaaaaccgaacggaagcgggggaagcggaaaagagcaacgaattttgggtgtgaagcgacgacagacatttgaccaaa

SEQ ID NO: 8744 - DNA, 6998 bp, Heterodera glycines
  unsure (1)..(6998): unsure at all n locations
ttaaacaaccgtaagaattgactaaataataagaatgccaggtttccatataaaaactttttaattttcaagaacatagaaatttttgagcacaagggttgttaaatttactaaattttaatgatttatataacattttatatatttatattgttttatttttttgaaatccctccctctggtgcccaaacttcccggtgcccaaatttctggtgcccaaacttcctggtgcccaaacttcccggtgcccaaacttcatgtcgccgttgtcacatattttgccatttgtgggtttttagcacataaaaatccgagatctaattatgattgtgaggtaaattgatttgtgcttctaaaacgatttaaattttttacgaaataacttttgtacacagccgacggaataacaaaaatttggcgatgtgttttatatttgaatttgaacgttctgagaaaacaaaaaaggcaaatgagctcgaagcgggtcagttccgtctggccagttccgtctggccagttccgtcttagtagtaaaagagccggttccgtctcaaatatttttggacccaaatttttttaaatttcagaatgtgaacagaaagttgagatataattaacagtgctgccaaaaatatgcacgaaaagtagccaaaatatgcaaatatgcacaaaaatctcaaaatatgcaaataaaaataccgatttttatacgcaaacacaaaaaaagaacgtgtttttcctattatttatagcatggaaaaggcaggaaaaaatacatttgcatgtttttggcagctctgatatttaatatgcctaatatttttgggtgttaaaactaaaaactgccaaaatatttagggtttcggttctaaaaacctcaaaataggtgttaaagtttcaatttaggggtataaaataacaaaatttttgaggaaatttttcatttctcaggggtgtatttttgaaaattagacgaaatttatgtaaattaatctttatattcgggttcggggtccaaaatgggtgccggatttgctgcaaacaaagtgctggacacattaaggctgctaaatttctcgacacgaggaccaagactgagaatcccgagcagaattactggacatttgcaatgttaaattcatttcaaaaaatttttattttcgaatatacttttaattaaccacaacttttaaaaaaccaggtatatttaggctgcggtaggctgcgaagtaaaagaatttttactttttttctaaattagttattgattttaaaaaatttgagtccaaaaatatttgagacggaaccggccctttgagtactaagacggaactggcgagacggaactggccagacggaactggccagacggaactgacccctactgaatgagctaaaacgaataaaatatttcatctttatttttattttaaattggcacaatgtcaatatttttcataaaaaattcttattcataagctcattttgttattataaaaaaaccaatcattagggggtgtaaaaaagtctcggtctcgagtctcgaaaaccgagacagagacttaaaaacccgagacttttctcgagtcgagaccgagagtctcgagcagcactagcgcttggcacaacaaaatagtaaagaacaaaatatttattcaaagtaaataaaggggaatgaagtgatgaagtctgaggattcacaactcataaactaacagataaattaaaaaaacataaaaagcaatgcatttttctaccgatgtaccaaatatggtgaagagatatgtatagaaaggttatatatagaagaagtccttaccagggatggcattccgaaccccaaaatttttttactatttgtggatttttgggctaaaatttaaaaaaaaatctgattcggtgccgatggttgtttggagaaggaaaaatctgaaatttgtctcaatttcttaacatacataaccaaagtcagaactcgaactaatagtggagctttcaaaaatcataagaaacatttctacacctaaaataccgatagatcatcagccattccatccaaatctattcctttggtgtgaaagtgagttaaataatgccaacttcttcttttaaattacgtcgtcattttttcaatcattttcactttaaatttattttttatttggtcaatttcaattagcggaaattaacaagaaaatgagaacatgtttaagtgttaattgaataaaaaatttaaaaaacggaaacaaaatggaaaaaagtcattagtttatcaaaatggtaacaactgatcattattattcctcaacagaaagagcggaacgttcaaatttgaaattgggcccaaagtttgcctcaatttcgtctgtaaattccttcagagaaacaaatggaaacaaattatcaaaatcagcagaaaagtccgagtccaaagtgtatttgaattcttaaaatatttataaaaattcaattttttatttttctaacccaaaagatngtccatttttcgtgaaaaatatttgacgagtgccaaagtcaatgccaattccaaacaacatcacccacgtgcaaaatgtttggcaaaaatttctgctttttccccgtcgtctatgatagttttgttttcataaagaattaatggggtttcccatctttgaaaatctttttcgatatatttgtaaatatttttgggatttttgtcaagaaattttttttcttcgcgctcctgaaattttctaatctgaatttttatgtgtaggctaattgaattatataaagatttgtatttattcgggttttctttgagctttttccagatttttgctttttcctttatagaagcttggagtgaaataggataattaacattttttggttcctttttgaaggttatttttggtgaaaataaatccattgcatcaatggattctttagtgaacctgttatatttatgctctaagtcaaactcggattgcaatgagtcatttagatggaagcttaagaaggaatttatttgatgaatattttttgggtcaaattttctatagcttattactggtggattagttttctgtaaggaaatagatagatttatgaagagagattcatggtctgaatttattagactgtctttaatttcaacctctgttaccagcctggcatcatttgtcaagcaaagatcaaggatttcatttcctcgggtgggcccggtacaatgcatacttagaaaattttttgtgaagaaatttacaaagtgttgtccaatttttgaaagtggggttggttttccattatcccattttatacatttgctattcaaattaaaatcccctaagattaatgtcggtccattgattttttgatccaaataagaaaaaaagttttttgtgttcgatagattaattgttgggggcctgtaggccccaattattgaaaagtttttcaaatttttaaagcgtaatacaacaatttcacaaccgaatttggaatccgttgttgagtcgaagggtgtcgtcaaggcgtgagcctaaattcatattaataaaaaaaataatgaaaacgaaaattgttttataaccttcagcaagttgaattgttttgaagaaacagcgaacggcattcaatgcgtaaacagtgatcagttggtgacttttgagaggcgattgaattgtgctgatttgttgtgctggcattgttggaggtgcaattccctgaagaaaatagcaaatagaatgatgacattttatttattattttttattaaaattcaatcgtatcaaataataataattttttccgtccgattcacttgtgctgttgtgtacaatgttggcatatttgcggaggtgaacagctgttcagcacccattgccgtcgactgactcgctgaggcagccaaaacggcactggctggcgaaattgtgacggaacgctgttgccggtcggccattatcatgttgtaatatgttgttgccagacgatgccaagcctattaaatgaaaaaataaaggaaaagcacaaatgcaagcagcacaacaccttgtaccagttggggtcaaagttggtcgcgttgatgtaacattgaagaatcagtttctttgctcccgactggtccatcccagtgaaataagttccaattggagagggcgtgaacatagcagtcgggtgttgctgaactgtggcggaccaagcaaaaagctgaaaatttaatggaaacattaatttagagcaacatattcgtatttaatatatttatacgattgtaattttgctttttacagctcacctgcttgtgttgttgttcaatttgagcagtagaaagtgcggcagaaggagcacccgagtgaaggctgatagagccgtgacgacccgcgatcggtggtgtgctagtcgagactgcaattgaaaaacacatgctcgagtcttaggttgtcaacaattctttgttttatgattgggaaattaatgttgatcagaaacaaacccagcggcgattggatggcggtgattgagtcgtgccattcacccaacttaaggtagcatttcgcggtcagtcttgcgtgtggttcaagctgttcgcgggtgagcattgtgcgattgcgctcaatacatcgatgcaaagtctaaaggaatagacgaaatgaaaaaaaaatcgtccgtttttgcctgcgtgagctgttccaattgaactaaagccgttcgacggtggctgtcaacccataattgtttgcaaagtgccagtgccaactgtgttttctctaatggcaatgggattggcactttctccaacggagtgtccggcggcacttccaacaaagaacggatgacattgcgagatacggtcacctgcctcccctcataacgacaaagtgccgcaaattttatccaaagagggcgcaactcagtttgagaaaagacgatcgacctggttaaacccaaatccaagtgagtttaagcattttgtttttcctacctgaccatcaaaatgcgcctccaatgttcaacatttcgtctgcatccttgcaaccgtcggctccacaaaagagcgatacgcatttcgcgctcggggatcattttgtactcgatggcctcctcgagctcggtcagttcttgcagcaaaaccattgctccgtaagcgcgctcataactctctgctgccattgcggtcaattccgagtcaaacatatctctgaccttttgtatttgtgagataaattattatgaacttgaaattaaattggtttttttgaacttgaatttagatcttgatgggtctttaaaaattcgctatttttcataatttgtttaaaaaatcaccttatttatgcaggagtatgccttgtcgaagtcgttgttatgcacagcaaggacagcgcggagaaaggcgccgtcgcggttgttctcattgattttgtcaacataatcttccattttcttgaaatttcctgcaaaattttttttttccaattcctgggggcttcaaaaaagtaccgactgcccaacagccccgggctcctatcgtcgcaattttctgtcgctttgccacttcgcttagcgttgcgttcagaaattcggcggcgactgcgtccaccaacggtgtcggttgcctgagggcgtgtagttgagggagtcgggctccgcttctcctgctcgaccgtttccgtaacaattgtcgctgcggctgctgcttctctgtggcgatgttgaagttggggttgtactggttgctttcctcctcggcgagtgctgtctcacaaatgcggtccaactgactccactgaccgagcgcctccaaacagcgcatttggtgcagcaaaagatcggagcgagaagactaaatagtcaggagaatgcttgaaaaataacataaaatccgtgtgtttgtactccgttttgttgctgcggtgtcgcaattcgattcgtggaagcactggcggaaacggcggcatcatcaccgagtcctgcgtttgcagtgggtttggactggtccaactcctctctgttagtcgggagcaattggggttcactgtgtgacgaaatagatttccatgatagttgttcgtcgggcaaggtggtcatgtcgttctgatacatctccaacgccttttcccattcgcctaatttttcgtaccaacgaccctaaaaacagttgaatcggtgagcaacgaaaaaaggcattaaaactcatgttgagaaaagaaagtcacgacttaccgatatttccatgttgtgacgtttggcatactgaacaatgccggcggcgccttcttccagatttaatttgttgaatagcattatcatcgtttgacagtcatccgcgttcggttctccgttgccgcgggtgctcaaaatttccatttctttgtaacgcagtgcttttgcgtatgcacgtgtcttctccgccgattcgctgagcattcgatgtttaattggaagaggtcccttaaagaataaacaaacaaaaaaaaattttttttttactgcgctttgtttattgccttctcagaatggtccatgaattcggccaaattcagtatggtctgaatgggttcggcatgggggcagtgcctcaacacatcgatcagctgattggtcagttcgttctgttcccgctccggcagttcagtccaaacggacataaaagcggcattgaataattccctgtaaattatttcattaaaaatagaaaagtaaggggaaaaagaacggactttgagagtgattcgcacatttcggccaacacagcgcaggcgcgaagtgcggacgacggactctgacggatgaattggttgcgcaaagtgccaacccactgaagccaatcctcacgcgagagcagtggttggaccgtccaaaagcgacgcaattggtccaaattgatggccaagcgggaaagatcacggcctanaacccctgaccatacgtcccggcattttcctgttcgccttacccgaagacattctgtgcactcgagacatgtccgcactgcttcccgcgggccc

SEQ ID NO: 8745 - DNA, 1984 bp, Heterodera glycines
attagagaccgagatttccaaattctccggaccggaccggactggtatttaaaaaatgaccggatcccggatccggtctctcataatccggtcaatccggtaatccggtcaatccggattttcatattgccggatccggaaccggattccggattggtaaacatttaattttcatgtgttaatttgggaaaaaacccgcaaaattttcatcaattatatgtacaaatactaaatattataagtttaataaaatgaacaaataaatggtttcgataattgtaatttatctgggggagagacttgttcaaaaaaataagttgttctgccgttttgggtgataatttggaacggcgataatcaaaaacatcacgggcgactttgaatgtttgttcacttgggacactggtggcaggtgctgaaagatattttcctgcaaatttggcaaggattataaatcgcggagcaattttcttccattcgtccaacggattcgcttctgggtttgcaatttccagcgcgagaaattccttaatttctttttcaatgtcatcgtcttgcgatgtttatacgccttaaattcattataaatttaatttttatagaccaaaaatcaccctgttcactgtgtttgcgcctgtaatgtgtttcagacgttcaaaaaatgacattcgtcgtttagccggcggattttcgggttggggcgacataacaggacgaacaaattcattttgttgtagtccatcgaggtcattatcaatttcccattccttcaactcatttttgatccagacagtgactcgagcgcgaaaagttgcggaattttcagtcagcactttgtccttgaatcgcacatccaaaaaagtcgctagcgcatattccctatgataaaacattaatttaaatcaaatgaaattttttaattcttgttcgctagctcaaaaaagcgccgttcaaccgcatagtaaagtgtcgttctgattgtctccacagtcctgttgacaattttcattgcgtacaactcatcgtgtagtgctcttgcttgaggaaggacaaacaaaattggctcctccgtgaacctttttgttgcttcttcagcacatttcaaaaccccaactagttcttcaatttgcccccactcatcattcttcaataaaagctcgagttcgttgttgtcgactgcatattgtgtgattgccgccctttgttctatcagcctctcacacattgtaagcgcactgttccaccggacacataccatctgaatgccattaggaataaataaaattaacagtattttagtatttaactttaacctgcaaaagagtatgagaaggggcatcgagtaatttttgaatttttttcaattcgctgaaggcagtgttactgtgtttgaaacggccaacaatatgacgagttttggccaataaactgctgattgattcatctctcttcaacgcctcctgtacagccaaatcaataaatgagcagcgcaaggtccgttcggcattggcaaaatgcgattttcgttttcatccctctcgacgaaagcctgcaaataaaaacaaatggaaagaaaaataaattaatttatcactcttttcatatttgctgcggaatccgatataatcgcatgcacattttctttagcaatgccccatttgagcagtaaatcctcaattttgagagcgatatttttccctgtatgtgattctgaaaattccgtaattgccaaaacacgtgacatagacttccattttgaaattgaatgcgcagttaagctgttattgaaccaatcataattaaaaagaaaaacacaaattgtaccacaaaaggttgcatgtgcttccactccaacaatcagttgtcagtgtaataaatgcggattcttttaattcatctttaattttctgtctgacacgttggtatacaattggcaaggcagattttctgaaaaaattgaaaaattaattttatttaactttta

SEQ ID NO: 8746 - DNA, 4318 bp, Heterodera glycines
  unsure (1)..(4318): unsure at all n locations
tgttctcgactgcatattgtgtgattgccgtcctttgttctgtcagcctctcacacattgtaagcgcactgttccaccggacacataccatctgaatgccattaggaataaataaaattaacagtattttagtatttaactttaacctgcaaaagagtatgagaaggggcatcgagtaatttttgaatttttttcaattcgctgaaggcagtgttactgtgtttgaaacggccaacaatatgacgagttttggccaataaactgctgattgattcatctctcttgaacgcctcctgtacagccaaattcaataaatgagcagcgcaaggcccgttcgggattggcaaaatgcgattttcattttcatccctctcgacgaaagcctgcaaataaaaacaaatggaaagaaaaataaataaatttatcacccttttcatatttgctgccgaatctgacatgattatatgaacacattccttaggaatgccccatttgagcagtaaatcctcaattttgagtgcgatgtttttccctgtgtgtgattccgaaaattccgtgattgccaaaacacgtgataacgacttccattttgaaattgagtgcgcggttaagctgtaattaaaccaatcataattaaaaagaaaaacgtaaattgtaccacaaaaggttgcaagtgcttccgctccaacaatcagacgtcagagtaataaatgcgcattcttttaattcatcattaatttttgtctgacacgttggtaaacaatcggcaaggcagtttttcttagagtttaaaaattaagtttcgtttaattgaaaattacctataaaaccattcgctcttcactttttgatggggaaacaaagaatgaaatgtttggtcatccacagcgccgaaggaaatgttttttgtcaccaaaaaatgaagaattttcttatcaaaggagagttgagctgaaataaaaattaaatatttaaagaaaatggttgaattacagtgaaagagtcggtccggtggatgactgaaagtctgagattgtcttttgtttttgtttgtccttttcggctttcgattcaacagcattcagcttttcagcaaattcggagttttcgtgaatggcgtgaagatggacttgcaaacttttaagtgatcctttggcaagcgtgtattcaaatttaggcttttcatttgcttgacactcgagacaaattgctgtagtcttggacgttttttttaaatagaccaatttgccatatagaactcattttaataaacctaaaacaaagaagacataaattatcaattaaaaaattttagattattaaaattacacataaatcccacttgaaatttgtcaaaatgattaaatgttaaagacattatgccagagatatttttcaaagaaaaatgaacaaaagaaggtttttggttgagaccgagtcggaccggatctggtcaaaaattcgccggaccggaccggattggcattttcaaaaatgaccggattccggatccggtctctcataatccggtcaatccggtaatccggtcaatccggatttttcccaaaatcgccggaccggattgccggatccagaaaaatccggtaccggatccggtccggctcggtctctattaattattcttctttttttacactgttctgaacattcgacaaagttaatcaaaaactgaggccaggccattaggctagcaaactaaatagataactactaaacctgtagagccatttaaatttgttggatttgattgaccaagaaaaatgaaaaccccaaagattaatgagcacaaagcattggaaaaaagtggagacagctaaagaagccgaattaaattaaagtgaacataaaaaataattaagtgatgaaaaatgagtaatggaattatttgagtaaaggatttaaaaaatattgtgatgcgtaaagtctgttcatttaatccgtctaatgggaaacgaacttttatttattttattattatttttttgctcattggtaaattcccaattaaaaaaatagagaacttaattcgatgattgaaatttaaagagttttttaaaatattgaagtttctgtctgtttcaagtgaattttcttatgacgtacaacgcatcagcagacttggtaatcggaattccataagaatttatttataaatttgattaagtggttccaatatttcacttccgatgggccccaatggctaattcttttcgctgtgtacggcgcccgctctctgtggacaactttaggactttcgttcaactttggcgttgtgtacattactgccaaatcaaagtgattaattagcatgcgaagtgaacaattaaaatccggtaattatattgaatttgccaattccaaggacacttcgcgggacatgcaacattctgatcgcaatggaaagtgccttcgcactgattctcgacctcggcttttatgccagctttttcgtccttttgtccggcaggacattcgtccgttacgagtactgcttctgggccctgctgttgccggctgtgttcggcgacatggcccaacttacgatggtgttgaccggcgtggaccgactttgttgtgtgatgttcccaatttggtaaaattattaaatttgaaaatggtaatttatttgtccgttttttttattaaggtacaaaaaacggaatgccaagtgctatttggcattcgtttggacacttctctgctgctacgccacctatcagttcataatcgattacatcgactatcagaacagcaaggatttgtaaggatcactcgtttaaatgaatttggcctttttcgattagcatggtctcctgttccaccaacgaaatgggaaacggcggcatgggaagtctaatgagagtcaacggactgacactgagcggcactctgatggctgtgtattcgctgtgttggttcattgtgttcagaatcagtgccgtctcagaaagtgacaaaaattattaatattttaaatatttaacaaattgctcagatgtaaactcggacaatcgcacactgatcaaatccctcgggtttatcatctctctcaatttggcatgcgttttcataaagtgcggcgtcaatttgcttttccaaactgttttccaagtgaatgtgttcaccaaatcggctttttccattgctttttccttcctcaccataactgtgtacagtgcaaatgcgccggttctgttcgttgtcaggtggtcatttaattaattaaatttaatgccaattaattagcaatttgtaccgtgatcactttatccgacacttcccgtggctttcgaaattggttcgaagcaatgaaaaagtttcttcaatttgtacttcgaccacaacaatcattgtccagccgaagaatggcaccccaaacggtgccaatcgcttttacaatgaaaaattggcatctgattgaactcaaaaaagcgactcaaattttttgattgattttgtaaaaatgatttaaatagtttgtttttctgatcaatataaagctgtttatttggtggatctttatttaaatattttacatattattttgtttttattcattttatgtaaatttgggtaaatattttttattttttgagaataaagataaggaattgcgatgacattttgtcacttatcatcaatttataggagaaatgaacatcaatcacagtttttataagagttttctgctcaattgatgatacaaatttagtcatatttttgatttattttaccccaaattcttaaattttttttccaatatttaaaatgtcccaaagaacttcctcaataataaattttcgggacatcgctttatgccaacagcagccacccggcacaataatttgctttcggcactgtcgtctttttcaaaacggcactttcgtcgctgattcgggtgggtgtttttacttgttgtaaattaagctcgttatttctcgcttattattacagtaatacagagatttacattttatgcgtcccatgaaatttatgcgtaacataattattttatgagtctcatgaccaggggatggatttatatgtttttacatatttttttgcgcatatgctatcgtatgagcacaaaaatagcatttttacctgttttaataacaatctgagcgattttttagcacttaaaaaaacaaattttgaactttttgctcataaaaacatattttggtgatttttaaccttcacatattttgagggttttttggctcatataaatccgttccctgttcatgacatagaaggtgtccaactngaattatttttttttttttacataaaa

SEQ ID NO: 8747 - DNA, 4053 bp, Heterodera glycines
tgaaggcgaaagttgatagattggaccaggaaaagcagcagcaattggacaaaaaatacggtagagacaatttaaaaaaataaataatttttattaccgtactcggacagtactgtatgcttcaaaattatttcagtttctgtcgatgtgttcaattcattggtggagcgaatcaaacaattggaaaatcggcagaacaaagaggagggcagaaagggtaaataataaatttgaaataaataattaacggaccgaaattttgcatactttgaaaaggcgaaaaaattttaacggaccataagcttttacaattttgaacagttacaaattttaaatgaacatatttaattagctgaccaatgccaattatttttaattttcattttctattattcaattggatacattttttagcagaggaaaagcagcagaaggaaagtgttggtcaacagaacaaaaacaccgaacagaaattggatggaaaatatgccgtggtggacaaaaacaatgttttgggtgggcacaattggcaaattatttaaaattaaaaattggcgttataaaaaaatgcattttttgagaggggacaaaaccctcgtattatatcgggattttatacatatttggtacatatttcggacttttttcttacatattttcattttttttacatatttgaggattttttacggaaatttttggaaattctcaaaaaaaaatccaaaaatttcggcaaatttttcatttttttacatagctattctgagaatttttgaaaatttttagaaatttcttgtgaaaaaattaaaaaatctttttttaaatgtacccctccaaaaataatttttcaaatgttaaaaggtgattttaaacattttggtcatttttatggcattttgtgcctatttaacactttatgaaaaatgtacatattttttacagccctaattataaatatttaggtgttaaaaaattaatttttctttttaaaatgtatttattgctaatttagttgctttagtgacgtcatcgggcgaccattcgccgtcggcggttgtctcagcgaaagttgcaaaggtgggaaggaaaccttaattatttcacaaatgccatttaatttcaggaagtgcctaattcgcagcaacaaaatgattgggatgccaaagtttgccacaaagacatcgaaatcattggggaaaagcaattgacgatcaattgcaagggcaacagatttggtatttaatataaaaattaaaaaatgtaattaattaattactttcttaattaggatggcgctctgtttttgcgaaatttccaattacgaacttttgtcgtcccggaattttctacttcgaaatgaaagtgttcaaattggaaaggtgttcattttgatgatttcttagcgttttatttataattttgaatttattttaacagttttgctgcgattggattcgccacgaaggaagtgccattggacgggtcaattggtcaaattttgaacagttacgggtaccgaagcgatggctcatttggctgtaatggcatcaatcggccgtgcaaaatgccaatgtcattatttggttcgtcattttcccccgtggcaatgcaatcggcggacgtggaaatggcatacaaatcatcggagttttccactggtgacgtggtcggatgtggcattttcttggatactcgactgatcttcttgacgaagaatggccaacgaatgggtgggccaattaaaatgaaaaaacaaattaattaaaattttatttttaagattattcctcttttttcattcaaactcccgccaattctctcaattctctgtttccgtgcgtttctttgtgggtgggcgacaaaatcgaggcgaactttgggccaaatttcaaattcaatttggcgactctctgaagaaagcaaaaagaatggaagaaggagaaattcatctaattgctgtcatttttactttatttatgtttattttttaaattctttttttcaattttcattttggctttataatactaattactattttatttgctattaatttcgtttattaaaacgtcgattttgtgactcagtttcaagtttcttcgaaaaaattcctatgaatcttaaaaattaatacgagaaacttcacaaaataatttaatttctcttaaataaggatggcatttcttgactcttggttttaaaattctgaattggggcattcttttttaggtcatcattttgccttaatttatgttaattgaccccgataaatatgttaatataagcaactgcagaatcagcagatgttcatttattacttctccaatttgttaataatttttctcatttattacttcttcaatttgtttaataatttatcatttattaaaatttacatcttttattgtgaactttcattttaggaacttaatgaaaagtttgtcaaaatggaattggtattgaaaatcaccaaactggagcttaaaaatgtgagtgttatttaaagtgtcattttttgaaaattaaatgggaattgctaattaattttgaaaaaaaataaattttttaatattaaatgattttagaagggactccaataaaagttgaggcagaaggaaacgaatgtactgctggcgaaatcgaagcggaaaatgggaaaatgaaaacaaaaaaaaaaactaattttgcggatcaatttttgagaaaaatttcaattcttagggttgtatttttctttttattgcatttttgttaaggatttttccgaagatcccgatgcaattagtgccactaaaagcaaaaagaacacattgttacaattgttatcccaattttcatcgttcttctgctgctgaaccgtcacggcctccccaattttgcatcgctgcattatccatcggttgtccaattcctttgctttggccaatgtcagcttttcctttgtccattcgttcaccaattcaaatgtcacaattgatggcgcatgaacagtaaaatgaatttggtaactgacggaagaaatggcattggcacggagaaattgctaaataatttggaaaataaaaatagaagtagtcaaaatcagtaatatgcaaaaaaatatgggaccataccttcttgaaattgttgacccaatcgaagtacacttgtcgttcaaaagtgtgcaacacaatcgcttgggttggccatcttttctcggtgtgtgccaaatcgtcaccaatcgcaattgcctcgggcaacagaccatatgaatcgattgaattcaactgattgagatcagtgagaattgtcggcgaagtgcgaagaagaaaattgtccaactgatcaccatgttaaagcgtaaatggcgaatgtttgtcgaaaaaatgggccaaatttcacgcacaaaaggtcagccgtagggtatggatggggtgtgagcaattaattaattatacaaaatattttgagtggtagaacagttaaaataaagaattagatgatttttatttttgttaaattttccgccaattttgttgtgcggtgaagaacataaaatgccatcataaaaattatgtgcccttgttaacaattaaaaatgtgtaaaggttcaaaatttgattaaaacattaagaatgaattataattttcaatggtaataataactgagatttgtattcgttcgagtgggccgccttgtccttatttcgatggtgtccttattagagaacggaattttgaaaatgccgggcccgggctcgggcttcgacaattggccgggccctggccgcccggtcaaaaaaaccccgcttaaacgggcggcccgggttgggattaagtcaagcccatgtgaagactttttttgttttacaaaatacttttttactgcgcgcttttttcagaaaaaaaatttggagaactagagggtccggctgtgtgataggcgccgccgaggaaaatttacttttttgtatgatttgttaatagattttgtccaaaaatgaacaaattttgcattttgagccaattttttagggccggcagaaaaattttttaagttttgtatccactttg

SEQ ID NO: 8748 - DNA, 3340 bp, Heterodera glycines
tattttcaacatttttaaaattttattttgtgcaaaatctattgattggttaaatggcggttgatcgcttgccgaatcaccaaaaatcattgtcatcttcttcctcatcctcctccccatttcatcgcgcatctcgaccacgatgtcgctgtcaagcggcacctcatcgtagacgggctcttcgccctcctcaattgcaccatccgcgcggcgctgcctcgctgcttttaaatttaaattgtaattttaatgagtgagaaattaaaatatataaagattttaatttaattaaatttgcccacccggtccaccgtcaaattgacgcccgtcgggcgcagagaaacgccggccaacattgccggcaaaataagcggagtcggcgcgctcaccggttggcagttgcgacgggcggcactcattcctgtacaaattgttaattacaatttgctaaaaatgtaattcaaatagtgagaaactcacgctgacgatgtcggctcagcatcccctttttgtaggcgcggtccttcaaaaatttgcgcactttgaatccggcgcgcacaagctaaattgaggaatatggatttggtggataaatgcccaaaattaacgacctgcgcgatgaccaaaagcgccatcagcgctgtgcacaccgcgatccacgcggtcaaatgcgcgggcggaggtgcacattctgccgccgccgccgtttccgcagttgtcggaagtactgatgttgttgttgttgttgcagcttcgtcaagctgaccggtgctcaaaaagtccgtgatgttgcggacgctgggatgcgcacacagcacaagcttcgcgtacttgcgcggatagaaacactgaagtccaattgggcaaagcgtgcagttgaatttgatccactgcatggcgcgaatattcggagaaataaccagcggagtatggcccgatcgctaaaccccccccccttccccatccactttagttctccaaaaatttgtttcttttgtcaatttgtcgtcttttcattgtagaaatggtcatacagatgttatcttcctttgtttggctcggggagtgatcaacaaagattagtgcaaggaatattggacacaaaagaataagtaactttaggcgccccactgacatgatttggtggcggaaaaaatttgaatttaatgtgcgttataaaaactggtgaaattatgattaaacgaggggacggtcaggataatttttatgtattgagtcatcctaaaattagttgtaaaattatagattataggcaaaactgataattggctccaccaaaatattttcataattttgagtgcaaaatgggtcataaacattcgtgactgcgtcatttttagttgacttagataatttgatttgtttattagtgtcggcatcggcactccgatcaaaatgctgccgacatcgcggaggacgacgatggcacaactgagtatgaggtcacatcactggccctgtacgacaaggcgccatgcctcgtctgcggtgctgtgaggtattggtatctaattggataccaatcatgcgatgagacgttcctcaaggatgaggagctgctcgaccacgtaaaaatagctgagaacggaaatttaaaattgaaacgtttttgtagattggattcagtcttgcgagactgatgtctgccgtgtacacccatgcggcggttgttggtgtcatcgacatcgagagggcccgcaaaatgtggggaaattggcgataaatgaataaataatacacaaaaaaattttagcgtcatcgcccgtgtgggcgtgcacgcagaggattttgctttgtttgggctgattggcgaagaaaggatgcccttggtaatgacgcccttgggacggttacagtcaaaatttttgatttaggaccaggttttcccccgggtcccatcaccggaggaggttgtcgtcgacggcgcagccattgttgatgaggaggagcagcagcagcagcagcagcaacaattggcacaatttgtccctttgctggtcgcccaacatgtcgttaacaatcagctggccgcttcaccatttttcgtcaacccaccgtttcctcggcttccgggcgccttggaacttccccctcttcaattcggccatcagcatgcatttgcacctcctcctgcaccggcactccaaattgtcccgctcgatgatgccccggcggctcaccagcaaaatgtgcaatttgttttgatattttccaagaaaatccaaaaaattttcaggcggccccaattttggcattgcgggatgtaggggtagtacaataggggggggggagtatatttaaaattgtaaaatgatgataataaggcgatcgctgaccctcatcagcagccgtgctcctccaactcgttgccgccgaactcgcgcgattgcatcaggaaagcatataaaaagatagctcccgaactgttggagcggacccgtgccgaactgaagcgtccgggaacagccagttcgatcagcagctgtgggtcgtcgtcgtccacggtctcttcaccagcgaggcgatccgatagggagaagcggaagctcgaaatgatccgtcacgttgggcaaaaatgtgaccccaattgccagacgtgtgatcagctcctgaaatgatctctcgtccccattccaattcccacactcatcacaccattcctattatcgacagtctttctatccgatcaaacaccaaccaatgtactcttaattaccccccccttttttttattaacaattaattatgccatttcctttgcttttccaccataaaaaatcatacacatctaattgattttacaaccctcccctacggcacacccttccccacggttcgcgcccctccccactcccaacgctcgcgtcctccctcccacagagtatcaccacgaaaattcaaatttgaatttagcgccaaaaggggcgacaatcgtacaggggtcactactaattgcgccgcaaaaaagcggttttgaaaaacaacaaatagttaaatttatggaccatttacagatttgattcccgatctcttttaccatccatttgaaaaatattagtcgacccatcagccccatttaatgcatcccgctagccctaaaaatttattttcaaaacttcaggtattttttgatttttggaatttttcggattttcaaaaatcccgcaatcccgcgcgggatcccgcaaattttaaatgcgggattttcgagattaatcccgtgggatcccgtcccgcagaaaattttgagttcaatccctcagcgggatccgcaaatttgaaatttccggtctctactacccagggcatataaaagaga

SEQ ID NO: 8749 - DNA, 1108 bp, Heterodera glycines
aaaagattatgatgatgctgacatttttcacgttgctaaacgtccattaggttttcctagagtagaacgggaccgggacctggtactgaaaaaagcggacaactgagtacccaggtctcggttttgaccgtgaccgggactagtcccggttttcccagccaaaaattcccggtttatcaacccgaaaaggtcccggtcccagttttgcctaaaattcccggtcccgatctattctagttttcccatcaaaatttttggctatgttttttcatttgtccacttttcatccgggttatgggttctataaaaatgaagagcacaccgttaccaagaaaaacactttcctcaattaaataatacctatattatatatataacaactggtaattcaataaaagtaaatatttgaatattcccctttctatttgcacaatattcacaaaaaacaatcaattattgaatttaatataaatttgcttgtgccattttgtcagatgtaaatttagctagtaataaccagggattctttttttatgtaagaaaaatcgcaaaatatgtaaataaaatatgtataaaaaatgctaaaatatgtatgaaatatgtacaaaaagaaccaaatatgtgcttaaaatatgtaaataaaaatttttaaatggtgttttttggaaaaaaatcttcgtaaaggggtgaaataagtacaaaatgccctaaaaatgacctaaataggcttagaagcaccctttttactatctcttttctgaaaaaacgatttttaggggtatattttcaaaaaaaattttaaatttttcatatgaaatttctatcacttctcaaaaatcctaaaaatatgtacaaaaaattgtgaaattttgggtttttttggggacatttaatgaaaatttccttaaaaaatcctcaaaaagtccaaaatatgtataaaaatatgtacatgtgtaatatgtagaaaaatcccgaaatatgtaaaaatatgtaaataaaagtcccaacttttgttcgcaaacacaaaaaagaaagtgtttttcctattaattaggctatggagaatccaggaaaaaaacatgtatttacataaaaaaaagaatccctg

SEQ ID NO: 8750 - DNA, 1542 bp, Heterodera glycines
  unsure (1)..(1542): unsure at all n locations
actttgctgcttgtttttgctctttaccntgaatatcncatctgcgtttcacttccctacaaattcgccgtaagcttntctgnatcattcattcataatttccttattttcccatctccgatcacttcctttcctctgatcacttcgctgggtggtcgatggagtcgagagtgagtcgctcgcatgtcgggattccgtttcgggatcactcttgtcgatcattttttgttgtccctccccgcttaattattgttccgcttcttccttcactcccatcgcttctcatccattcattcattcattcattcattcattccattacccatccgccagcagcaagcagctgaacaataaattaaatcaacacaatcgatccctccgtcgtcattttgtggggcttttcctcccatccctcaccctccctattatttatcctcctaattcaacccgctttatccccccccctccctttccatttctcgacgtctttgtgctttatctcccaatgctttacatccctcccctcataattttgcccatataataaaaaagaagcggcgaacaaaagaatgagagtaataatgccctgtgtcggctgttgtgccaatgtcgtgtgcctatcagtgccaacctgcccatttgtgccaccatctcggcagtcctttgccatttttgtcgctggcactaattagtgcgcgagtgtattctctcccttccctccttttgcccataactgtgcctgtcgagagatccttttagaacatccattatgtatccacgctaaaatcataacaacacattcattgttcactcatttgttatttttctcgactattttggatcattcctttttcgttaatccgagagccaaaaaagagtcccatttcagcaaattaggcacccaaataaaattgcttaatttagaaatacactctataatactcattttacacaataatagccatgttttagtcgcatcaatccataaaatgtcaaatcagctcaattttggctgctgttttgaccttgtttttgacttttaattttctccctcatttgagtcaattagtgataaatcattttttatccctctccgccccatttagcagtatcagcaacgcaaccacggcttcgccaagtaccattcccagcagccataagtgcgccgccggttcgtccccgtgcccctcgctgtgcgcctcctcctcctcctgctcggcaaattcagtctccaccgcggtgcgttcgttgtgcgcatggttgtgctgctgttcacggtgctgtggtggggatggagcaacaacagttggagcagaagatgagcatgagcagcagcacaacaacgacggcacatggtgggtacggagacggcggaggtccgctgaccgtgccgactacgaaatggccaactcggcacgggaaaaggagcacagcagcagcggcagcagaaagggtgggaggatgaggagaagtaaggacggagcgggacaagcgcagcagcacagcccccgtcaagttgaagcaggacagcaacataagcag

SEQ ID NO: 8751 - DNA, 2829 bp, Heterodera glycines
  unsure (1)..(2829): unsure at all n locations
gtcaatgtatcatcagtcggtgccatcggcggagcagcggctaatcaaggtaagagaaaacaaaggaaaaccagcggcagtgaaaccatcgtcagaaaaatatgcttaaactgattagaaaagattgtaccgatcagactcaattnacggttttcgagaagtcgctttgatatcctaaattattggtttcaatcgatcagttattacaaaatgccgccaacattagtgcaatcggtcaaaggttgtagttgtttcgtctcattttgatcagctccgattaagcccaccctttcggtgattcttttttttggctaattacacccggtcaatttctcatatttgcctaattaccccattattatccctatcattcattcacagttcggtaggcaaacggagtttgggagcgatggaagtgctgcacaaatttgcgcacgactgtctttgttcggcgggaatgtcggcggtgacgcgacgcaaaagtcgcagacatttgttgggcgacggccaacggaagtggcgatcgttggaaagtgcgacagagcgagcggaaaagtgagtggccaattagggattaattaggcactctctgactgttttggcattctgatcaacctatttcttaattggaattcgacttattagcctaaaaatacctatttcggggttataccacctttttctttaatctatttttgcttatcaaccaataaaaatttgttaaaataaataacacaaaagataaaaaatttatgagaaaattcacattaaaaattgtttccacataaaaaacctaaatttattggatttagaagcagaaaatgtttaatgcctatttcgcacccattttggcacttttagcatcttttttgttactgaacacctaaaaacgcgtcggttagagatttaaaaacattttaattccattgtcagagtatgactaattctaattagagaccggcgggaccgggactcccgcgggattttacgggagtcccgctcccgactcccgcttttttcggtgaacgggatttttacgggattcccgttcgggactcccgtcccggtaaatccttaattttcttaaaaaatggctcaaatttgcaaaaattggtcatttttgaataaaaattgaccattcatgtcataatttattaacaaattgaactcacttcggataaaatttcgtttaaattaattaaattttccatgagtaaatcatgaaaacgaatatattttaaaatatttttgcaaaataccgaaaaaaacaaaaattatacgaaaatcttaaatttttttggttaatatctgttaaaaaatagagtttaaatttcaaaattcgccggcggcaccgccgccccccccccccaaaaaaaaacatattataatttttctgtatcggctaaaaggattgtccttcaaatttgtgcattanaaatatttttgtgagtttttaattaaattttcgaattactcccgctcccgcccgggactcccgttaaaaatggacgggattttaacgggatcccgttcgggactctcgtcccgtaaaattttgaactcccgatcccgctcccggaaatttttttaccggtctctaattctaatgaaagcaatttgaatttggcatttttattcttcgtttttttttcttcggcagatctctgccgttgtccggccgtccctcctcccnaattgtccgttcggcaacaacagctgcttctgctgcgcgatatttcgccagaacagccgccttcccgcatttcgccgattcccgaagatgccggcggaccgccgcggtggcagtccgaattcaacgaaatactcagtgagtgggcaatgagtgattggacactctgatcagtggtggctgatcggcgagataataagggaagggggggggagtctcgagactgggatttaagctctatctcgagactgtcaaaaaagcggtggaatttccctaatcgagatccagtcgaatcttggcacaagagactcagtctcgagcactaaagaaataccataggaaataggaccaagttatacagagtatgggatattaccacatatttattttatgggatttatttttccatctatgtcaccacagaataattcaatctttgggcttcaaatgacctctgatcgccacaaaatcacctccctatcatttaaactgttagtgatcaccgttttctttttttctgaattttttttcaataatgtccttgaatttatttccgattttttcaactgcagtaaccggcggtctgagagattgacgcgtcaattcagtttaataaatgatcaagttcattaagcggtttcggttattaacattgattaatcagctcacgtcaaatcacttttcaatacacagtttttggttaatttttagtcggtgaaatgtgattggattaataaatacgaaatttttcaaaaacttcttcacttgcattgatcaagtgccaatacttttcaaaaaactttctgatcactttttgggaatccggtgatcagaaaccaaaaccatttattttaaaattaatattaatgatcaatcatagtgaaatgctgatcaaattctctgatctaattataaatgacacatttttaaaaaacaatttgtggtcatccctgcgttttctgaccaaactctgatcatgagcagagactgttttttcttaacagaattttttgatcacttttcctcgggcttttgttcctcctcgccgctcttctcttaaagcncccattcattctgtcgtcgccgnccgatcgctgaaacggccatccgatgcacccactcttcccatcgttcccctg

SEQ ID NO: 8752 - DNA, 1887 bp, Heterodera glycines
gacaaaaaattaaaaatgtttttaccaaataaatttgtctgggctggccaattttcacgcgaaaacatcccacaaaatgacgtactttccaacaaaaatgtactcgcacagcaaataattatttcgtttcatcgagcggagcggtcgaaaaaaagggaaaaaaagagagagaaggaagaaaaaaaagaggagagaatggaaaagggtaaacaggaagaaaaatgactggaagaagagataaaaaagtaggaaagataaaaagtaagagaaagagaaagaagaaaaaaataagaatatgggaagagagggaggagaaggagagaaggaagaggaagagaaggaagaaggggagaaaaaaagagacggaaggaaggagaaggaaagggaagaaaaaggacaaccaaacggatgaagaggaaaggaagagggagaagaggaagtcgagaagtaatagtgtagtgaataaagagattgggtccccttacttccccccccccaaattatcgacttttcagaaggggctttttggtgggggaggggaaaattggccgaacattgaaaaagggagaaggggagggcggcgggtgaaccttttgatgtgcggcggtggccaaatgatgggacagctgccgccccgccgctgtccctgccgaaattgtcgccgccgcccccctcaaacgcatcgcgggccattgtcaagcaaaagatggcaaaatattttttttattacacacgtgctttattattatgtttacccccaagtgccgtccatcgttccgtttttcccatttttcatatttttcctattccccccgcccattttttgtccccattcttcgcaaccctttcattccatcggagcacttttttcgcaaaaattttttgtccgaagagaaacggggttcatatatacgtacaatattcgtttggttttgtcctatgccctgcgggcataaaaagtgattttttttttcttccaatgccttccgccggcggtgaatgtccattaattagcatctttctcataggaaattgggtcatagggtcagtcattctttcattgtgccgaaattgagaagcattccttctcctcccctcaaccccatccctcggggaattattaatccaattccccgagggttgcttttgggtaaggcattattcgcttcatctcttcctgagagaacggagcgccaattcgtccaattctcccgccggcggggggagcgttcgttcctccaatccttggacgttttcccaattgtgggtcctttttatgttgaaagttctttgatcaaagaatgggaccaactcattcattatcattattatcattggctttttctttcccttctctcactcactctctctttctctctctttctctctctttttctctctttctctctctttctctctctttttctctctttctctctctttctctctctttttctctttagaatttcctttccttttttcttttcaataaattccttccatcttgacttaaatattaatatctttccttgggtgcatttgtcacgaacttagaattttttttttttgtttttttttaaaaggaacatacataaaatatgcaattcaaaaatgaaagaagagagagagagagagagagaaagagagagcgaggggacgaagagaaagagaggagaggagaaaaaacgagtaggaaagagaaagagagcaaattcagagaaacagaaaagcctctcccctctctttatttgtttaactaaaactatgaacttgaaaattaaacaaatccgacggcttttccctccgtctgccgtcctttagcctggcccattcattggaggaataagcaagggcaacgctcatccaacaacaacccccccccccccc

SEQ ID NO: 8753 - DNA, 939 bp, Heterodera glycines
  unsure (1)..(939): unsure at all n locations
tttggcgtaactattcttttcatccgcttaatgaaaccctattcacaataatttcataattgaaaaaagcttttttaaataattaaatattgaaaataaatacataattttaatgggaattacttttctctcccccctttttttccttctgttcaacatcgtcttcatcattttgctttttttcctgatcacttttctcattctgatcatcgtgttcctcattatttccctcttgatcagtcgtcttctgatggcttccatgattagcaaaatttgatcggttctcgttgtgttcagctggttgttttacaattgatttatccagtttttccaatcgatcgagaatcctctgccgttcagtcagatattttttggagtgacgatttttgtagcctttaattaaatgatttaatgattagttaattacattatgcatccattttactctttccatctttttctccattttgttcttcatccgatgtttgaccattcccattttcgtggctatctttttcctttttgttcttctcccgatcattgtcttcgtcattttcatggtccaaatcacgatcattgaactgctgctctttgttcacttcttgatcagtctcgttcttactgttccgatggtcatgttcatggtcaacttgttcaacagcatccgatttgggtttagatgacaaattcgtgtcggacgggacgaaggcattgagaagaatcatatagccaaacagagcaaattgaagggcagtaaaaggcggaggcgtcatttaaatgctagaataatacaagatcttttttttgaaaaacagtttgaaaatagtcaatttcggacgtgttttggcacgttccttaaaatttgcaaaatgtggttgcgcttttagaaaaatgcatccacccaattccgatnaattcagaaaaattttaaaatatttt

SEQ ID NO: 8754 - DNA, 2070 bp, Heterodera glycines
aaaatgataaataaaattttatataattttttttaatgcgatttttggggcgctgtccaaggcaatatttaaatcattggtaataaaaaataatgaaataatttttttttaatgttggattattctttaattttttttgtacaatctcaaaactcagaaattttaaattaaaaagattactaaacgaattcctctaactttttaaaacaataaacaaaaccttttttaaaatcacttaatttataaatggtcagcaatagatatacacaccgtttcagtttttgcctcccagttccaaaaagatttgaatttttgtctcagtggtatatgtgctagtcaccaaaaggggggttccaggttcgaatccgatgcatgttaacggacgtttttggtgattttaagcaaaaaacgacttataaaatgacaaataaatattctgaaaaataaacaaaaatgataaaacattttgtttcttcactttttttttgaaaatcatcctttaatccaaatttgttaaattacatcaatttggcattcgtcatcaatttcttccgccacttcttcatccgtgtcatcctcgcccttcctttcttcataattctaaagatgagaattcagaaaagggaaaccttttgaaaaaacaaacccgcttcaattcgtcaatccttccggtgtccagcagccaattgttgacgaaatggtgctccaattgttgcaaaatttgttccgcgtcaggcatacatttccaccattgttcgagtcttcgccacaccgaatgaagcgcttcatcaccttgaaaatattaaaaatttgtgctaattaagcaatttgtttttcaccctgctcatccaaaaggccaatgaattgatgttgtcgtgcaaatggcacaaagtggaagagtagaagatgggccttgggtttctttgagagaaaggcactcatccggtcctgctctgccaaaaacactttgaaatcgtcaattgatcgctcaagtccgtccaggtcatttggggacaaaatttgtgcctaaaatttatgattttatctcaataaaatcggacaaaacacttttgaaaaattttgaattgaacgaagcagaggcggctttgtgatgcccattgatgccgatcgaacagcagcagtcgccttatcgccattttgcaacgtcgtcctccattgttccgcaagctcaattgtctgatcaatagacctgagttggcagctttgctcctgaagcatctgatcagtccggcacgtgcaaattggggacggaaaagttgtaacggctgaaccgcagtgaccaatcaatgaccaaataaagctgatgtcgctgtcgcgactacgcgaattcggaaaattaatttaaaaaaataaaaaacattaaacccaaaaaatatttaaattaatttttaattttaaattagacagataaatattaatttattaaatgtgaacgaaataaaggaatgtgagaagaaaaaaaacattagtcatattagtcacaattttttctttccgaaaaattgtcaaatgttaaaatttaattatgaataatcggaacgttaaaagaaataacagattttaaacaaatgttaaaatgggacaaattgtgaatgatattaaagaaattgtaaaatgttagaaaattgggaaaggctaaagtggcacaaactggaaaatgagaaaaggttagtaaaattgccaaatgttagggacagaaatttggacatgccaggttggcaaacacattttcaagcagaagttgccggtataaaaggagggcactaaccccccaccaatcagtacaccaacggtttcctgagaggcattgcctcgtcctcctttccctcccttccctttccccccgtgccgacaactgctccgcctgcccgttcgtgccgccgactgttgtgcctaaccgtgcgccgcccgttcagtgccatgccgatccgtgcgccgcccgttcagtgccatgcccgatccgtgcgccgcccgttcagtgccaagccgacccgttcgccgaccgttctgtgccatgccattccgtgccgccgccccgcaccactgatg

SEQ ID NO: 8755 - DNA, 1392 bp, Heterodera glycines
agtagagctgggcatttttaaaaagcctgaacctggatttcgtggacaaacgttcaggaaaatccaagtccatgaaaaacacaggcttgtttaaaaatgattaatcttgaaaatgcaatttttcaacaaaattcttttattttttcaattatatacttcttatcttatgataaaaattcaaataaaattttacttttaaattattcttccgctctaaatatcaataaaaattattattttttatagattataaatttaatttgatgataaatcaatatttttcgccaagaaaatagtaaatttctcaataagtttttcaatttttgttttcttagagaaatttggtttgacaaaaacacatttatttttgcatattaataatttaattgtaataaagtattactttgatggttttctataggcttgaagctcgaaccccgagttttcctaatcccgacattcgggtcttacaatcgattctgtttttatatcagcctttttcaagtatttacataattactaacaataaggacaggaggaggcctgagacatttttctcttagcgaacattgttttagtaaatatcaacaatgacgttgatatttatttaaatcgaaatacattatgccatcaatgtaatatcaacactatttttaaaattgggataattttttaaaatttaaagcaaattttttaaaatgacttttggcggaaaataaaatggggagaaagataacgcaaaaatgagagggtataaaaatcagccccagtcaaacaaaagcatttttagtgaagaagaataaagaaaaattaattaaaaagagagtgttatgggaagagatttaagaccgagagagaacagagaatatagtgagagttctgcgtctattaccaaaagaatcagcgaagaagagaagtgaattatcttcccatagcactctctattggaaatattttctctaccctccttcatcaaaaatgtcttgtatgactgggactgagatccagcactctctcatttttgcgttatctctcgcactaaaattattacccgttgtaacaaattttaaaaaattatcgtaatttttaaaaaatacgttgatatttgcgttgatggcataatgttagttgatttaaataaatatcaacatttaaattgatactccgcaaaaagcaataaaaaggttgatttgtcattctctaggcctgagccaaacttccagcttcatgcatcgaaaacattttttcaatcaattaaattttctaatttcaataaaatatatttggtggaattagcaagtatttttagattgcgtttaataatttgtaatgcagtgtttgagctttttctaatctccattatttttttctctatttaaaattttcttattt

SEQ ID NO: 8756 - DNA, 2790 bp, Heterodera glycines
  unsure (1)..(2790): unsure at all n locations
cagcggaagagcacttttgtccacacngagcgacctttgaattgcgccgtttgttggnacgtcgaattggagtcatttttattaggctctgctgcacttttaacaaatccaccaaatgaccatcctcagttttttggaataactcattcttactttaaaaaagcttaaatttatggtactcttttcttgtatttttaaattcccgagactttaaaatatttacagcccattccttaaataaaagtcgacatttggtggtaccttttattctaatttttgactataaaatccgttttttagtttattattttgtttttgatatttgtgctatttagcaattccgtgtcggactgtcgaaatgcgcactcccaaaactgcggacataaaattcgggaagagaaagcctattgtttgaccaggcaaacgcaaaacggaaaaggttattaattattgctaaagttacaaatgaattgataaatctttaaatgggtgaattggtaataaaaattaattttaaaaaatattatttagttaattaattaactctaatttctgttaagatgcatttattgtggaaaaaagttgtgtgacaacgcgccaattttaccagcaattccctgaagaattggagaagcatagtgccgacgaagtgccaattggctgtgatgccacttatgacggtgaaaattcaaagatattacaaaaataataatttaaaatgttttaaggctttgtgaattattgcttatgtgacgagcaaatgtgcaacagaaattcgttaagcgaacaagcggaaagaaatgggaaaaggcgagaaatttaaatgaaaatgaaattgaaagaaataaataattgaagaaacaattaaattaaattaaattaaacgacaattaattatttaagcagtggcaaaatgagaaacaaaacgagaacagataaagaagaaaagcacggaaaaagcagtgaagaaaaaaagcgaccattatttgtaccatcagcagcaggtgagaaaacaaaaatgatttaaataataaattaatttgacagatttaacgccaataattaacatgagaccaataaaatcatcagcagaattggctaatcagaaagaaacggggtacttttatcatcaaattaatttaaacgccatttacaatattttttaaagtgttagatcctttggcgacgatccttcgccgcccaattggctctcaaattggccatcttcggatgcccccaattggccgacttccgccgcttctcccattttggtgccggccaccactccgccgtcgaatttaaccgaacaaaatgaccgactcaaaaaatggaagcaaaacagcgaaagggccaaaaggccattcgaaagtgacggaggcgaagagtcatcagacggaaagcggacgattttatccatgggaattggaattgttcacgcaatactcacactttttgcctccctttatctaatgctatgaaagaattttattcgcttaaatatttattttaaataatttatcacataaacaatttattcacttttcaataattttaaataactcaattaaagattgaaattgtttctgactttttttagttttagttttattcgccaaaagtcaataataaaatggtcaaacgattatcagaatgatcaatttcattttgtccacttcattttcacctttccttttcttttatcatttccatttttcacaaatttccttttcacttttgccactgttccttcaactttttaaagtgcatttccgtcatttcattgcttttattgtctcttttttgctgtcgcttttcccaccgcttttgcccgtcaattctttggaccattttctgacttttgccactgtcagtgatgcgattattggagaagcagcgatttggaagaaattttgccaaaattttcaatgcatttttcctcaaaattggatgacgtctaaaaattaattaattaaaatgcatttaaataatgagttttattctattatcacttttaatgacctcattaaagtcaattcaatcaaagcgttgctgagagaaaggacggagtaataagtgaacacaattaaattcagcaaaattgggtcggtgatcagacagatgaaaagacgacaaatggggtgaagacggacccgcaaatgttaatgaaatggaacagaaaagtcggcgcgagttggcgccccgttcgaatattttcggccaactaaatttaatttaaataaaatcaaattataaaaatgaaattggaggaatttaaacgaatgacgaataatgaatgaatgaatgggatttacctgatagcgttcgctgagattgtgcaaattcgccggtatttggagcccgcgcatgaaaagtttcaaattgtgagtgatcagaatagagaaagccttaatgtgaatccgataaattcaaaatgataattaatcgctcacaatgatctcaaagaaactgataagcatcgaagcgcaaacagtcactaaaacccccgcggtgaaagtgagcggcgcttttgcctcagttgcgattgcttcttgggctgcggtggccacacaaaatgaggtctaaatggttagccgacttttgcgccgcagacatttgcgccgcgccatttgcgccgcgacacttgcgccgctcagcaaaaaagactcttgcgccgcgcacatatgcgccgtgccatttgcgccgcgacacttgcgacaactaataaacaactgcatttgagccgcgacatttacgtcgtagacttaaaatatacatttgcgaactgattaa

SEQ ID NO: 8757 - DNA, 4144 bp, Heterodera glycines
  unsure (1)..(4144): unsure at all n locations
ctaaataaagtaaaatgagacaaatagttattaaatggcacgagtaatttgaaaatgccttacaattaatgcgaaccacgtgatgttaaacgcgtaacttttggcatgttcgtacattttggcaaatattgtcgcgataaagcgctcgatcagcaacacatggccaatgtaatttatgtaaagcagaggaaactcgagaaaaaacttaaatcatatttaaattaaaattaaacaaaaacaaaaaaccaccaaaataattttgtaatcaagccaatgctcctttcccaaaatgaaaatgaccaaaattaggctaatttgtgccagcgaataaatgcaaaacaaaacgctttgggtgaaaagcacaaattttaaatttcgatgcaaaagcgaagttcggcacagaacggaaatgttgagcagggaaaggggcaattgagcagtgcaaaggacaaatgcagaagcaaaagtgccgaactgcaaacattgacgaacgaagtttcgaaaagtgtcgcattggccatttttaaaaaggatgggttttttcaaacttttcgctattcttttgaatttacagaaagcttatagaattaatgatgaatggtttccgagtgaaatctgaacaacttcttcctcttctttttttgcctgccactataattatttaatgattctggtcatcatttcttttttaaataactttgtatctgataattattaattattattttttgagtcaaattattttaaaaatatgtacttttgacgttaagtttacatcataaaataaaaaatttaattaacaataagaaattcataataaatagctaataaagtccttattaataaaatgacaatttttgtgccggagttttttcctcccaatttaaaacaaaaaagcaaaaacaatttaaaacctaattgccagtccattctacaatccacatgactttaattgtctctcttaaattgttcgttggcattggcattagctttctgtcgaatgttttttatatttgcacccgtcacaagaaagttgcaaatgaccgggcaattcccaagaccaataccgaataacggacatgggtaaaattaaagaccaaaaaattgtaatgcaaatttatttaagttaacgtaatttgctaattccatccgccggaactgctaagaaatggaaaatcatttctctgctccattaagcgcacaaataacatttggccgcaaattaaaagtatgggaaaataaataaattaggaaaatttaagcgaaaaggtcttttcccgagttcgaaaaaggagccaaaacgcccggggtttttgccgaatttctccgtcagggcacggaaattcacttggcaaatatttggcgtatctttcaaattattaccattctgtgcgactccatattccatganatccaccgtaatgagcggaaaagtatttnaaatgctttnaaatgtataaaaacgaattanagcatctgcttgagtgacagaataaaatattggccaaccattgnccattgacgctaattttgcaaattaccgagtcaattaatttttgtaaattatgttttagcgataaaatacttttgatttttttaatatgcaaaatttcgacttcatttcacgtgctttttcaccaaaaaggtccattcggtccactttccgctagcaaaaagttaaaattaatttttgctggatgttttttgtttattaaaagttattaattatttaatttcaatgaattttggtttgtcccttcctctcatcaacaatcactttattctgcattaataattatccgatctttcacattttcttcctgtatcctttcgccgcttctgcttcgccttggccaccggcggcgtttgacgccacttcggccggtgcaggcgctacgccgacgctttctgccggttgttccggcacaggtgcctgttcagcgggcaagggcgcgtgttcgactttggcaccgcctccgcctcccccggaaacgccataaccgccgcccgaccggggcgggcaggcgcagtacgaggcatctttgccgggtgctccagcagcgccaggatgaccaggctgtcccggtgctccgggttggcctggctgtcctgggtgccccggggctccgggttgtccttggtctccaggcttcccaggtcgtccaggtgcgccaggctgtcccggtgctccaggttggcccgggttgtcccttcggtccaggaacggtcttactgcaaagggttaaatggttcatgcggtgccaaaagtgaaaacaaaatgccacttactacacaacgccattttggtccgggttgtcctggttgtcccgatcccccaggtcgtcctgggcttccggcttgtccttgcgggccaggaggtccgggtgggcccactcctccgctctgtccaggctggcctggcctgccaggttgaccggcttggccggcaggtccttgatctccgggctttccaggcggcccagctgggcaatgctggcagacgtgaggaacatccgggcatggcgctcctttgatgatcagataatcttttttcttcgttgcaaaatattctcttttttctactgtatgtaatggcgatggttatttagaaattagacaactttttttggtagctaagtgatttttggtaccgaaattaagagaagaagaaaatgttttagaggaaaaagtaaaaaaaaacataaaaacttaatatatattatccaaccgggctgtccaggcactcccggctgtcctggctctccggcttgtccagggtatccgggctgtccgggtgcccccgcgggtcccggtgggccaggcggacattggggctgttggacgccggcacattgacaatgtccaggcagctgccgcttggagcggaagatggagacgaaaggattctcgcggggttttgccggaggagtgaccgtaatttgtacttccatcagttcgttccatgccgagtcggtgttcacgcggaatgcctttagagacaaagtgccgtggaatgaatgaccaaaaaataataatgccatgcccatcctttcattacctgcactccgtcgtgcaccttcagactgatttcgttgatctgcgagtacaatgacggcacaacgaccaacgtggccacaatggccaaaagggagcacacggaggccactcccacaacaatttgtgtctcttgcattgcctgaagggatttgaaattgaaatgattcggctgatgggcgctgttaattgacgcagtgtttttctctggcgatcatttgcgattggaattcatttaaatacggcgcgggggagacgggggccgatcatttgccatgtcataggaggcgcaaaaatggccttcacttttttggtggaacggtcggtccgctgacttttgcctcttcggcggtcaatttgacgatttccccagcgtcggcggttgtttgttctttcgtcatcgtcggccaaacaagttttgatctcgaaggggccaaaaaagcccaaaaacttaaaaaaatgattatgcttgggacaaaagtgtacaaataggcgaaaatgatgaaacagattaataggaatggcatggaagaagaagaaaaatgaacaaacagacgaaaaaaaagtggaggaaagtcggaaaatgacgacgaaacattgacgaaaacaaatgattaattgtgctaaatgacataattaggttaattacgttgttcaaattggtcaaatgcataatcattctcttcacagaagactttcattcatttcaatgcatcttttccatttttctgtttgttaattttactcttttcatcattttataattatcaccttttcattctcatctcttcgctagttcttgttgttaatcatccccctaatgattattaattaaacgtgcgcatattccaaaggtagtgaacatttcgctgtttcgttgcgttgcgcccactcaaattttatattttccaattgtaaaaaataatgcatttattttacttttttttttgcttttttcaaaactgaaaaaatggactaatcggcagcggtaaagagtaaaaaccaacgcaacggaaagggaagggacagtgtttttctttcccaattttcgttattcgacagtcaattaatttgtatttcgggaaagtaa

SEQ ID NO: 8758 - DNA, 1061 bp, Heterodera glycines
atcccaaattgtggcacttccggcgtcacatccaacgcgtctttgccgctttgcccgggaacgccttcgatgccttccttcccaggctttccaggcactccggggggtccgggaggaccggcgggacaacggttagccgacccagtctggcaatcttcaaaacagtaattagcgggtcccgtattgatagtactcactgcatccagctcccccagctgttccggtttggatgcttggcgggacgctgggcggattaacgctccctgggggaactccgggggaagcaccgccattagcatgagatgatgcgcctgaaaataataagttaaataaaattgacttctgttttccattacgattgcccgacggtgccgatacgcttggcccgccgctgaccgacgcacttccgccttcgtaccccgcggcagcgcgacgagttcgcgccttttggcccaacttcatcatgtcgcgccacaagtcatccgtctcggagcggaacagaaagatttgctggtccaactcctgccaaatttgttgcacgtcgttgtaaatgttggcgatcagcagcagacagccgagcagagaaattcccgaaatggaggaggccaagaaagtggccgtgtgcaccttcattgttggcttttcctgctaaatattaaaaaatataaaatttaacagtgcttttttggtaataatattaaattaattgagcgattggaaagctgaaatgctttggctttagctgttagtttcacctataaaaatgtgcgatcaaatgactaaacaatgctcgttttatactcccccccccattttcagcaggttttactaagaccacaatagtggggaattcttcgcattgagacgattaagcggagaacaatggcaaagcgtaaaaggggtaaatcatttgcgattggaaaagccacgggggacggaagtttttaatgcccccgggcagtgagcatcggatcggattgtcttgtgaactgattggacagagcgaagcatccatcccttaacgcaccaagcaaaatttgcgattaaacggcaccatatta

SEQ ID NO: 8759 - DNA, 4219 bp, Heterodera glycines
tttttttaaaataatttttcaggggtaatttttgaattctaacaattaatttagatccggattcccgagcccctggaccttaaatttcgaacaaaaaagtcgaagtttttatcaatttttagaacaaaaaatgaaaaattttaaaaaatttgaattttaaacctccagcgaaggcgttttacacggctttttgaaaactttattttttcgaaaaatcggggggggggggggggtcaaagcacattattaccgacgaaatactgtagttgactagtcaaaaaatttcacgtaacacacgtaaaaacataacagctaaaaataaacgtcatatatgtgttcagcacataaaattaccctagaaaatataattttaaaaaaatttcaggggggggtgaaaaaaggataagaacaagggatgggccaaattgaaaaataaaaagcggggaccaggtcgttttggcgccgacgttttggcgccgacgatttggcgccgacgttttggcgccgacgttttggcgccagggtcgttttggcgccgacgttttggcgccaagccaaaaatgaaaaaaaaggcaggaagaaattgtaaaaattataaaaaatgaaatttttcgttaaatataataattaacaaaatgaagaaatggaaacaatttatttggtagaacattggaggtgccaatgaaaatgtgccgtctccgaaacattctttcattcgatcagcccaccggccgaagctggccttcatgcgttattttaggcttttgttttttcgtatcaatttgacgattcattacctaaatacaaaattaagagaacataagccaaagcgaaaaagagtaaatgaagaattaaatccggctctttgatagacttcgtcagaaaaattataacgatttcatcatttctacccccctacatggcgtcaaaacgtcggcgccaaaacgttttggttgttttaatctattttagaaacaaaaagagaattttgaaattttttattttcgattttttgttcgaatttcggctccgggttccgaattggtcgaaatggatgcctggttcgtgagcagcgaccctgaaaaccattggaagcatgttttcatgacttttgaaaacaaaaaaattttcttcaaaaaagggggcaaccaaccatcggcagtattaccttcgcgaaaaatacgttttttttgttgttttacaaaatttttaaatttgggtgtttttcttttttttattatagcttggcgccaaaacgtcggcgccaaaacgaccctggcgccaaaacgtcggcgccaaaacgtcggcgccaaaacgatacggacccaaaaagcgaaatgcgaaaagccaaaaatatgcgaaacacgaaatttttttcaaaaattttaccaatagtaaaatcatagattttgtggttatgattcaaaaaaaatctctgaattttccggttcaatctttttctcagatcacaaaaaaagacaaattctacccattttgaggttaaaatttcaaaaatcaaggtaacatgaaggtccggcggtgccgtcaggcgccgccaggaatttttttgaaaattgtaataaaatatgataggaaaagttgcaaaaatttcaaaaaatttactattttttcaaaaatactgaaaaaggcatgaaaagtcacaaaggtcaaaaaaggcacgcaagttagcaaaaaaggtaattattaatcctgcagctcaaaataataataaactgaagcattcgttttaaaaatttaaaaatatattcattcttaggagtggaaatttcgcatttcgcgccaaaaagcgaaatgcgaaacgacaaaaaatgcgaataatgcgaaaagcgaaacctaggcccatccccgacatacatgatcaaggggtgcgccggcgcacccccccccccccccctcgttcgtcgtaaggggggcggctgtaaaagaggaagggggtggggtggggggggggtcggcgaagggaaaagaaggaaaatattaaaccttaaaccttttgtttaattttcgtagcaaacttaaaatacaacatttattccgcagcggctagaaaagtgaaaaaaagaactcaaagaaatatactataaatagccttcctttccgggtctttaaaatatgcatcttttctatttgtttcaataaatccgtcaatatcaatttgttcaacctttctccatatatcaacaaaggttcgtcattttcatcaaagccactttttgttgtaaaaccatgcgtacgcattttactatcactagcaaaatgtcattcttccaataaccaacgttctttaaatgaatgcattgaaatttgttcaacaggtgggccattgaggcgcactctcaacttagcatctagattaagcgccgtaatccttgcagatctaattttggaaaattataacatccaaaaaagtaaaacaacctttttcctcgtacatgaaataagacagaaaaggctctctcagcatcagctgaacccaaaccaaaaataagcatatggtgtacaaaatttttcaattcttctccaaaagtatcccctagtttttctataactaatttccaaaatctttgaggagttagtgagttcttcaaactacaaagccggttgtcattcaaaataagagaaagaacgtttgaaaattcctgataaattaaatgcccaacatagttgtaataattcgccaatttctttagcttgtttgcatattgatttatatcagctgaacgattgggtaaattactaggatctaagagatcaatctcatccataagcgttccgaaaggaaaatactgtttgatttccgcaacaatattattaatcaatttttcccgaagggctttattgaattcaggaataggaggggaaattccaacaactagattctcttcggcagtcgatcgtgtatgtgcttgttgtcttaacatatattgagcatgttcatatcttttaccatcagttgcacacagaaaatcagcctcatagtctgagttttaattgccagtcataaacattcttaagacgtgactgaaaaacgatgagcaaagcaatggattcccgtgagttttttatcatgatttatgaacttttctaaatgagcaaataaaccacctcgtgttccacgcattacagaagctccatcactgataaacccatataatttatgtttgattatttccgttaaaccgtcttcatcaaattctttttcgagctgttcaaacatatatactgccttttcagaacgaatatttattagtttgtattttaatataattttaatttttatttgatccaatttcgtgccgctcgagaatcatggttaatttagtgattaattttataaaaagaaaattcaattttaaaaccgcacttaatttggcattattatatgagaaaaccgattaaattcactccttaagattttggcaattcgttaagaaatgaaaaaactagagtagagcgggaccgggaccgggaccgggccgggaattcccggtcatacgaggtcccggttcccggtttttcttgcggtcccggtcccggtcccgaaaaaaaatcgaggtcccggtcccggcttctcaggtcccggcaagtcccggtcccggttttggcaaaaattcccggtcccgtggcactctagtaaattggccatggaaaagggacgaaaaaaaagtaaaatgcctcttttaatgttaaatggcctaaaatgtgcaatgaatgaataaaaagtttttttttgcagaaaaaatggattgggacgtaagtttttagtattatcttttaacttttcagatgaacaaaaattaatatgatttttgttatattttttttcgtaagcctatttttaattattttgtgtgttactaaagcaatcagaattttaaattttagttttataggtttttaaaaattaattaatgataatgaaactttgcttttatttttttaaataataaaattattttgtaaatacccgtaatgataccaaatttgttcaaatttttttaacattcaatttactagtataagttttttttctcaacctgatttttctcgtttcattatgtgattgatgcatgggattatttataaagctggatttgcaatcattaatttattatttgaattttctcatttattactattttgtaattactcattaaaggtaatagcataattatttatattttttgtctctttaaaa

SEQ ID NO: 8760 - DNA, 634 bp, Heterodera glycines
aaattcaaaattgcatatgtaaattttgaaattcaaaatttttacaattgtctataaaagctccttagtcattattttggagtttttatagtcaattctgaatttttacataattttttgggatttttttatggttaaagccatttttggcagtttttaatgcatagtttagtgcatatttggggcatttttcgtgtttttagggcatattttatgcgcatatttagcatttttagtgcatataatttatagccctactcattgtagattaaaaaagtctctataagtccaatagcgtggtgagccgaagcgaaaaaagtattagtgcgggcgaagcgaaaaaagtatgagtgcgggttgatcggaagggtcgggtcatttcagtacggaagagttattctaatgattaattaattatttaaatataattgaatatcaatttaataataaaattatatttggctctatttaagtttacacgaccacaaaaaaagacacaaccatagaataatttgacaaatttaaggcaccatacctttttcaagaagcatcctaattaaacatccttgatatcatttgatagcactaaatgtcctatattttcctttaaaatttggttgagtttcaaaaaaaa

SEQ ID NO: 8761 - DNA, 2670 bp, Heterodera glycines
  unsure (1)..(2670): unsure at all n locations
tttcattttccaccccaagtaaccgtctcgaatggttccaattgcatcaaatgcactaaaaaatacacccttttagaaatgtttgcgtgaaatgcctattttggatgataaattggaggtaccattaaaatttaatgcaaatgatggctaaaaattccatggaaattgttggttttcatccttttccgtttttgtgcattttccctttctcatctaccacctaaatattctgctcatttcattcagttgaatccgtttcattttcccacaaatatcattggcattcatttccaataagaaattagagagttccctcaagtccattactaatttaattttatcatcaccgcgtcgccctcatattgggctttaggggcaacaaacaactttctttccatttaaataaatcaaataaaataatattgcaaaggatatgttctgctgctgttttgcttcgacagtgttcctgctgatcaaattaacctttactatttgttttattctgctataatcagttattctcattccctccccatttacgctttttttggccttcaacaatttattttgtcatttcaatttgtaatgcatcactgcttccgtgggccaataataaaacttttggttgaccgctttaattaagaagctccttcaatgcctaagaccaagaattaaaagagaaatgcggacctacctaatccgtattccgttaaatgagtgtcgaacgggggggggggggggaaaggggcgaaatgggcttcatctatcgctgcgcgatgacaaatattgtctctagatttccaatttcaaattaactgatgtacttagtgaatatgatttcttcgaactaatccatccgatgtctctccttccgtctccgcatttttatccaagtccatcgcaattatcattaggcgcgcaatgtccgtccgttttctatttcagtacaaatggaaggaaaaaatcgctctttcccctctcactgtccacacattatggaaagtgccaatttctttttcaaattaattattcaattgttgtggccactttcagtcccctcctccacattcattttccgcatacgcgcaattgtcaaaccgaatagaaatgttgtttcgttacaaaggcgtacacatcagcaaatgtgagagctttttcaacaatttgcatttcgaatgaacaaaatgtgtgtcccccgccttcgctaattgcctttggttccgtttaatcctttacaaaagcaccaatttgcataatttcacccatttggacgttaaaggactaacgcatccaaccaaataaaaataattgctcacagcttggttaatttcttgtctgaaagagtttcattttgcagtcgaaaacttttagcgccctctcaaatccattccgactttttttcctgcgcaataagcaaatgccctccctccttctcctcccaacattttgcttcttcgcctttgccgtcgtagtggcccattcccagatgactttctccgatggttggggaaaacgttcagcggttgcgccattcgcattgcttgcggacagacatatggcgggaaacaaacggcacgaaaagccgagggcggcggccaatctgttcatcagtcgtaagtacatttttggaaatgaaagattggacggatggttcagcgacggatgaggacgcactggcgatgagcccggcaatggaagcgtgtcaagtgggatacgcgcaaagactgatgcaactgcacgagcaaatgctggtgagaccgatggaccaatcactgacagtcggaagcaaaatgttccgtccgtcgcttttagactttgttcagcacgtaccaacaatgtcagacaaaagcgacgatgatggagacgaagaaagcgtagagaacgacgagagaaagaaagggacgaaaagcaaaacgaagccaaaagcgaaaagacaccaaaggaaaagccagtgtcactcaaaagtaattcattgtgtttaaagctaaattagtcattcgttgaagcaaaatgccgaggggaaaagaaaaactcaccggaaaatgcccaggaaaaggttcagtccgtcctgcttctcaaagtcgccgaaagtgttgctgtaatagcgcgaaattgtttggaacacatctcgacttctttcctttaataacaaatttggagaataattaaaaccattcgcttgcctttccgtacctgaaaaacggctgtccttttgtacgtttttatggaatggaccaattgagaaccggcatattgccatgccaaagtgttgccgtgctcatcgaacatttcctcaaaaacacggcacacctcactgtgaagctgcaacgaccatggcaaagccaaaaagcccatggagtaaagttgccagccaagtgccaccttcccttacaaggaaaagcctaatgtagtcacgtgtatgaaatttaagtggtattaacagataaaaggctcgacgcaacacacccaaatggaaaggaaatccaaccgattccgaattggacgacatttgtccggtccaacagtccacgcaattcgaacgaacgacgccatgctgcaaaagcattcgcgcgntccggncgaaagtttgggcagtgaaatgagaaatgttttcttcgattttttggaggntgcgcggaggacatttggtcagcaaaatgtgagggagtc

SEQ ID NO: 8762 - DNA, 3537 bp, Heterodera glycines
  unsure (1)..(3537): unsure at all n locations
agactgatgcaactgcacgagcaaatgctggtgagaccgatggaccaatcactgacaatcggaggcaaaacgttccgtccgtcgcttttagactttgttcagcacgtaccaacaatgtcagacaaaagcgacgatgatggagacgaagaaagcgtagagagaacgacgagagaaagaaagggacgaaaagcaaaacgaagccaaaagcgaaaagacaccaaaggaaaagccagtgtcactcaaaagtaattcattgtgtttaaagctaaaattagtcattcgttgaagcaaaatgccgaggggaaaagaaaaactcaccggaaaatgcccaggaaaaggttcagtccgtcctgcttctcaaagtcgccgaaagtgttgctgtaatagcgcgaaattgtttggaacacatctcgacttctttcctttaataacaaatttggagaataattaaaaccattcgcttgcctttccatacctgaaaaacggctgtccttttgtacgtttttatggaatggaccaattgagaaccggcatattgccatgccaaagtgttgccgtgctcatcgaacatttcctcaaaaacacggcacacctcactgtgaagctgcaacgaccatggcaaagccaaaaagcccatggagtaaagttgccagccaagtgccaccttcccttacaaggaaaagcctaatgtagtcacgtgtatgaaatttaagtggtattaacagataaaaggctcgacgcaacacacccaaatggaaaggaaatccaaccgattccgaattggacgacatttgtccggtccaaacagtccacgcaattcgaacgaacgacgccatgctgcaaaagcattcgcgcgtccggcgaagtttgggcagtgaaatgagaaatgttttcttcgatttttggaggtgccgcggaggacatttggtcaagcaaaatgtgagggagtcgagaatgaagaagagggaaattctgaaggggggtgtattttgaaaacgaagcaaaccaacttggaaccatccgccggacattgccacccgttgcccaatttcctccaaacgctgcaaaacgcggccacttttgttgcaacgactgacatcgaaactgatgtaatcaatgcattcgccaactctgcggaaatcgtttaaatagcgaacagtctgaaaaaccaaacgaaatgaacaatggaagaaccaaacaaatgcactttcagaaatattttgtggagtaggttctcgttatgtctgtgctcctctctcttcaccaaattcagcaccaccaacggatgtccgtattttctgcccaattctctgaagtgtttggccgtggtcagtgcgtgcggctccacccgatcgatcaaaatgggcggctttccgacgaccattggggagccgcggtgggtggggtcctgcgaccaaaaaagcggcacggagccgcggcgttggacgaaggaggagaatttgccggaacgaaaggacagaggactgctcgtgtcccaaacgacctgctcagtctcaacgtcgttggccacagctcctgaaaagcattttgagcatcgcaaaattgaagaaattaaagatttgataattgcaccctcgcaattgacgcctctcttgagaaaacgggtcccagcaaaggcggacgatcggcgagcaatcagaataagatccaatttggcacaaggcaattccaaaagttggtgggcttaagcaaatgaattgaattgatggtttctccatgaaaagcgcaaagaaaaagcactaaaagtgtgtcaatcacggagaatgggcggttcctaaattttacttttttgtttgtgctaaaaattaaagctctccattctccatgattgatgaaaatctcaccgacaaacccacgcattaattccagtgtccatttgcgattgacctgtaaaagttggacagttcttcagaaaatgccacttgtcggattacccccgccctatacaatggttccatcaaatattcgttccacacaaattttttctcgggtcctatcgtttttccgtaattatttcattcccatttgtgggcaaatccggcgagacaattctcttgcagagttctgctcaattggtatgtgtaagaaaagtaaaaatcagcggtgaaatcgacagactgaacagtagccaaaaatgaggaaaaatcagtcgtttgtgctttaccaggaaaagtttgctgtacttcgtttcgtcgggatgggtggcggcgccggtcgccggaatataaatcattgaaacgtcctcaattttgtaaatggaatggacgccgatggaaacgaccattttggcacgagagacaatctgaaaaacgcaactcaaagcgtgtgtttggaaggaataacatgaaatttgcttgttttaccaatagataaaatccctccatgaagcgaaccgcgccaatgattccccacgccttttccacggtgcgcaacaatccgccgccaccagcgcagctgcgccgtttgttccatttttcagtgggagtcacaactacaaaagaatattgggcgtcttcaacagtcatttcaaaatcaaaaaaatcacttgaagacgacgaaacggtggcgagcaattcgccaatgtcagctaaacaaattcgatttaatgaccgaaagctgagttacgcattaattaattaaccttgtgtgtagtcttggtcgggttcagcagctatgaattctttgtcagtcacccgatcaattttcaatgttcgaaatcgttttccctttggatcggaaccgattatgtaaaaatgagccgctgtctcataaacactcaaagaacacatccgatccgacattactatgctatgtacatattcattcgaatgagaataatggtaaatccacgaattctggctacgtggccttattggcaagctgaagcagttattgccatacaaaattagagcctggaattttggaaaaatctggattgggattggcatcaggacgggataggaatactgggaatcaatcccaatactagattaaaatgcaaattgcttgttattaatgtcgtcaataccctttctcgaatacaaaagggatgattttgtctcttctgcggtttttgtcacaacggaaaatcattcaaatcaggaaacaaatgataaagttaacaaacacaattaatgaaaaataaaaaaggcatttttcagataaaacataagcttctgtttgcgtggaaatgtgcacaagaaaagggcgttttgaattataaattgagtgacagcaaatccaaacaaattgacggcaattatgctttttcactgatggttttgttttttcgtgttccatttggaacccctttctttcttcaggtcaacaaagaaaggagcagaaaacggagaagcgcggaacaattcgacaatctttgccaacctttcgacgaggaaaaatggaatttcactcggctanaggaggaagaggtccgtgccatcaaaggataaagtgataaaccatagtgatatcaaacggaggaagaatgacaatcgctaatcccttcagtgcctc

SEQ ID NO: 8763 - DNA, 1269 bp, Heterodera glycines
ggggatcccgacatttaggggacccgacttttggggacctgacttttggggatcccgacatttggggatcccgacatttggggacccgacttttggggaacccgacatttggggactaacttaggagacccgacacttaaggaacccgacttttggggactaactttggagacccgacacttaaggaacccgacatttggggactaactttggagacccgacacttaaggaacccgacatttggggactaactttggagcccgacacttaaggaacccgacatttggggacccgacttttggggactaactttggagcccgacacttaaggaacccgacatttggggacccgacatttggggacacgacttttggggacccgacttttggggacccgacttttgggatcccgacatttggggacccgacttttggggacctgacttttggggatcccgacatttggggatcccgacatttggggacccgacatttggggacccgtcatttggggacacgacttttggggatcccaacatttgggaacccgacttttggggatcccgacatttggggacccgacttttggggatcccgacatttggggacccgacttttggggatcccgacatttggggacccgacttttggggatcccgacatttggggacccgacttttggggatcccgacatttggggacccgacatttggggactaactttggagacccgacacttaaggaacccgacttttggggactaactttggagacccgacacttaaggaacccgacatttggggactaactttggagacccgacacttaaggaacccgacatttggggactaactttggagcccgacacttaaggaacccgacatttggggacccgacttttggggactaactttggagacccgacacttaaggaacccgacatttggggactaactttggagcccgacacttaaggaacccgacatttggggacccgacatttggggacacgacttttggggacccgacttttggggacccgacttttgggatcccgacatttggggacccgacttttggggacctgacttttggggatcacgacatttggggatcccgacatttggggacccgacatttggggatcccgacatttggggacccgacttttgggggatcccgacatttggggacccgacatttggggatcccgacatttggggacccgacatttggggattcgtcatttggggacacgactttttggga

SEQ ID NO: 8764 - DNA, 2216 bp, Heterodera glycines
ggggatcccaacatttgggggacccgtcttttggggatcccgacatttggggacccgacatttggggacccgacttttggggatcccgacatttggggacccgacttttggggatcccgacatttggggacccgacatttggggacccgacttttgggtcatcccgacatttggggacccgacatttggggacccgacttttggggatcccgacatttggggacccgacatttggggacccgacatttggggacccgacatttggggacccgacttttggggatcccgacatttggaggcccgacacttagggaacccgacattccctaagtgtcgggtccccaaaagtagtcccaaatgttgggtccccaagttgcaaatccccaaatttcgcaccacgggcggctcccggacttttcgacagaaggacttttcctaaaaacaactaattcttattaaaatgaattatattgcttgtcagttttactaaatttattttaaattaacatgctaatatttattgctaaatcattattactagggatacggttttttggttttttacctagaaaaacttaagaaaaatgcacccttaagaatcggcccctaaaattttcaaaaatactcccctaagaagattgaaaaattttctcaaaactcattcaaaacttatttatttattttcttggtaagaatttttgatttttaaaattatttatctcaatactgatctggcttaattttgttgctttttcgataaaattttacgattttatacccctaatttagaaacttaattactctttactgtccaaaaatcccctcctcaacatttaaatatttctgtcgaaaagtccggcgcccccacgggcaccgccgtgtaccccactgtttttcatcaaccaaaattgagtatttatatgcttagaggcatttatagcaattaacaaatgaataaataatagttatttaactgtccgcttatatttttattatttttttttctgtaatattttttggtattaattgacagttggctcagacgaagttggcccgttccgaaaaaattataatatacaaacttgaaaaaaacagattttagggtcgaaaatcagaaaaatttttcaaattatttggactatatattcaatagatttttcaatcaaaaattattatttttaccaaaaaactcaattcttaccagtgcatttttactcccgttttttgggtaaaatttccgggagcgggatcgggagttcaaaatttaccggagcgtgaattccgtaaaatcccgcgggagtcccgatcccctccggtctctagttaaaagtatcatgtaaactgcacaagtaccgaaattcatacattcgatatatagaaaacccatttttatacatccgatttatttaccgaaattgagagggttttcttcataaaatgcatttgatcaatgatataattatggtcgatcggtaatttctaattaattcatttcttctgccggtggaggagacaatggccttaattaagcgcaattcgaattatttaaacaaaattaaatgtcttttctaattgctcacccaatgctattagtgccaccaacatgccaaatgatcacattgttaaaattgttgatccacttttcatctttcttctgctgctgaacgaatacggcctccccaattttgcatcgcttcattatccaatcgatgccccatttatttttcattactttggccaatgccagcttttcttgcgttcgtacgttcaccaattcaaatggcatcatttgcattaatggcacatgaacagaaaaatgagtaatattttagatggtagcacaccttttttgacaaaaattttttaagttttaaaatttgaaaaacatgtcttatcgggttttcggggtcactgatcacgaatataacaaagattctgttcgacctatttcgaatcccgaaccctaaggctaataaatgatcgaatgtgaattttcaggataatgtttcttcttctagagaatatctactttatagaaatgataattaaagatattttctgttttatcctagagaatgtgtctttggcctatttataaaaacgtaaaagactacagcaattagtcttgaacgacaagaacatgacaagctataatatgaataccagattgccacaggaccggatataacttcgcatactcatcgtcatgccattca

SEQ ID NO: 8765 - DNA, 1091 bp, Heterodera glycines
ctaccatctaaacaattaccgtaaaatgaatttcgtaactgacggaagaaatggtggcacggagaaaatgctaaacaatttggaaacaaaagcactgatttgtcgaaagtatggccacacctccttgaagttgtggatccaatctaagtccgcttgtgcgttcaaatttctgcgaaaacgcaatcgcttgggttggccatcttttctcggaatgtgcaaccatttggacaatgcttggccagcagaaattgttgaatttggcccatcaaaaccatcaccaaacgcagcgggcgataaatcaccggaatagattgaattcaattggttgagatcggtgagaattgtcggcgaaatgagacgacgcaaattgtccaaatgatcatcatcgttaaagcccaagtggcgaatgtttgccgaaaaaattggccaaatttcacgaccaaaaatgtccaaaatctgctgcttttccatggtgtatgatgatggaatccacaaatataaattggtgcctcttttgtcgaaaatttgatgatttgaacgaagaaaagcgatgacggagtgaccgatgtacctaaaatgggatgaatgcttttattgccataaatctctgattccgaattactcaatccgaagccatttaaaacggattttgctgggcaacggacggtccggcaatggaaatggcacaaatttgtcatccatccgcacagacagcttcggttctggtcctttgtccggctcaagtacagtttatgcgtccaatcgacttttatgcgtccaatcgacttttatgcgtccaatcaatttttatgcgtcccatcaatttttatgcgtccaatcaaatttttatgcgtccaatcaatttttatgcgtccaatcaaatttataattctaattgcattatattgacaatattgcgtcatttctagtctattttacaattccccaattttgaattatacggggtaatttagtctcatctcctccaaaatatgctgaaaaattttgtcgtttgcgtggtatcttctgaacatgtactgatacaaatatgtcggcagcatttcctcattgaaccacgtaagtgtcggaga

SEQ ID NO: 8766 - DNA, 2008 bp, Heterodera glycines
  unsure (1)..(2008): unsure at all n locations
cgtctcgaaaataaattcaaaagtcaaattacggatcaaatttgcggaccaaaaatccgtannccgcaatccgtaatccgcaactccaaaaaaccccgcaatttccgtaatccgcaatccgcaattgcgcctagccctggagtgaacacttttttcgactcaattactctagggccaaaagaaaaacaataaattttttaaagtagcacccggaatgctattaaaaaatttatatgaatctattaaattatttctttgtttaaaatagaaaaaaattaaattaatattttaattgcgaaaaaaacaaccaaaatgactgaataataatttaattgctttaaataaatcaaatcgatggatcacaaaaaataataagaaaatcttgaattatcgtatcttcttcttccatacttttcacttcacattcttccggcttagtgaacaaggagatcatcaaagaacttaaaattattgaaatattaattacctatgttttatttaaataaattagattttcgcgaaattatcagatgaatgcttagaattttttaaatttattattttttaaaaatgtttgaccatacgaaatgaaaaaatttgatacaaaaaataaaaaattgtagggaaagaaaaggggctggcgcccatttggttggcgcccatttggctggcgcccatttgattggcgcccattcggcgtcgcccatttggcagcgcccatttggcggcgcacattcgacccggtccgaactattttgagaattttcgtcactaaaaatcataattttattgatcaattacgcaaaaattatgtgtcgtcgatgaaccctcagtttttaaaaaaacttctctagtgcagaatggctgatttttcaaacatgccgtaaaatttcaattcgacattttggcaaaacctgttaacaaatacaccatttgattcaattttacagattatgtaataacaacaatacatttaatatataaaaaatattttaaacaatttaaaatcggaaaatgtttcacaattttcattggagaattgggttctttttcctaagattttcccaaatcaaaagctattttagtgaagataattctttagggcgtttttcattcccaacctcatccttaaatttgcaaatttttattcccatttaaattttgctataattttctctttaattaattgtcttcataatttaaacgaccatcagtttacgatttaatctatccattcgatttccattcctacaattagctgaattggtaattaattttttgcccatttctgatcaactttgggcagtggaactgggcaaaacaatgattcattcacacattatattttagctctggaaaacagaaaagcgaacaaaaatgggcatttggggatggaaaatgagaaattaatcatcagaaaacagaattattagccaatttgagtggcttccattcttttacgcccattactccacccattcacaaatcgtgttgaagccaattatgtgcataaatagacggattaggccataaaaaatcagtttttgggttgcgacgggatggcttcaacaaatttcattcaattggattttgtagtctttttttttgttaggaattgaattcttttcatagtattatcaggatgacaataaacaaaagattttgttttttggtaggctaaataaaaaaataaatgcaaaataattttactggagtaacagtcaaaaaaaaaaattttgttttttttgaaactttgttttttttatcactgagaaaatcagtagtttttttgtttattgatttttaagttttatatttgaaaaagaccagaggcttaataatgagtgcaatttggcatcactgatgagatcggtgtggtctgagcttcgcgccaagcactgatggcttcaacaattgatagaaaaacgttagtgattaaatcaaataataaaaattaattattttttgaacttaatgggatataatatttattttaagggcccatttt

SEQ ID NO: 8767 - DNA, 2962 bp, Heterodera glycines
tatgaatgtgaagctggcggcaccgccttttgtatatggagcccattgttcggacacttttctactgatcgttgacagaattgtaagtaatctgtcggataaatgggtcacttggccatcatttcccttctccaataaatattttgtactttttttcgcttttctaataatttccccatagacgaatgaataaccccactaatttttcttggctgctcgtcaacaattgcgtttgtcctgtgaaggacaacttatgttaccattttccgggctataaaaagccggtgatttgtgcccataaaatggtgcacaacattacctcattcctttccactcccccgcacattcctaatggtattttttctgtttgcttataatttaattttgttaaacaataacttattttccagaatcggcacccgcgtctctttcctcgggctccgtgctgcagctgcttatcgtgctccaaattttcatcattttgcttacggtgagtaaaaattatttatcataaaagcgaaaaataatttatttatgaaaaatatttaatttctttaaggtggctttatgctgctgtttgctcgtttgtgccgcgcgaggtcgaacttacacggtgaatggtcgccgttccactcggcgccgcgctgccgctgcaactttgagcgcctttcaggcgcgcacttcgggtgggcgtttttatattaatttgttataataaaaatttattattatgtttggggtgagggaagggctggatttcggtttttgaaaatcatttttccaatttcagcacttggtcttggcaccgttggtccgttggcggttccaaaccgtccggcggattccacttctcatcgtgtgccgggtagcgtgacttttccaatttatttttttattttaattttcatttattttttaggctgaattgtgccagatggtcaacgaatgaatgatgtgtgaagaaaatggggataaaatttttaaaaagaagaatgattggataatatttaatcttttttttgccttttatttttttaaaatttaataaaattttgggatattaattaatttaattttgaattttaagttaatcaggttagggtgtaaaaaataatataattatagtgtatactcagcaatatgttttgtttagacactcccttcccttaaccactcccttgacaagcaattgaatatttattaattgaaaaataaacattacaaattattattgtgtaatttcggatttttactgctgtccggtttttactcggtgcgtttctttgccttgggcggcgcgatcaaatcagtggcccgagcgttcacccaagtgcactcctcgcacagttcaaaattgacagcgaagcggccatcatccttgcgcaacaccctctgcttgttgttgtacaatttgttccaatcatctgagatttataagtatttaacaataaaaaataaatagttattcaccaacgcagaggtagaaacccagcatgtattttcctttggcgagtttccacaggtctcggtcctcgacttttcgctttttcattgacggctgctgctcctcaccaccattcattcccacattttttgacgactgcttacgggtgggcgctttcaaggaaggaaccacaaattcagcttttccaacattgttctcctttttgacgggggagctttttgtcggagagaatttgcttggggaggacatttcgatagaattttttgaaaattttgcaaatgaatcctgattttgggtaggtgaaggttgggaagcgaaaaatgggcggagcttcgaactgtcgaaaagtgggcggagcctagtcgaatgaaaacatataaaatcggcacgcttttgaacttccacacgatttcgcaaatcattcttaattttaccaacaaaaatggccatcaacatgagcgacaagcggggcttgctccgacagattctcggcgaagcggaaatcaccgtaactacgtctggcctgacaattagcggcccccgtctgtccacacctcgattcctgccatttgacgagtgcggtcgctgccgctcatgtaaggcaaccgaagtggaggttgacacaatggtgacgaaagagggggtcacgatttggtgcacgcgcatcgacaaagtgcagttcgtgccatttgacatggtctacgaattgccagggcactgcttcttccgactgaaaaacaagtcgcgcgtgttcaaccttccatatggcgacctgccctctgagtcgtgtgaaattccgctaattcaacacgctgatgatgaacgggacctcaagcgaaaggcaaaagctgcgctcgaattggtggaggccggactgattgcggacagcactgtgcaggacggggcccgattgaaaaaagccaaaactgcgatgaaagtgatcagtgacattctgctctctgaaccggagggagatgatcacaagaagacggttgaagtggcagatgtcgacaagcaggcacaagagcagcaaccagcccctgtacaacagaagaccgcctcggtacccgctgtggaacagagcactgttgaagagaatacggaagaagataccaaagatgatcttgactgacattgatcgaacactctatgaaatttttgcgacgcgtcaagccgcacccacctaaatgattacgaatactaatatacatcctacatatatattagtgcacgatatcacttgttcacagtaatctctgataaatacacatcgcgcattcaattcaatatatttggatattttgccctaatgagaaacatatataaaagatatcttcgtatgaaaaatgacaatatctactatataatatggacagatacttccaaattgactcttgcacactgttattgaataaaaagttgcaagatggttgcagaacgcattagttataatactgagccaaaccatgagattataatacaaaaagaaaattttaa

SEQ ID NO: 8768 - DNA, 4774 bp, Heterodera glycines
  unsure (1)..(4774): unsure at all n locations
gtatgctgacgagcattctcttaccaatgttatgaaacaatttactgccaaaaactaatggataaatagataaaaaataaatatataaaagcgaaacagctaagagagcactcgtttaattaaacattagagagagcgcaaaaaatgcgtcacgcaatgcgaatgtttctcgttccggttgacgtctttcagtcggtatttgttcaaccncaagcagcaacagcagcagcagacggtgccgacggtacaccaattgggcttttgcgctcacgcatccaacaaattgagcgtagcagggagctgaacgaagagcagaaggccgcgcaataccatcaagaattcaaacggctcaacaaactggtgcgcgagcaggaggagcagccgatcaatgttcgacttcagcacgaaaaggagagagaaaaaaatgcagcaacgccgccgccgccgccgccgccgcaaacgataaatcattcaacgccaaaaagattggagaaaaacattgtaccatcagcgtttgggttgaggaggcaaagacaccactacacacaaaaggcgggggcattatcaaatcgcagacctgcccaaaaacaacaaagaaaagcagcagcagcagcagaaacaccaaacagcagtggaaatggagaaacgggaaaagaagagggtgatgtagatgatggggaacagtgggacgacgcacaatcatcatcatccacggcgtcaacaggtggtgccgcagcaaaaagagtgctcagagcaagagatggggaagcaggaaaaggaggaggaggagaaacggctgatcgccttcaaacaaaacacaactaccagatgaccaaaaatgcactgatcacacacattcaaaaaaaggggcacagtctgggagtcagtgatcagggaaaggttttgcgcacagatgggtccgagtttaaaacgagcaacgtggaggcaattgtcagccatttgttgaacagggacaagcgaagcgaattcaaagggccgcctgtgggctataaggaatttgctgaaaaggctagagaggatccgttgctaaaaaagtatttgtttccggaacagcctctacaatttggcaaaggcctgactgactttaagcatggaaaaggacataaaaagaagtgcgaagggggaggagggaaaagtgtcttcaggttcaaaccgacactatggtagtcgaccggaagaaagaacagctgttggaccagctgtacaaagatgttaactcatcggtcagctttaccagcgttgagccgcttttacgcgaggcgaaaaaggtgaacaatcaaatgagtagaaaggatgtagtggactatttggccacccaacgcacatacaccattcatagacaagcgaagaggcgctacaaacaactaccaacactcgcttctggactgcacaccgaatggcaagcagacctgtctgtctttgacaaattgtcgcaagagaatcacggctacaagtaccttcttgtctgcatcgacacactgagcagacagctctttgttgagccggtgaaaagcaaaaagagctccgacatggttgctgcttttgaacgcttgtttaaacgctccaaatacataccatggacattgttgaccgaccaagggctcgaatttaaggcaaaagaggttcaggaatatttcaaaaataagaacgtgaaaaacttttttatgtacacctcgccgcgaattcacgcagggatggcagagcgggccaaccgaaccatcaaagaacgcctttatcgctatttcacggaacggggtacccaaaaatgggttgatgtgatacagcaaattgtgcatggaataaaccactcgtacaactcaagcataaaaatgcgcccagttgatgtgaattttgagaatgccgaaaagctcaggaaaaaactcaagcagaacgctattggtgggacagcggaattaaaacggaaacaaccacaaccacgtttccaggtgggtgaccgtgtgcgcattgagaagtacaaacacgtgttccaaaagggctacaccggacgcttcaccaacgaagtgttcactgttgccgaagtgcacactgaccgctttcccgtcacgtaccgaatacgtgatgacgacggttccctgatcaagggccgtttctatgccaacgatctctgtcgtgtgctagtgcgcaaaaatgatgatgatgatgatgatgataccctatatgacattgaaaaggtcgtccgaaagaggaaaaagcaaggtgttgaatacgttttggtgaaatggaaaggctacagtcaacggcacaacagctggattcctgcaagctcgatgacatggaaaaatatataaaggggctcttttttttttaaatttcaaatgagaatgccttcatcaaactcattctatgtgatcgttccttccaacacaaatgttgaaggaaatcgcacaaactcttttcgagttcgactaccaagaaaacttcaatttaattcggaatgggatgtgggcttaggtgtgataatatacccccattcgtggccctcactcggcacatcagaggaccaatttgttcaaattgaatggaaaattggagagaatgttcaaataccaattccatcctctaacgtgacaaaccccgttgagctttggaaaagtctttacaaactgcttgaagaaggcaacaaaccgttcgcagttaaagtggaaggcgtacagaaaaaatttactgaagcggccaatacagcacgtcaattgggcagagccgagtacatcaataaacaacaacaacaacaacaaagagacaaaagaaatgttaatgatgatgatgatgatgatgatgacgaaaacgaagaacaattattaaacgcccttttagcgggggttgacacgttgcttgacctttacggagcaaccagtggtggtctacttgagagagaaaaacgtgcagcaacaagcaaggtccccctgcggaattgggatgacactgaagaggaatatcaggaaaagcttgataaatattttttgcgtctacgtggccgtaatttagaacacttagagggactgataacagaaaagttgaatgcggaaattgcactgatggatgacgaagaaaggaagattctcgatcaaaccaaagaattaggcatgacagcatggataaaagttttccaatcagcgtactctgcatgtttcctgcattttgacagtgcaacgaacagattttcgttgaaactggacgatcgttatgtgcaaaaaataaaaatttcagaccaattggcctacattttgggttttaactcaaccgatttcactgaaaaagaaacgattgcaaaatttatgccagacatgagtggaggagttgcttcttttcatgtttatgcacctgatctaattgaaccaatgatgattggtgacgtgattgccccagttttgcgtatcgttacgattcggggaaaacctgacgaaattatagaggagcagtttctctccgtccaataccatcgcgtactagtcaaagaaataagtgaaattttcatcgaaatcagaacatccggtggtaacctaatgccatttcaatacggtacatgtacattaaccttacactttagaaaaagttcctacttttaaaaatgaacagtgttcaaataaataaaattcttgctcgaaacccagtcacgcgttcgacctttttagggtgttttccatcagatcaaattccagcagtagcagccacaccagctccttattcaatggtgattaacgttgatccgagcggttcacctggttcacattgggttgccgtgtattgcgagcagcaaaatcgggtggaatactacgattccacaggaatttggccaccactaagccctttcatccaaaaatttttaaagagttttgctcaaattcagtttcatcaactctcgctccaagcaccatactcacactcatgtgggaagcatgtgattttctttatatttggacggtgtatggggatgcactttgaagcaattttgcaactgctaaaacgcgcaaaaatatcaccagatttttttgtaaacaaatttatgcaaaaaaatgtgtttaaacaaatataaataactagaaaactcaatttaaaaagcgcaaaaaaaaagaaagaaaaatgcacgttgattttgatccttttaaagttgaatggtcagaattaactcaaatttctccagaagtagtcgtccaatacggtggttataatgtgttcagagaagttccataccagcgcggtagtggtatcgggtctgtttttaggagtctattgcgttacctaataccaatcgggaaagaaatcgggacagccatcgggcgccaaggacttgaatctggaaatcgagttctatccaatgtattagagggtagggacctcaaagagtcacttgttagtgagggaaaaacggggctcaaaaatttgctagagaaagcagccaacaacataaatgcccaaaaaagtcaagggttcgacttcaaacgatacacaaagagaaatgatacaagagaaggtggtgcaattggtaaagcgaaaaaaggtataaataaactacaatcaaggttgggaccacacgatttcctaccagcaaacaccccagcaggtcggaagaaaaaacacactaaacagaaatcggtcaaacgccttcgtaccgatatacttggaacctattaataaaacaaccacccagaagcataantcatgagttgttcacaaaaaattagcgaaagtagtccccttgccacaaatagtgctttgaacattttttcagtac

SEQ ID NO: 8769 - DNA, 1357 bp, Heterodera glycines
  unsure (1)..(1357): unsure at all n locations
tgttgaatgtatgaggcacttggcatggctaattcagagcgttctttcgacatcacaaaagagcaattcaaatctggttggaccttttttgtaattccactcacatcgacgctcgacgatagcacagggtatgaactcttaagaagcgggacaactagcattcgcgcaacatttaatagtgcaattcctgagggcggagttgaaatgatagtgctgggtgaatttgaccaaatgataatgatagactacaaccgtcacattgtttccgattcaaagcttagttaattaactgtataaataagatgcataatgcgaaaaaatgccaccataaaaatggccttcttaaacactacagtcaacgccagtttaaagccagagatacaagtactaacatttgaaaacaaaagcgttcatcctaacctcctcgtgcaacttctattgcttgcccactatctcattgcttttcccgttttcattttatgctggtattctttgataaattttcttaagagaagaggacatatttctcagcgtgatgccaatgagatgatggatgatttgcgaaattaccaattaccaaaaaattcatcaattatttttccaagtttatcaataaagaaatgattaacgcacaaatattcaaatttttttcacatgatcccctttcagccttgatgaagatcaaaactaaatttaggagtgcttttccttcttttgaaaaattagggttacgtgacaaacgcatatgggccaagcttttccaacaacgttaattggattgttatgaggagagttgacgatccaccactcggatagagccaactgcaaatctctctgtgctcattacgaaaaattgtcaacgtgcaatcctgtctcatggtgaattcacgaagaaaaaacaaaattgcaatcacatcaagaccattttggagtttgtgtctcaacatcttcaacaataaaatgcatttttaatggatttttaaaaaagtaaaggacacattaaatcctttttttttgaagctcacaacaaaatgaatccgttatttctctctctctctctctctctctctctctctcaatttttctttgtttttttggtagcaatctcatcaacgtcaccatcatcatcatctttttcttttggcacatcactgtcattttttccagggcacttcttgaacaaattgacaatccaatcaaatccagtgtaagtctgactgttcgcctatgttgtggtttgtcanatatgtaataaattgcaaaaaaaaaaaacaaccttaaatgtgactnntcgcattatcttcacagcaatcaaatcgtccaaatgtttcgncaggctctccggctccttctcctt

SEQ ID NO: 8770 - DNA, 1100 bp, Heterodera glycines
cacaaaaacttaaaaaaatgttttccgattatgtcaaccttattaaaaattttgaaattttgcaggctaatagagaacccttagggcttcgacctctgctcagtgcctcaaccttatctaatggatagccatttttataaataaacggcatttccaaatcgcttgcttattaatgacatttgtcttttcttttttttcttcatttttttttgctcttagcatttctttttaacaaaaaaaaaagaatcaaattttaatgacgtcactactggaatttgttcttctctaaattgctgcttcttcaaatattttgggggagattctccgccatataatcaatcaaaaaggcagtaagcgatcggaattcacgatgctcaagacactcattgatcattatttgatcacaaaaaaagcattattttgaaatcagtatgaacagcaggcagagaacaagaagaatgtatgtgtagcctaggagaagagatgagagccaatatgagagggaaaaaaatttgttaaaaaaaataaattgcaaataatttttctttaaatatttcacatttctaaacttttcaatatacttatctttcatcaggatggattttagattaatttttttttttattattaaattggctagagcttgtcgggaccgggaattttgacaaaaaccgggaccgggacttaccgggacccgaaaagccgggatcgggaccaagtttttcgaccgggaccgggaccgagagaaaagccgggaccaaccggtaattttcccaagagaaaattttttgaaaaaaatttggaaatttgagtgaactttgttacgaaaattgcctatattcaaaaatgtacccataaaattttatattttcgttttgggggacgaattcgaggaaaatttttaaaaatttcttcagggggggggggggaatcttggaattttctgagtcccaaaattctgattttttaaataaattaataatctcttaaattgtttgcttttaaatcgctctttttgtggcgctgttttcccaaaaaactttttgggaacattgggggagggggggggggtccggcggtgccgataggcgccgccggaa

SEQ ID NO: 8771 - DNA, 1877 bp, Heterodera glycines
  unsure (1)..(1877): unsure at all n locations
aagcagtttgttccaaatcggataagcttgtctttaaatgtgtttctaagaatttttatgttttaaaaaaatttcttanacctttttctcggtttttatgaaaacttactcgctgacgagggtgatgcttcccgacatttttaaaattcttcagccatccacgacaaattttgtcggggaattgaattttctccctgatccccaaattttatttccccaagggtcagagaggaaccattgttttaagtgccattcttacaaataaaaattgaaaatgggtatcaaatgtttttgatttctttagtgctctgctcccttctcttccattctccgatgccattaacaactcttttttcaatttggcaatatcaattaattaatcgtccggccattttgctgtgctttgtgtccctttttgctggcttattacttttgctcgccttggccactgacaaacacttcctaatcattccattccttttcagctgtgtgagtaaaaatttttggttttaaaaatcaacagagaaatttttttgggtttttacgaaaaaataattgcaaaaatagaatgaaatgatcttgctaactttataatgagaaaattgttgattttcggcagttaagttgtcactgtgaaaatttaattaaaaaggaaataaatttccctgcctatcactgtgcactatgataattagagatagctagctcgacctggacctagacccaggcctgtgtttttcctaggtataggtttaggccatttttcggcaacctggtttttttggcaaggattttgtacggaaaaaataggtccagggtccaacatggaatccaggcccagacttttgtcaaaatgtcaagctctaatattattttatgccttttttctaatcattgtaagattctcaatatgatgggttccatggcgtttgggttagtgttgttaatgaatccgctgcacgtctatttgccatttatccgtcattttggctcacttgctgaactgatgccggcttttatggcactttgtacgtccgtcatggtaatgatcaatttttggtttctcatgctcggtgcgttcacttatgtgctcattcgtgacaagcgtagcttattcgtgtataaagagtaagtgatgcttaatcgggtccaaattatatttaatttttaaatatttggttttaattgttgaagtcggtaattaaatttttagaattttgaaaatttgttcaagtcagagactcggtattggatggtttcgtattcctgatcactgatctgtgacccgaaaacctgctgaaacaaacgtgttcccgacttgacttcaacctaaattttttttttgtaaccaaaagccctccccctggttttcaataacgaaaaaatactccgatttatattaattgatcaaaattgataaatttttctgtaaaatgagtaaaaatatgaaaaacatttgaacttttaagagaatatttcaataatggttatacggatgaagaaaaaatgaatgtcaaattggcgatgattcgtcgttcatcatccgctccaattagccgaatgtacagtggctgatgaatatcattgattttgcaattttttaacctctttttgaatttgtattaaatttggaataaatggaagggataaaacatttattcaacaaacttattatatgaatgacaccattttaaacaaataacaaagcattcattaaaaatttttttttgtccattttttgatttggtaaaaagctttgccataaaataattcaaaaatatatttgatgtgaaaatctagcctaaacacattgaattggcctcagggcagatttgatcatattctctatcagaaaatttgtataccatatttactga

SEQ ID NO: 8772 - DNA, 2739 bp, Heterodera glycines
tcgaattgaagcatccgctgtttctattacagtaaatacggtaaaacaattatcgactgtatttgactgaattagagcctcctatataatagagccgcccgcttcaaaagggcttgaaaaattgagcctacgctagggggttgtattacagtaagtatagtaagacatgttgcgcttatcgttgtttactgaattagagactagcactgtaatcagggatggacgaaatttcgtttcgttttcgtttcgtcctacattttcggcacttttttcgtttcgtacgaaaatggctattttttcgttttcgggtttcgttttcgtccgtcaaaattttttcgtttcgtgtttggttttcggttttcaaaatttcttttttcgtttcgtgtttcgttttcgtgtcgaatgccctttttcgtttcgttttcgtatacaaaaatttttttttgtgattttcgcacatccctgactgtaatagaaacacttctccacgcttaaagcgtctgaaaaacagagcctacggtagggtgctgcattacagtaaatacggtaaaaacaaaaattgggcatgtgggcagtttgggttagatcagtttctcaattttgcgctgattgttgtccggctcatacatcaaaccgttccacagtttgtagaaacagtcatggcagtatggacgacgctcatgctcgcggaatgttccatgcaaattcaatgcctgtttcatgttaaaattattttttttaaatcgtataatattacataaccgtatattctctaattatcccccaatctccattaatcccccagtctccaactatcccacagtctacgaggcgtttgaaaaataattccccatgggggataaaaagagcatatacggtataataaaaaattttactttttgacaataacagcacataaagtggtatggatgaaacttttgtgcctttgtggcattcggtgccagcgctgtcagaactgacaaattaaaaaaattttaatttgggcaaaagaagtatttgaattctctttttttttagtgacctggcccatcaatttcctcttgacaataggcacacaccgggattggacccattggcccggcaggctgaacaaacggatttaaaattagaaagttcactactaaattcttaattagcaattttaaaattcataataaatcaattagaattgccaaatttcaaatacctctatattcagtgttcggcgcggggtcgctgaacgtgcgcgacgtttcaagctacttctggaagaattgtcatgttttattttaaaaaagtattgtccaattatttcaccgattttttaacaaattcattttttaattcataaattttttatttttaacgtatgaaaaccccatctacctaccttttaacattttttctgaatgaagcaaaataatttaaaaattgtttaatttctatctaaaaaaatatttcttttatgttaaaaattcagacccacggatttgtttgaaaaatgccataatcacgacttttaaaaaacacagtgattcattcctcaactcaatcaacaaatgtaaatttgcaatctaattaattgttgggtagtttaaatattttattattacatttgtgactcatccatgaggtcgacgtcgtaatcctttttcacatgctccacagtgaactcatcctcgggctctaaatcggttctaatggatattaaaccacaattttaggtttttgggtacttccgtgttttgctaccccccgcccccccccccccgaaaaatttaaaaattcatattttgtggtgttcaaggtcactctgatcacgaatatggtgtttgttttgacatatgatgacatctgttcatagatttaacaaaatatccatgattgtttgaaaatgtaaaatatgaatttttaaaatttctcaaaggggggggggagcaaaacacggaagtacccaattttgacgttttgtcctttctctctgacaaatgagccaaaaatgattgattaatgcgccaattttgtgcgactgcctttgttggcgcgcgctttgattcattttaactaatcgtaattgattacataaaaaatatttaataccaccatcagcagaaagaaagttcttaagtgtctgcctgccccgcccaatcaatcaattctgctcccctaattattgtaacaattctatcttttcttcatatataaaaatgtaggcaaaaaaaaaaatatttaaaaatatttttgtatcaagaatattcagatgaatgaataaattaaattaaaaaaaggaataaattgcatagccattgcaaccgaattaaaattattaaaaattaaatttaaatagctaccaagtggtggcatttcgtcctgttggtacaaatcggcttcgtcgggtgcaggtgttaggcgcagacgatattcgatctcctgtttaagtttggataaaaatgtttaagcaatttggcaagactaacaataaaaaatgaacctacaaatattaaaaggtgttaaaaaattaattgtaagtagttatgataactactattgtttaaattaatttgatctaaatgggtatactgtacatccaagtttaaattactttcaaattactgtacatgtctatctgtgcacgaatatcgcgctgacaaaaaccgcacctcgtgacttttgggctttttgcgcttcatgaaccgcggcgagccacttccgctggtgcattcacgtcgtacaccaatg

SEQ ID NO: 8773 - DNA, 1171 bp, Heterodera glycines
taatttaaagcagtcagatttatgggaatattttgaatcggcgggattggccgggaattctattttgctcggagatagtggctatcccttaaaaaaatggctaatggtcccgtttcgtgatccaaaaactgttgccgagaagcgtttcaacactgctttatgcaaaggccgttcagttattgagcatgcttttggaatttttaaacggcgattttcaattgcaaagttataaagattttttttaaaattaaaaacgctatttcagaacatcatgccgtttgaagcttaggcggatcgcaactgccattctagcagccgctgttctacataatattgcaattgaaatgcgtttgcctgaaccaccagcgacggaagatttaaatgaaaatgatgatttaaacgaaatcaacaatgagaatgaaaatcggaatgccattttaaatgatcgtcaatcgcgccaagctggaattgagaaaagacaagaattggtggcccgttttacctaattttttgttattttcatatatattttgtctctcaaatactctttttattagattttgactaattttggttaaaagggattttttaaataatttcacatgtctctattttagggaaattaattacagttcataaaaaaattttttttttttaattttgagttggccctaaaaaatcaaaatgatcattgagaaaaattattttataactgtttttaactggttttttgttagtttagcctaaattatttatcatacaaaaattttttggttggattttgactacttttgctaaaatggattttttatatacttatcattaggttaaaaaaatttttttggtatcaaaagaaagagaacacttcaatctataagaaacttatttttgttaatttttatcacaaatttccgtgtcaaatggctcatggtaaatattgcaaccatgggtatgatggtggtagcttttctaaccaccaactcccgtcaaatgaccacgaactaccttcttattctacgggtaaaaaagagggtcatggtcatggttaaatgaccaccaacttcgtggtcatttgaccaaagttcgtggtagctcttattctggcaggttttaccaccaacttcgtggtcatttaaccatgaccacgttcttattctacgggcccaggtca

SEQ ID NO: 8774 - DNA, 4218 bp, Heterodera glycines
tgaaatgcagaattgagtcccagtgattgaattgctggtgggttgactcccggcgattggagaaaaagccaagaaaaggatgcgaggccgcgaagcggccgagccagtcgattttatcattcataatcctataatacaatcgtactacctagcgggggatgcgccgaaggcgctgaccccgctagtacatatatgtagttcattttgcacaatatttgaacatcgatttttggtaaatttaattaagtgactttttgcttttgttttttatctacataataatgaatttttaaacaaaatttttctttaattataaatagaaatgccttctttacttggggcgtcgaatcattatgtagttttgcaaaataagtttggcagtaccggtaattaggcaccgtcgagaaagttttaaaaaatttttaatttttatattcaccgaaacaaagtccccaaaaaatagttaaataattaagaaaccatacctaattatcataaaattatattaacgccaaatttcaacatcgaatatccaccatttccaacaggtgctaatttgtaaatgtcaattcataatcaataacatcacaacttcatctctaacaatggcacattaggcgggtttcttctcagtgagttgagcaccggcacactgctccatcagcacctttttgatacgttctgtgtccagctcggactgctcgcataaattggccaaaacataagcatattccagggcataaagattctatgattaaaatatttaataaaattttatatatatttaatcataatattacatcgctaaagttgaagcaggaattgccaaaagtgtgcaccacctgaaaatcagaaccatgttttggagtttgtcaaaatcatcaaatagaaaaaataattgggtttctcaattcctaattgtccagtttttcagctttgtgctgctaaagcctggcgattctaaaaagcaaaaaatgctaaaaaaaaattaattaaactggattgggaaagcacaatttttattaggccgtttcgttctatattcttccaacttatattaagattcccaattcataagatgaacaaacggaaattttcttacacaaatcgcattattttcacccttattaatgttttccaatttcataaaacaataatactttttaaataatttttgtattttttgttgcacgtacgaataggaaattggaatctcgtgaataagtttcgaattattgtgtttgctgattgttttttacctcgtcatggcagtccaaattgccaattcgtttcggatgtttcgtcaaaattcgttggctgtcgttggcattttgcacaagtttgttcacaatttgcttgatctgttgctccacaacatttctctcctacaaaaatgcataaatatacataattttacggcatctttccatttccaacccgcgacttaatctcggaacagcgggaaaacgggaccgaacccggtcatatatttgtttccttgtctctgatctaaacatttgagcaagtttttttgagaaaaagcatacgaatgcctttcctaattctgtccctgaattttttaaatttttggcttcatctccacctcatgttgaaggttgtgccgatcttgttgggactcgttctgacgcttcatcaacagagaagcagcacgtgatggaatcgtcagaaatttgtgctgcgaagatgcctcaaaattcttaatcatttaattgaaaattcttcaaacattactgctggatgatgacgttcgttccgtttttgtgcctgttttttgcccataaattcggcaacattttcgctttgaattgtcaaatctccgtatttcatcacatggctttcgttcgtttttttgcgcacaatttcaaattggaccctcaaagtttccttgcccaaatttgccttcaattttatcatttatcaattggtaaatgattgcaaaattaatgccttggccgagtctttcatccaattcgctgaaaacaaatcacccaaacattcgccgttcaaaaaatcagggtcacaaaaagtggcataactgaattcgtagggattggacgcagtgacagcataaacttaaataaaaataaaataatatttttaaaataataatataaatttaaatgttacttttccactcctttttcaaagtttcaaaaaacattgagcccgctttgcatgcttcgatatacaaagtcatttcggcatacatcttcttctcatgcattgtcttcagagttcgtgtcaattgtttcactgtcagctgaaaacacaaaacattttaagcaaaggtttccagaatttttcttaaattccatgttgaaaaatatcaatttttgatattttcagttgcgctgaattttccttaatagtctgcttaattaccaaaaatttttatttctaaaaaaattaactacgtaaaattaattttatgaatttggtattattcaattcagcaaataccgtttgatagcataattttaattattttagaatacttctgagtgtgggaagatgagaaagccaaagtccccgtggccagaagtgtacacaaacactttgtcctttccagtgcttaatttgggaaaagcttcatttatctcaaattgttgtccttgtttttttctgcacctttttagcaccggctttcctttcgttcgcttctcatcgcccaataaaatggccatgaaattttgggggttaacctcatggccacggtagtcaattttgactccttaataagaaatgacaaattctatttaagttgaaaaattttttagaagaaaagtactttgtgcaatcaaatttacaaaatttgattggcatttgcatttttattaaagggttcttccaaaaaggaacaaagactaattagttagttagttttaatgcattttcaaaaataaattaaatgtttgctacttttgtaaacgtcctctccgtctggcacattgaaaatttttcctggctgtggatttctgtcaaagaatgaattttcttgtaatgatttcattaataattaattagaattctcttttgtttaataattaatttttatggctctgttctctctctaactctgtgttgttggcaatgtcgtcgaccatcattgtgataattcgcttcttttccactccatggtttatcagtgtatgataagcatggctaacatcggcctaatcatagaatatttttttgcgcattggactcagaaaaaaagcacaaaaaaatattgaaaattatgtttgaaattattaaaggaatatttcggtatgaaaaaagaaaatttgttaatttttttcctcaaaaaatcgtactcaaaaagagatgttttttatttgatgctaaattgagaattgtcattgtctttcatgatttttcctcattgtttctctggaactctcaatatatattttttgaattattcaaaaaatcccatcaaataatttaaaatggaaccgccccataaaatatccgaattgtaaaattcaaattttccaccattaattaaacactgatcagcccacttggtgtctgtaattttcccatccgttcgaagtggccacaagcacagcccaaatgttcccgtcctcggtgctgttcctgttgtcattgtcttcatccgtgggaagcggttgactagaaaatcttcaaaattcaaaacattctcaaccacttacccattaattaatggcaaaaaaatagcacccaaaattgaaaataataacataaataattgcataattagggaagaaatgttgtcagagacaactaacttaattagcacgattaattgcaggaaaaaaagatgaaaataaattcctctaccttcttttatactgccttttcagttgtattgaatcaatttattcttcttttttttattgcattaatttattcatcgccatatttttggactcagattccattaacaaaaattctatttttctcagttttcttaattaccatttagcttctcatttcgttgagaaagacttttgacagaattaattacataaattgtttttctctttttaatgtcaatgtctttcttttgaaattaacactcgccgtcacggaattttgaaatttttaatgaataagtttggaatatataatattaattttgtattaaatttttgaagatttgtctacagtccggagtattctgtcggagtatgctgctgtgatcttggattg

SEQ ID NO: 8775 - DNA, 2482 bp, Heterodera glycines
tttctcatccgaccacgcgtcacgtcattcagtcactgtcgctgtttgaggcgcttctggtcgcattcccatgggtcgtattgttgttggcattcgtcgtcgtagtcgccgccgccccatccgtggtcgtagtcgttttcgccgtagtcgcagctccagttgcgtcagtgttagtcgccgcgttcgtcgtcgtagtcgccgctccggttgcatcggttttagtcgccactgcccccgcccactgtgcacgccgtccggcacgccgttcgattctgcccggcagggtcactgaaataaaagaaacaaacattaacatgaacagaaaaatagtggcaaatcttactgagcgaatggagcatccaattgatgccacagaactgaaagggggatagggtttccgtgtccgaaattaaaaagcgattcccccgaccctcagaacccaccactccaccgacgaacgcaagcactgccacgcacatccaacccacaatgcccttgaaattcatcgaagctgttgacgaattggaattgtggaagaagaagctgttgacgaattggaattgtgttgtgatagcgcaacagagagcagagagagggaaatgtgtaagcgctaaaatttaattgcaaataattcaattagggagggataaagtaaagccgacttgaacagagagtgaagaatgaaattcgaaccaaacaaaaaatggaaaagaactcaaaatcatcggagaacaatttagaatgcactattttttggtctacgcccttaaaaatcctttgaaaacattaagggggctctttaatgtttctatcgaaaactcgaacctaaattgtccaaaaaatggtacaattaaaaaggacaaaaggtcgaaaatggacagaacagaagagtgaatttgaatgaattcgaaccaaccaaaaaaaaatggaaaagactcaaaattttggctatttatacacactttttgaaaacaacgactgacaaatttatgcaattttctgcgtatttaagcggtgcattccctaccaaacgcatccattcattcattgcactcacttccattgtttctccatcggtcgaatcttcatcctgctgtacaattaaaattgttcccgtcagttttttattttttgtataatttttttaaatgactaaatgttgtgcccttttcaggatggtcagagcaacaacggccaggacaagggcatcagcagcgcgagcacggagcatcaaaatcaatcgtcgaaatgccaagaaggcgcgtgccgcaattggacgagccggacatgtgagtgaagcggagggcaattaatacactaattaattcaattcggcaccttttttaaatgtgccaatttttcagacacgcaatgcgatggcacgagagaagtgcatgatgtgtctgggcaaagtgagctccatgacgcgtgtgaccatgggctgtgtgcacgaatttcatcgcaggtggaggcggggctaattccgatcaatttcgaacccatgggaccccgagttcgaacaagtctaaaagtcgagttttcctggccaaaatgccggaagttttgcttttgctgatcaccgaattcgaaatccgttccgatcaatttttaacccatgaccgtcgagttcgaacaagtcaaaagtcgttttcttcgcctaaattccgtttatgtgtctatgattttctagaaattccttggtggaaaatttttggattttttggggcatagaatcccaattttgacatggtgatttcggattaatgcaacgcttatcattatctcccctcaaggtgcctgtaccgctggctcaaatacaacaccaactgtcccgtgtgccgcttcaatttcatgcgcgcaattccccctgaagaaccggcggaggaacagcaacaacgagaagaaatgactatctgatcagatccatcattgaaatctgtactatcataatgttgtgtattatgtatatgtctgtgtgttgtgtgtgtactcagtataaagatgatgatactcggaaaacccgaattttttttgtcggtttttgctgtagatattatttagaggtcattagtggagtccggcttttcagattgttgtcaaaattaggttagctttgatcagttcctctctcagtctctctctctctctctctagctaatctggacaggaaaagcggatctatgcaatttttttttgaaaataatgagatttaggtgtatatgtatatcttttttaaattgctgatcatgaagtgcccatttcaaaattttcgaatctggccaatttattcctctttttctctctctatatcttgcaaaattttcacgccttttttcatttttggtcacttttacaaaagtttgattagtttaaacgcatatcaccaatacatacaattccagtgatcggacattgattgaattcaagtaatcggatattgattgacacatgatgataggcaacataaggaatcaacgaaacc

SEQ ID NO: 8776 - DNA, 3132 bp, Heterodera glycines
catgatgatagtcaacataggtatcaacgaaaccaaatgtccaattcaaaatgatcaatcggataaatgtcaatttcttatccttcttctgttgttgtgccatgatgctaatccaaagccacatccgcggttgtcgctggagtagtcgcagcgggcgcctcagtgttggtcgccgcattcgtcgtcggagtagtcgccgctccggttggatcagtgttagtcgccaccgcgccatccgcaatcgccgtcgttgtcgtcgcagcggtcgcctcagtattggtcgtcgcagccatcgtcgtcgtagtcgcaccgggttcgttggcgttggtcaccgtcgctccgtccgcgttcgtcgttgtcgctggagtagtcgcagcgggcgcctcagtgttggtcgccgtagtcgcaccgggttcgttggcgttggtcaccgtcgctccgtccgcggtcgtcgttgtcggtggagtagtcgcagtggtcgccgcgtccgttgtcacagtcgcagctccggttgcgtcagtgttggtggctgcatccgcagtcgtcgtcgtctgctgctgggcagcgttcttcccccgtcgggcacggccttttttcacggtcctcggacgtccacggccacgcttttgtccagcagtgcgcggcgccgccctcgatttacgcgatcccttcggtcgtccaaggagcggtttgagcttgagcggacgacgcattgccgagccgcgcttcttcctcgtcctggtcccgtcgccgtcgttgttgttcccctgccgacgtgacgcgcggcgcaccgctgcactcacacgcgctcgggcgctgcttcgaccacgcactggcgctgtccgtctgttgttggttgaggcgccctgctgtcgtcgacgagctctctgaacaacggcggggagggcgtaaaatgagacacggaaatagttgcagcaaaaaagagggactgaagcgggggccaactgagcttgagaaaactttcagaagccatctttttcggcacttttgctgtttaagagggtcccgaaaaagaacgacagagaatttcattttcacacactatttgcacaattctctttctctgtttccactgtccccttgttatgagaggtagagaacgcatagttttaaaaaaaatgttgcttttgctttacttataaaagtatgcgtctcttctaccgctcataacaagggacagtggaagcagagaaagagaaacacgaaaatagcgcgtgtaagactttttgtcttttcgggattcaccaaacagcaaaagtgccgaaaaatgtgatggcttcttaaagttgtctcattagacgcagttgaccgaccactagcgccagggacggctcaccgaacgcgctgctgttgacgcgcgacggcgtgaagcagtcctcctcgtccttgtcctggtcgctgtttgggtggtgcccggcgtgacgatgtccacagtcatttcggccaaattgtagacggattggtatacagaagacagaagcagggatacggagctaaaatgtaatggagaattgatatatggtaaatgcaaagacattaattgtgaaaaagtcgggaagttatacaaaaaattttcggcatttttacatggggtgaaaaaaagtaagttagggaaactccagaaaatgtcattagaaagtttttcacaaaactggcattccatttaggccaatctcgaaccccgggcccgaactcgaacaaacagtcgaaaactcaaatatttagaatcgcgtgtttttggtctcaaaaatggtctaacaattttttttttcattgatgacttttgtttgtttctttgtttttaagccgttgttttgaaaacaaaaatgcgaaactcgaaaaatttgaagttttcaaactttttgttcgaattcacgcccgggggttcgagtttagtcgaaatggatgtgccctattcgtgatcagcgcgaaaccgaaaatacattgggagaaacatttttccatgagttttgaaaacaaaaaaaaattgtttttttcgctgtttttgttaattggtggggaaaatgttttttaagagtttaggttcaaaacccagaagggagtaagcaaattaagttgaaatttgaaatacttactaattcaaaaaacggagtggcgacaaaaaataacgaaggaaggcaaaggtgttgggcatcagccgacggaaggcggaaatataaaaatgaattgtgtgtgtggaattggccgtaaatttcgttccttttatactgccaaatttcgttggaaacgcggagagagtcgggggtcactttgacgcgggacattttggcgccgccaattttgaagttttctaatttttttttattttgcaaccaaataaattattttgatatcaaacgataagcctaagtgttttttataagcctgcaaaatttgaaaaaattatattagattaaaaaagggacgaaacccaactcgtactgtttttcgagaaaaaaaattgtcataacttttgcggtcagggacgttttcgtaccgccattttcgtaccgccgttttcgtaccgccgttttcgtacgggggacgttttcgtaccgccattttcgtaccgccgttttcgtaccgccgttttcgtaccgccgttttcgtaccgccgttttcgtacgggggacgttttcgtaccgccgttttcgtacgggggacgttttcgtaccgccgttttcgtacgggggacgttttcgtaccgccgttttcgtacgggggacgttttcgtaccgccgttttcgtacggcggacgttttcgtaccgccgttttcgtacgagtggatatgcaaaaaaaattacattcaaataatttgttaatcttttttttaattacttttaatgttttgacagttaagcatttattaactacaaaatgaaccagcagcaagtaattaaaacgaaactaaataatgataaattggtgcatgaaaggtgcacagaaaaagaagtatcgcgatgccgacgcacggattcttcgtctcgtccaacgctataacgatatcaataacaatattgtccctaaaatgatcacaattatgccaatgccaatgtcaatcccgataaaccttaacaattttctcgctggtattttccgaaactatgaga

SEQ ID NO: 8777 - DNA, 1022 bp, Heterodera glycines
gtctaacccatatttaaatattgcaaaaattcgattatcggcgcccatttgcccgccattttcgccaacgaattgcgaaatcggctccagcggggccaatgcgcggacgacgtgctcattgtgttgaccatcaacgacagttcggtaaacggtgctccaattgaattaattgttcaatcggttgcgtaattttccgtcattttttccgattcgcacgagtacgggcggatgggcagcgacgaaattggacgcccaattcattttgaacgtgtcgcagacagcgcgtaaagcataataaaaaaatttcaatttccacttattaaatcaaattaaaatcatggataacactaattaattacaccgattaaattattgcaaaatttttgcacttttaatttgtcagaagcgcaatttttctctcgaagcgattacaccggaggcttactgtacatgctggacgagtacggtagacgacttggtgccccaccctttcgagtggaacagatcaaagaaagagaagccggcggttggtgggacaccaacttttggccattgttcccggaagtgggtgcctttggaatttgaatattttccaactttggcacttttaggcattacgccaatccgaaattcgttggttttggttgcttttccttctccttttgctgttggctctgattttgctcgtccttttctgtgccattcgaatgcaaaacaaaaaacggcgccattctttgggctatcagttgggacaacggacgaaagaaaatggcaaaaaatgagggaaaatcggaaaaaagcgaaaggaaaatgaacaaaaaacaaacgatcagacagaagagagaaaggaatttcattatcaaattgctcattcatttggtcaattggttttaatttgtgcttttcagttttatgactcaccaaaaaacaaacaaaaaataatttatttattttttgttttcatttcaaagtattaatatttaagtggacgtgcttttgctaatcattgcttaatttatcac

SEQ ID NO: 8778 - DNA, 905 bp, Heterodera glycines
ttgcttcgtcgtcttttgcttttcgtctgtcgcagcgtcctcaacagtcgtatttgaacacgtgcggcagtgcgcgcacttgcggcaattcgcaaacgcgcgggtccgggcggcactccgcgcacggctcacagcacgcaattttccacagcgtgtgcctctcgcgcgtaatggtggtgccgcagccgggcaacggcgtgcattcggaataaattaaatacatcattaattaattaattgtctcattggtgataatgccgttttaattgccgttaataattaccttacttagattagctataattaagtaatatatggaggtgttccattttttaaattcctttaataacttaactgcacttacttaaatcagttaattgaataattcgctaattaattattatttagttgttgtcccatttcttttttctttttaattcccaatagtaattgcataattgctaatcaattaattgcttcctcaccatcctcctgctcctcttcttcctcctcctcctcgtcctcttttccgtactgttccgtttctttggccaagttgaatttgtgtcccatacacttggcacagctgtaaatggcgcaaattttgatccaatcgcctcgcgaggctttctccgccgttccgatcactttctgaaaaacattaaaaaaaaatttttttttcattttttttaaatttattccaacagtaaaaaaaaatttttttttcattttttttaaatttattccaacagttctttaaataaaattattttctgcctgaaatttccgttttcgcgtttcaattgaaattgctttggcggggcgtgcgaatgcattttcaccgtattgcatcagactacggtagacataccgtagtccgtatgtggtggccctgtcctttgcta

SEQ ID NO: 8779 - DNA, 3008 bp, Heterodera glycines
tttaaaaacttaattggtttaatgccataaaataaattaaacacaattcgtaatgaatgcgtcgttaagtgatggaaaatgagtgtgtccgataattagaccgtcagtaaattttgaaataataaatgaaaaaatcaattattcaaataatgggaataatgttcctaataacagcagaagactgatgagttttcttaactttaatgcattttaggccagcttctgtgattgaaaaacttaagtttgaatccaattttgggcttatgcgcaaatggcatgtaaccgcgagatagttaattcatcctaatgaatttgctagactccttgaaaccgttaatttttaatttggatttgggaaggccccatttaaactattgctttaaatgccataattaaacaattcctaatgattaatgaattgctttttacccttcgccgtattcgttttgaatgtccacaaagtctttgtcccctcctccgctgctcctttttgtcctgaattttatgcacgtattccgctcaatttcttccattgctccgaaaatcactgccaattccttttgtgctaaaattaatttattgaatttaattggggtaattaaattttcctttttaattcgcttcgattaattatttatttcatttgagtgctttttagacccactgaaattgcccgttattcggtagggtatcacaaattttccgtccgtttcgtccttttccgttgtccaccgattctgtgcattgtttcttagcgcatttcgcatttttgggtttctaaaattgaaatttgccaaaatttggtcccaaattcggtggtgctcaaccgctgattctcctcccacagctgaaccacgtcgccatttccatgccgatttcgcgtgccgtgttgtgccgccaaatcaatcgcaattggctgacaatgagttttattattcgatcaaatgctatacattaaaaaagaaattcaatgttaatgttcgaaaattttaattttagttttgaatttgtagttttgataaataaaattaaattttcaatttcattttttaaaattcttataataataaaaatccaaaacatacttcacactttaaaagttgacaaattatggggagaaaaaaggagaaatattttccaaatttattgacaaaattacagcgaagcatttaattaattgaatttattaattggaattagttcagcaaaattcccattcatttggaaagaaattattatttgttcagtgggatgacgcaaaaaaaagaatcggaaaaatttaaataatggaaaaactttcaaaataaaaaaataattagggaagatcatcaatcaattttttttcttggtccaaaaattgcacaacacaaaaatggatacaaaaagatggattattgtgcttaatttcctttccaaaattgttttttaatgacaaaagccattgccaattgcacaaaaaagttacaaattggtcggattaattacactaaaaattgactacaatggattgggctgattatctgatcgcattttcctctgataacttttccgtcctccgtccgtccccatttctgatcggttctatcatttgccacatgatggcttttccttgcaaatgatcgctcgctgttccgcgggcaaagtgccagcgtacgctttgaatgcttctttcttttcttccaccgatttgtgcttcgtttctaggcacaatttcttgatttgggcttgcacctaacaatttacacgaaattcgatttaaatttattggaattttgctatttcatggcacggacttcctccggaagttgtgccaaatgcggcggcatcggcagcttttccatcacttcgtccggcaccgttttcatcagttcgtcgatcttttccaatttctgagcacagtccagcgacttgttggccagcaatgcattaatatccgctacgactttggaaggcaaaagggcggctaaatcggccggcaattccttaagcattaatttcgtaacttttggcataaaagtgccgaagtccctttggtccatggcacttaaccgatggatgggctatcccaccactatcaacggagttcttatcggttcaaagtcagtttttttctcatttgtcccttaatcactgcatttatcaaatggaattggcatagcatttgattagagttggttttttgtgcgatggcattagtccaaaatgatcggaaagtgccaaaaaagtaaaaaggaaacttacgtctttcttaagaagcgagcagaagaacattttggcgattccttttcaaaaatgggaggaaagagtgaacaattgaaagaatggaaatgaatgaattgcctcaaaaggcgcggctaattaaataacattttttctcttcgtattgtgcttaacgacaattagttgaatttgacagaaaatggcgaaatgtgtgccatgacaaccaaaaattaacaattaatgtgtgaaaagaatgccggccaatttttgacgggaatttgtgacagcgattagtgtgctaattaagcccataaaataccatattaaaacggagagaagggaaagaaagtgaaaaagtgaatggactttgaggcgattattcgttatgagtcataattcgctgcatcataaactcaaccaaacaattttgataacactcgaaaaaattttgaatgggagaattttgtttaacaaatgtgcaaatgtttctattcaaattttcaaaattctcccggcgatttcttccggcaccaatcggacgttccctccccccccccaccatttgcaacaagattttttgaaatactgcggcaaaaaattggacgtatatgccaagggcgcagccagaccttggctttgggggggggggggggggttgaagtcaaaaaatcgatttttaggggtgtatttttcattttttgaaatctcgaattcggggggttcatttttacaaaatttttcgccaaaaaattattattttttccattttggcctccatttttcaaaaa

SEQ ID NO: 8780 - DNA, 1116 bp, Heterodera glycines
atcgctcatttccacgaattaaatggcaatgcgacgaattgcgcgagaaattaggccaattagagggatcatttgccctgcgggtatagtgtgatgggcacggggtatggtaaagtgatgtcaattgggctcaaagaggcgaatttcttcaattaattggatggaccgaatgaccaaaacggcaaattgagggccaaacgaaatggcttttcagctgtgaagcggacaaattcctccaaaaagaagaaaaaaggcccaaaaaatattttaggataatattccgtttttataaaataaaatatttttattcagcagatgaatccatcccttcggcattctttcagcatcgaaaacattttaacaaaaagcgtaaattttgagaccttttctgagtaagtccgaaatgaaattgtttacaaaattttgtctgaattattaggccagaatttgccaacaaatctctccaacaattttcgccatcttttctattctcgtgagaaattgtttaaattattatgaaaattgaccaaaatattaaggccattgcttccgcaccatttcctcggccgctgttttgacaaagtgccaacatttgtcttagaaccgccgccaaaagcatttccaactgaatttagcagcgcattttttgagcggaataatggagaacgagaaggtgttagaagttagaaaacgcaaaatacagtaacataaatgcaaaaatcccacgataaacccataaatacggtaaagcacagtaatcgtaaggaagaagctgactgctgggcgcttaaaatgctgaaagcgataagatccataaaaagaaagagcggatgtgcctcgatagctcaatggtagaattgtccacggaatggggtggacgagtgggttcgattcccatgcgatgcctaacattttgcccatttcttatttaatgtatacatatcacaccgaaagaaatagaaaatataaatagaaaaatgaattcaaattttaaccgatgcttcactctttttgattcgtattttagtcgaatttgaaatatttaaataaataatttttactcttttagacatttaatgtgccattcatccattttcgtctttttaaactttttta

SEQ ID NO: 8781 - DNA, 2500 bp, Heterodera glycines
  unsure (1)..(2500): unsure at all n locations
tgccaatttgggtgggcaaagtcggacaaaagcgcttcactctcctcattgacggaagaagcactgaaaaggagggcaccatcaattacgaagaagaggaacccaaagccaattagggcatcccttctccgatcggtcactcacttcgctcttccgtccgtccccccgacccttttgcaacggtcaaacaaagtgccgagcacgcggatgttattgcacagcgtaatggccacaattacgtaggaggaagtgagcataaagacggggaacagtgccaaaaagtaatcggtcagtctcagaagaccgcccgtttgttcgtcgtgctgaaaggaagcgaaaatacaggaaaaatgggagagaaaacggatggaaacggacgagaaaattgatggtgtaaatgtcttggacatgcgcaaaagtgaaggcaccgctcaaagaaagggcgcagtaaaaaaggaaaacgagagagtaaacggaagtcaatttggcactcaaatgatgcttattcctgaacagggcaaaatgtgagcaaattgggcgaaggcactcgcctaattggggtgatcagagcagggagtgaatggtggcacataaaggcgtaaacggcgacgccgaacaaagatccgaagccgtgaaaattaacaggtgccggcgaaccctttgggccgttgtgggccaattgggcgatggccaagacaatcatcagcaaaaaggctaaaccaacgcaaatgtaggataaatttaaaaccaaatagttggtaataaaattgtaaattgtgggaacaaatttgcttttcgcttacggcaaatgcccagcggctgaaagcaccttttgcccctttccaattgtttggcaacaaacggcgtgagattgggcccatggtttgtgttaaggacccaattctcggctttgttgcagggaaatcccatactttgacgactcggacggagtgccgtcctcggcgtgtgacgttttctttttcctcgtcaaaaattttcgaaaaacggcgttgccgtgaaataatttttttttattttgtaaaatttataaatggatttgcgatccgaaatgagcaaatttaactttttggaggaaaaaatcaaaaaaggacgaaatattttaaaagattttacattaaaattgtcaatttttaagtgattgatacaatttcaccaattaataatccccccccccccgttttctcgcctgtccatctcgaaagagtcgtggccaattgaagccatttcgtccgagtgattcccatcaaaatctgaacaaaagaattagcaattttattggaataaaagggaaaaaccattggcagacagaagaggagaaaagcgaagatgcaaatgcgataaacggcgaagcgactgagcgaatggaaaagatcatttggatgagaatggcacggggagaagggactgatggaaacggcagaaacattcagcgaagagcaaatcacattcataagggacttggggacagtggaggaatacacctgagaaaaggggcaatatcagcagagaaggcaaaaagaggttctttcccattatgagaccacaagcaaaaattttaaaaaatctacaaagggcgcgcaaattccacattcccaccgcataaattagcaatttatgtttatgcctccaaagtaatgcaaccgcgcacctttgttgattttttaaaattttggcttgtggtctcataatgggaaagtacccaaaaagaatggggacgaacataaagcaaaagcattggaaaaaggcaaatttaggactgaaaagcaagtgattttgagaaaaaagcgtgaattggggcaaagaaaatgtttctccgacccgacaatttgaaatttgacactcattttctccataaaaaacatcttttcccaaagtatacttttctgttacattaactgagagagaaccaaatcctaatatttattatggcagttagttgaactatgtatgattcaggcttttgaaattaaaaatgcaaattctcaccgcgaggtcgccgaacagataaatggtgagcaaaagataggagagaatggtgcccgactgtcccagaaacaaatgggccatttcactctgacaagcaaatgtaatatttttaagccaaaatcgcattgcgttacaatttcgattctcctttcgatttcgaaatcggattcggtcggcgtttgcccgcggcgttcgttttgcgactgaatgtacgccgatgcgcccgcggggtttgccgggaaatagaagcgttgttcggaggagccgtccgcgtccaccacgacacttcctacgcgaacctcgctcatttccccgtccgcactcgacggcacatcgtcctccaccacaaaggcaccctcctgcaattgctcacgaggcggtgcccttcgcaaaacgcaattgccatcgattcaaaaatgaaagtggcgcaaacataactgaaaagggtaaaatgtgaattgggataacattttgtttagttagaaaaanggaa

SEQ ID NO: 8782 - DNA, 1615 bp, Heterodera glycines
  unsure (1)..(1615): unsure at all n locations
attagtagtaaaagttttaagtataataaaaatataaaatgaccctcaaagattcatcgaaagtagacttttctctgtgcagagatgcgtattttcaccaaaagattaatccgtttttttcgctttttctccatcgtttgaattgaccctcgtaatgcgggaaataaggagcagaaggggcccgagcagataaccgcccgttttggaaggcccgcggcaaggcgagggcgccggtgccgacgatcaaattgaacacgtagagcaacccgacctgaatattaaatgaaagttgggcatttttttaaatttgatttttgggaggaaatttagaaaattagcaaatacaacgggtgtactttagtcaaggccccatgataaccatatgaactgaccgtggcactgaatgtttgtccgctgggcacagattcttctgccatcggccgcaatctgtccgaccgatggcctaaaaatgcaaagcaaatgacggaaaggcagaaagaaacaaatgaaaatggaaagtgtaaaggaaagagaaggggcgaaccgaaagggaaaaagagaaggaggaagaaaagataaggaaagtgatggaagggaagggaagggaaaacactcgcagagagcggaaattttaaattagaaaataattacctaattacacacctaatttagtgtgctaaattaaaaggtggaaaaaatgttcattttaaatttctctcgtttctcctttgtcggtgtgttgcgacatttcgcttcgtttctcaaattttgtccgtctgtcaattcctatcccttaaccttctgtttccctcctctccctcttcccttcccttctctttccctcttccctttttctcgtttctgtccctgccctttctttgttcctttctctgtcctctggcctttcttttcggttcctcgtcctcacagggatttcttgcgcattcgctttgttcatctcccttttccctttctccccactctctcaccgccctctttctctcgccgccactttttctgcttttttctcttccaaccatcccatccttaaataatccatcgtccgcttctcttctcttccctttcctttgcaaatcggcagacgaattcgtttgggtttaatttgtaagagaccaaccaacaaacgctcaaagacgaataaattcgtaacattcgttcatccccaaaaccaaacagatctcatccaccgatccctccatccaattaatcccaatacgcccaatcgcattcaatcgattcgatttgtgaaggatcggggggggggggggggaagggaagagtgtcggggtgggaatggtgagagtcgtcgtccattcgttcattcatcccccccccttttttgcccgcaataattgcacgtccctgccccatatgtttgtatcccctcaaaaggagattgtctgttgtttgatgtccattaaataatgtgtgatttcttgggaatttttccaacacccaaaaggcgcttgagcgatttgtttggctgcggctgtctctctcattctttggcctcggggcatccctcccgctccctaattaccgtcaattattttagagacgngatttgctgactcaatcatttatccattcctgg

SEQ ID NO: 8783 - DNA, 839 bp, Heterodera glycines
cccctccctcccccttctcccttccttccttccttcctatcctattccaccacaattcccctttttccctttcctttcgtctcttcttcctcccctcccctctttgtgtgtacattcaattacttctgctgaatgaaaagcgcggcttctcctcctgccgatgggaccaaagtgacgaaaggttcgccgccgttagccattagccttccattagcagcaattgcattcattcgtcacattcatttgcccgtggctttgactttattccccaccctaaaatttcaacaacgaactctgaaagagacaaaggaattgctttttttgccgtttattttggtcacttttccactcaaattattctccaaaaattcccgctgggcaaacagtcgagaaatttgtgttgtgttggggcaactttacgatcacaacaaatgatttggtgattttctcgcctttcgccgccgcctcaccaatcggtcgatcaatcattgataaatacagaaaaactttggagcaatcgaccgacagcagcagttcatttgctccgttaccctttcttttttcggtttttggtgaattgtcccactaatttttacataattaccccatcacaaaattaggcaaatgtaaattcaatgcttacaaaaattaatttaattcttacaaaaattacgtctattttgtacaagagtttccatctttaaacaaacggaaaagagcaggcaattaataactgttacacagaagggactacattcgtttgtccatctgttcggcgtttcccccccccccccctcgctatttctcattttccatgtccagacctcaggcagcaagct

SEQ ID NO: 8784 - DNA, 3684 bp, Heterodera glycines
  unsure (1)..(3684): unsure at all n locations
ctgcannggtctgatattttgagagaaaaacgtaagattttgaaaaacgaataattttttttaggaggtgttaaaaaccaaaaaaaaactgccgcgaaatttgtgccaccaccttgagcgcttccagcgtgattttgtagaattgctgcagcagtgccgtgttcttcgagagggacacgtagtcgagaatggagttgatggacttttccgcgtaatttttggtgaccgatgaacgaatgtaagtgagcaaattgcgataatggcgcagcatctcttcaaaattgcccttaaaattaaaaatattaaagtccgccaaattttccaaaatttgaaaaaatgggatgaaatatggcctggcattgccaaattactccaaattttccccaatttggacaaaatgccaaccatggcatagttcagcttcatcatctgcttgagcgccttgaagccccagtcgcccttctccgtctccaactccaacacgcggcgaaaggcgtccaacgcgccgcgctggtcgccgtccgatttcagcgtttttgctgcataatattggttctccagcgccacgtccggctcactgcccgagtcgtccgaatattgctgaaaaaacaggcagcaaaaatgccgaaaaatacgtgatgaaattttttgcgagaaaatttgcgaaatttcaatcgcgctattcgatggcattaaaaactcctcactaaccaagccataatcttctccatcgtccatttcaaagtccgacattgtgtttgggtgaacggagaagaagaatattaagttatgttttagttaaatggcctaaaaatgaaaatttaactaaaaaatgaatgctaaaataagaataaataaataaatgtttagattaccatgtgtacttatcaaagaatgtacttggaaaaaggaaaacagaaaccaaaaacagaaaccaaacaatgtaagtgtccttatcgcgttggacaaaaacaaacaaaaacaagaacaataaaaaaatttttggcatttatggcattttatgccttttcaaattttgccacatttttgaaaaaaaatggtaacatgtgatttcgtcagtgagtgatttcgtcagtacggggttcgtagtaataataatattttttttacgaaaaaattttaataattcataaattaaattcgttcaaaatatattaaaaaatatgtaaattcaaaaataaagattatttgttcgattatcaacctattttcggccggtcacttacatataagcaaaataatttgtatttgagcctcgtctttgctacttttatctcctatatgttcattctagatggtcgtcagccattatcattctgcattaacctcgaaatttcgctttcaattttcttaacagtgttggagcgcgaccgcgagttttctgtccgcgttccacctctttcttaataagcatttcgagtttgttgatagtctttgtcagttttctgtctataaatagagattgtgctgcgtcagccagtcactatggaggctacgtttaaaaatgggttcggcaggacaacaatttgaaaatacttgtaacggattttgcaaatcgcaacccgctagggtatttacgagcctgctttatctttcggctttttgaattttttgtaatttttggctaggtgttcgtttttttctgaattaattttcactgacgaaatcaccgggaacctaaaaaatgactatgtatcgaaaaaatagagcacggaattgaaaaagtttggatcggaatacgaattttcttgtttttgaacatttcccaatatttcttgagctttcgtgtcgttttctgcgtctcccggaaaatttctgctaaaatcataattctctggccaattctcagttcggaaccaatcaatatttccaactgaattggcataatctttcgtctcaaattcgtcacaggttttgaattcgatcccccaaatatttctctcgtcagtctcggcattatttccgtcccaaatttggcacacaaacattcgtcttaatttaattttacctcaattctttgcaattttcattttcttccttacacattgcaattaatttccatagtaataatttcttccgcccaccaattacccttcttcttgctgctgaccttaacctgcgttcggatgggtacacaaatctgtcgagatcggaatttgctttatgacacagagactgcccaattaatgcgggaaatgtttgggttcgcccggttcaaatcgaacattccatcaagccggcccctccggcgctttctgttgccgcgcatagcccccctcctccctccgccgtcctctaacattcattccgtcattggcattccgacgccccgcgtgccggacagagtttccgtggcattcattccagtgcctccgcgtgtccgtcctccgtttcaggctgaatatgtgtgtgttatgtgcccccttccttctactgatcagagcagagcagctggatgatcagcatcatcgctctcaccgatcactcatcctccaaaatgacaactttctttcccatccccttgggcgggtgccgcccgccggcggagggcgagaaattgcgcccgcggggaagtgattaataatcatttgtatttacccgccccgactttccccgatgatgatgagtttagtttgatcatcactttgctgatcggtgaaagagagaggatgaggattaccggctagcggaggatgagattttgggtccggatctttgctgattgctgaactgactcactcatcttcttatatccccccccccaattttgggctgctgattggggcgaggatttgtggggtatcatcgggtatcatcaccattatcagatagttatgactagatcacacacacacacacacactcaccaatttgatggattcgatctcgcttttctaatgaatttttttaattttacaaatttagtgggttcgccaaattcgagaataaagtcgacaaccgccgggatttcacgggatctcctcggtccaacgtttgaaaccccccgcctgagttcggcttcctgaaaatctggtggctaaatttgatccattgttgcattccgtgagccttatttgactccagcttattagctaatcaactctttgaaggcccgctaattgacagattgcattttctctaatcattaagcccgactttagagctgtatcccataaaaaatattttcaggaactttggtaatagagaaaaaattaaaatgtataaattttttagccaaaatatcgaattaattccaatgacaacaacagtaatcgcagcatgtcttctgtttctgtttatacatgcaggtaaagagcagaaaatgcaaaaaaaaaaataattcccggaaaattgaaattcaaatgcctaaaaatatttccgaaaaaacgcccggctccccaaaatatgaccaattttcggtaaaactcagcaaaattatgtccgcaatgatcattgcaagggatttctctccccggaaaattacgatcatcccttagacaatttggncgncaaaaatgtcgtaccgatttaaagaaaattctgtccgtcctctgctgagcattgaaccaactgatcgattangatgatcaattncaaagttgtctcaacaattcccngaataantttaattttttttcaaattttatttatttacgcgttttt

SEQ ID NO: 8785 - DNA, 2020 bp, Heterodera glycines
gcgcattcgcctcgtcgttgagcaaaccgcgccaagcaatccatcgacctcagcccgtccatttgctggtggacattggcgaaatgtcgtcaaccaacagcaacaacaacgggagagcagttcaacaacaacagcaaaacaatggccgggaaagtgccggcggtgccatcaaacaaagggacggagcagcgaaagagccgacggcacagcttcagcaacaacaacagaaaattatcagtgagtttattatatatgtgtcgtttggtgcatggatgggagtatcaatgccaaaaagtaatcgaaaagcggcacttgccgtactccaatggcatagccggggttggggctgagggggctaagccccgccctcccccaaaaatataaattgaattcagccccccccccccgtattataaaaaagttttaggaattttgtgatcggcttgtttaccggccgagttttcggcagatttgtgaggttttatactgcttgagattgcccctcttggcaacattcccgataaaggaaagggtgccatcaagcatttcaacttttattggcatttctaagggaatcagtcccaacttaccaacgagttgctgttttgttttagggtcaaacatttttgtggcattaaatatggccattctcaaactcgagagtcccgacccgggcagcgcccaattaactaattaattaattatcacttaattaattgcccagcaaaaagtcaatggttggattggacacggtggagtcgttgtgagaacggtgaacgaattcgggtgcgcaaatgtttgagcatcaacggtggtccatgtgaggtcagttgtggtgcagggcgtggtgagcttaaaaaccccaccaacgaagaaaaaattgtattttagcatttcccaatcaaaaattgtccaattttaaaaacagaaagaaaattaatcgagaacgaagaccgagaagaaaatagccctgggaaaaagtaggaaaagtgaataaaaattacaacaaaaaaaagcggtagtcaaaaaggcattcataagcttcatgaaaaattttcacgaaggcattactaattcacagctgtaaaattgttttaggaaatggaattgccaaaatatttataatttaaaataaaacaattattttttataaaatatataaaatattttgcaaatgttttaatgaacttactataaaaatggttttaaatcttctaaaccgaatttactgtttaaaaaccgtttgggcaaaataaaaattttagaattaatcggggaacaaaaaatagggaatctggggactctgcttttgaaaagataaagcctgaggctgaaaatcccccgaggttttctttgctctgaatccctttaaattttttaaattgagtttttgccattttcaggggccaagcattgagaagcaaagctgcttttcgtccatcagttccggcattaaatttgccaaggacccaattatcattgagcgcgaaatccgtggcgacattttgacctcacagcgacgatttgcaacagcaaagaattgaaaaagctattggagaactgagggcccaaagtcaaaaataaaacggatttaattttggttttttaaattttcattcaacccatttcctgaaataagcccgccccccggattggaaagccccccagggcttgatttcaggaaaacggtatttatcttcactatttatcattttcaaattgtgaaccgtttaaagcaaagcttataaaatcttggataaaatcaaaatgctttgtaaatatgagtaggattggaacttttatatttaagtctcaagaagccgagatcggaaaaccaagtttttctcgaattgagactctcgagcaccgctaatactcaaatccctcttgctggttgcgcaattttaagttaaaaatttgttcctcaataaatatataattgactttagctcatgttatgtaaataagcgacaattttgagggaaggatttggggggggggggggggaagagatcattca

SEQ ID NO: 8786 - DNA, 1508 bp, Heterodera glycines
  unsure (1)..(1508): unsure at all n locations
gcgcgctcttcacatttcaaaattggaaggaaatttgatgtcaaaaatggtcgcggcgggcccctgttggccgaactcgcgcactttgcacttctgaaatttggataatcaaagcggggaaggaaaatgccatttccggtggcattaattcaccgatgcacataaaaggtcgatgcaaaaaatgaaaaatttaagaacaaaaaaaggaaatgattgctacattcccaaaaaaccgaataattccaagaaattttttaaataaattaggctgggtaaagaatttttgaaagatttttttatttgcatcatttgtaaatgccaacttcttcgtgccgttgggtgagccggtggaccgcttgtgccaatgtttccacaacgacggcctctgtggccactgtcggcgatgtttttgttgtggcgatggcagcacaattgggctggtgatgatggtgttggttgaccgttactgcaccagtgccattctcaccgttggtcaattcattggcacaattgcaattgatggcagcaccaccttaaaaaatagtttttttggattttttaaattcttgcagaggaagtggatttcctttattttcagttttttttttcaattttgcttggattttattttaattcaattttatgaatattttttaataatttttgttataaaaaaatgcagagacactaaaatagccaattagaggattttagaaataaaaatagaaaaatttttataaaaaaaaattaaagatttttttttcaaaaaatcttctagcgattcttacaaattttatagtcaattacttagtttttcaaaaaaattttcaataacgctgaaatatgtttcaaaattattgaagttttttataaaaaacattctaaaatttttttcaaaattaatttgaagggggggggggagaacacagtgcaccccaatgtgaccaaccattaccattctgttgctgctgttgaaacaacaacgcctccaactgtttgaccgttttgccacggtaaagctccagcaccttgcgacttttctcctaaataaagaatgttgctgctagctattcgtttttttaatcgtaaaacagaaaatgtcaatttaatgggccaaattctttcggtctccgaacaaattgtggggggggggggggaggccacctggtcaagccgttcttcctccgccacgtcaattggagaattggcaaagatgcgcaactgttccacggtgatgggcaaagtgagtgcttctgaagaggaaaaaccaattcaaaataattcaaatttctagcaaaaaaaagtaaaacaaacccgagcttggaatattccgaaagatttagtaaaacaaagaatacacatttggaaaaaggcaatgagaagcggagcaaattaaaaaaaactccctatccttattatgcaaatttttagaanaaagtgactaaatttgtcggaaaaactccgagcatgtaaaaacattttttcagaaaatctgcagcagcgctcaa

SEQ ID NO: 8787 - DNA, 2837 bp, Heterodera glycines
  unsure (1)..(2837): unsure at all n locations
aaaaatcggcgaaataggcattaagcacaaaaaatccaaaataggcaaagttaggcattataaaagtcatcgtagacacgccaaatcaagcggaaaatgcgttgttcgtgcttatctgtacgtattaagtgcgcaaaaattttaggcatttgcctaaaaatcgcatccctattgatggatgattaatgcaacaaatgttaatttatacatttttcattttctccatagtccgtacaatcgaaaaaaaattattaataaacagcagaccagcaagcaatgagcaattttatccatttctattgaccatcgacagcaaccaaagaaaataataatatataataatttgttatccactaaattcttgtattttaaaaaatgagaatatctgttaggtttctatagaacgtacgttattattaaaaagcctaggttttgcatttttttaaaatttaatttattaatctttcggaaatatatatttttatctgaaatttatttttttcaaatttttttttgaatagttctgataaattcaaaaaattatattagacaatgggtattaaatactatttttggtattgtaaatatttattttgataatattaacataatggtaattaattaagattttctattttttgtctactttctgactatcttttctttttctttttgtttccgttcttaaactaacataaaaaaatagtattagttgatttttattttaaaactaaaaataaataaaataacaactaaataattgaaaaaagttcataatttttatttttctttgcccaattctatttttttggaccattaaagaaatatgcatcaataatacaaaatctttcattaatgggaacacagaagtgagttttgtcctttttgatttgtgtcgagattttcgtaatatataaatttttttaaatgtcatataatataaatatttaaaattgcttaatcaattaatattcaataactcgctgcccaatttggtgatttctagctccacatgacgagcaatatgttagctggatttttgcagaggctagcgcatatttgcgcagctcaattcattttctatttttctaattcataactaatatacaactactttaaattgtttcaatattaattatttttttaaaaaatagaaaataaaaaaattttttgtccataaaaagaattatttgaaaattttaaattaattttaatttattaaaatactatagaatcaatgaatccttcttaaattcgtcatcataaaaaactaattttgcataagataaacaaaattaaaaaatagttttttttttggcataaaatttttttaaagcacaagaaatttcaattctattatattaaaaagcataaatctttttaggaagatgaaatatttgatgctcatattttcactacaattttttaccttggaatgctttgccaaaaaggaggtagtaaaattaataaataaaaatgtttataatagaaacttttaaggaagttgaaaaattgcttaattttatgtgccgaggactgagtgacgaatttgattatagaaaaagtgaaaattggcgaaaaattggccaacttgattataatgttgtgccgagagaaaaatttgccgattttatggactggcaaatttgctacgcatccattgaacattatttagagtattgcaaatacagtcatggtcataagtgttgtcccatcatgcttttaaaaaaaataattgccgtataaaattgtcattttccaatttcaacagataagtagcataccattggatagcattttttatgggctttccaatgatgccatatttgcttttgtgacataaacatttatttgatttattttaccatattcacaatttgatcaaaatataggtggtcaaaagtgttgtcccatttcatttttaaaatattgcttctctggatcagcattaaaaaaatctaaaaaaattcaggtaagcataactttggatgctgatcaaaaaaggtagcaacaccaagttgatcagatcactccttcatggtgatctgatcagcccattttggctgggaacgaggggtaaatttcaaaaaaaatttctagggggttgggaaaatttttctggaaattttgagtaggccgattttatagagcacaaaattctctacaatattcaaaaaaccgcatgtctctatgacttataccggctgaggtatgggcaagcgccaattcgaatcttaatggagtattaattattgctgttaattagtactaattaacaattaatttgcacctcctttttccgaagcggtgcaccaaaggtaaatggagtgaaggtgctgatgtccagcccagaatatgaggaagggaacgagtgagaccgaggattggatttggggggaaaaaggaataagccaaaatccgggccctggataaatgacctccccaaattggtaataccttggccgctctctagctcgcattcgcgtacggcgatgggcgagaaggagtaaactataagatatatattggccaatctcatgggatgataattgccccgcgctcctctcttgtctctcgtttttcgactatctcttctctccactgctacggtatagagtgcactctttccgtataaaatactcgaatttagtgccgttgtaagtcaaatagatggtaacaataataaaaattgaggtacggcggtaccgataggcaccgccgggaaaaatttttggaactttgagtgctattttttacgaaaattttttaaattttcgtttggggggggggaattcaaaaggaattttcanttatttgctggagaattttttaaaatt

SEQ ID NO: 8788 - DNA, 1309 bp, Heterodera glycines
aagattataataaatttgagttacggaaaattaaaaaaagattttaaaccatttttttttttgcaattttaatgaattactgaaaaaaatcttataaaaaactatgcgataaaaagtaaggtagttggaaaattgtcaattcttgtaaaaaagttaatatatttcatatggctgtgggcggaacagtacaactcgccgataagatgacttgccgataaattgggcaaaaaaaatttttaaaaatgaaaaaattttttaaaagttaaatgtaattttgccgtagataaaaattttttttgcacaatttatactaatcgcgagtcgacgtcggcgagtcagccaacggaaagtcggcgagtttgtgtgtactcctgtcgtaggctgtcgtccaattttcgatttttgtatataatttctaaaaattttaagaaattctctatgaaaataatgaacaaatcagcttgcaacaaattgcgctgcagccaaggtttttctacgcaaaaaatagcattttgccaatcattgaagtaatgaaagaaattgtgcgcacacaaaaacaattttttgtcacaacagtcaaaaaaaatttgaaatattgtgacaattgcaacaaaatcacacaaatgtacaacctccattttgagaacaaagaaaactgtgtgaaggtttttaaattttttttttttgaatttttatcgtcttaaaggataaaattagaaataaatgattaattatttcaaaaagtttaccggcggcgcctgtcgacaacatcagattcattaaaataaaaaaaaacgttgcccaaaatggaaaaatcttttttttgggcgccaatttaaccaaactcaattaaattttaaagaaatttcagagacggccctctaaaatttgtattggttttttaaagaatttcccgcctcggcggatgacttgtccaatatttgggacagggccatggaggtcctgataacaggcgtttttcaattaaagcttgaagtcataaaattttttatgggattaaattctgtgctaaactcaatgaacaaaaaattattcatgaaatattcgaaaaaagcagaattcgaactttctcattgagttttcttgccatcagtattatggcatatgctcaattgatctaccctgtgtaaaattttaatcaatgttaaaaaatgatcaatttacaccaatttaaaggcattggcttgggctaaattgttaaaaaacagtgcggaccaaagtgcgttatctgtgttaagaaagataaaaacgaatatattatcaaatgccgatggaaaaaagataaagt

SEQ ID NO: 8789 - DNA, 1510 bp, Heterodera glycines
  unsure (1)..(1510): unsure at all n locations
aaaggaaatgtttctggcattggtactgtgagtgtttttgacatatgcgatgccaattgtcgggaagaacagcgtaatgataatgaggcggcgagttcaaaggttccggagaccgttactatcactaatgatgattagtgaaatttcgtgatagcgtgattaaatcaaaatcacatacaagagctgattcattcctaggaatatgactgaaaagggcataaattccaaaaaattgaaaaaaaatacaaaacaagcacaggttggaaactaaaaacaagaaaatttatcggggtctaaacccttggtctaggttaaaattttcatttttacctaaattaaagaatttttaattgccaaaaattgccggtccgtgcaattgtaatttttgaagttttttaaaaaatggaataaaataaatcgcaaaaccaaaaactcagatcattttttctcctcatcaatatgcctttttaagctattgagttcactaaaactggataccattatttgttgattattttttaatcctttttcttttctacattatctatttttcggaataattttgattccatatacaattgattatttctttgttgttgtattttacaaattatatattgcatatttgctacggaatattttatttattgtatatgtatttatttaatatgattttgcagagacttttagcatttaaagaagccgacatgaattatcttcttgccactattttgattcaacaatttatcattttagtatgtggtgcgaatgaaaaggtaaacttagattgattaattactttaattaatttttaaattattaaaatatttaaaaaaattaaggaaattattacattatacaaatttatgtgcaaagagttgactgaaaatgatgaagcaaatttatacagaaacactaaagattggcaacatatcaaaacaattatccacaatgagcaaattatggacaaatttgagactttaattgagtggcaaattcgctattcatctattgaacgttggttcaactattgtgaaaagctcaaaacatatatcaattctaaaaatggtatatttaaatttaaaataataaaataggaaaaaaatggattttttttaaatcagttaatggcgaagcattactaatgtcaatttcactgaagccaaagtttacattgccaaacggaaatggcattttgccaattgccaaggcaatggctaacattgttgaagcatacaaaaatattttcatgggaaactgtgaaaaaattttccgaaattgttacaaaaaaataattaagcaagaagaaaattcttcagaaatgaattttgaaaacaaagaagattcaatcaaggtttgataatccaaatttcgtttatatattgcatgttttgccctcttcttgtgttttcatgttttaataattaggcctttgaggctttttgaaattntttgagttttataaacaaaaatgggtaggctttgagattttttgcaagggatttaaaaa

SEQ ID NO: 8790 - DNA, 1484 bp, Heterodera glycines
gtatacaaaacaaaaaattgaaaataatataatttatgtagagggattgaaccaggggaaagaagaagggaaagtcaaggagactagccattaggccatttgcacacttggggcgaagtgaacccgaggaacatcaatcagaacaaaatggcccgtctcaaccaacaaatggccaaaatcatggacccgcgcgtgctgcaacaaatgggcggacttggcggtctccaaaacatgtaagtgccgaaaccaaaatgggagaagtgtttcccacagtcctgtttcaggtttcagttccccttgtatagccccccccccgaaaaaagatttcacattttaattacatgatttgctcccctatataggatgaagcaaatgcaatggcgcctcgggctttggtggcggtgccggcggcggtggtggcggaagacataaatgaatatgagaaggacagacaccaaatgatgaaaaatttttgtatttgtgttacatgtgtttgtggacaccccaaaatatcgccgcccgaaatctcatccagccaaaatagcgcctgaggaattcaaaaagaaaattttataaacttagaaaattttcaagaaaataaattattgaaaaaatttttttggagaatttccttaaaatatcagtttaaaattttttggcaatattttgtctcggcgatatggtgtgtgctgattcttctctctctttcagtttgtttgctgacaaaattgaattttgtgactgggccagaaaaaatataggtcgggattcaggacgagaaaaaaagggtttctagattcggatggaagtcagtttttctgtgggacatttttgtatgggtaaattcaattttattcgaatttatctgcgagacagcgacggtcttaagattttcgtactttaggggggggggggataccggctggaaaattttttttcttaaaatgggattggatataactgcaatttatacgaagctgggtttttattgtttacctcacataaaaaatatatgatcaaaaaataaaaaattgcgaggagagagagtgaccgatggatgacgcagggagggagagaaagagagatgaagtgaaaaataattgggcacaaatatatgatcaaaaaataaaaaattgcgaggagagagagtgaccgatggatgacgcagggagggagagaaagagagaggaagtgaaaaataattgggcacaaatatatgatcaaaaaataaaaaattgcgaggagagagagtgaccgatggatgacgcagggagggagagaaaggaagtgaaaaataattgggcacaaatatatgatcaaaaaataaaaaattgcgaggagagagagtgaccgatggatgacgcagggagggagagaaaggaagtgaaaaataattgggcacaaatatatgatcaaaaaataaaaaattgcgaggagagagagtgaccgatggatgacgcagggagggagagaaggaagtgaaa

SEQ ID NO: 8791 - DNA, 1593 bp, Heterodera glycines
taaaacattcagaagaagtctgtaagtctttccatttccatcatcaaaaggatggattttgagctgtaaaaggagtttttaattaattattttaaaacatagttaaaaatttatttaatcaagacattttttcaaaatattttttaatttaattatacaaaatctcgcaaattcggcttccattcacctatgtaagtgatatgattaaaattggtattaatggtcaaaaaattaataaattgaattttcgggattgattattttaaaataaggtgataccaacatttttaatttatgggaaatgtaaacgaaaaaagggaagggattcccgggtttcccaagggatgggactcccgttcccacccaactctaattttgagaatatatattattatttttttattttaaaatatatgttcgtctctttactcgtctttgctctcctcatgattatggataaaccacgtaagaaaatcaatgccgctgttggtgccgggtgaggattttcatcagatttaattgtggctttgttaatggtatcttcataatccttccatttgttttttggaaggacaaatgacaagttctaaaatttttgttcattttaaatattggaggatagatgtaagtcaccaatcttttcagaagaagcagatttaataaaagccgcgatgttcgcccattggcgtctatgtaaggatgcacatttagctaaaagaaaagaattttttttacaattctgctagctaatctatattaattgtttgatttgtgaaaagagccacatttttgagcgatttcaaacctaagaaaatgcttgaaaattttttgaaattggccaataaaacaactcgtttgatgaacaacgatttgggatgatgtaaattcatgttggattttttaaatctaccattttagataatgttaaaaatcagttttgctcaaaagcagccaaaactattatttttatggtttaactcacaaactccacgtgatattttatcgcgtttttcatgaaagtgtcatcgtcatcattcgccaccgcagctctgatgcgtgttaccaatccatccattagtcccccaactttctcccactctgggcaaagtttgtcaccaatgcgcacgtcgcttgttcgaaaatggccggagtgttgcgtccccgaccaagcaattttatgcaactgatgaatcgtctcaaaatggaaaaatatattaaaaaaatttgttttggcataaataacaagaaacaagacattttttcaaaatattttttaatttaattatacaaaatttatcctaatattttttaataagcgaaacttaaacccaccattataggaaatgcgattgatgtgcttttgatggacttcacagtccaaagaatggacagacaagctaataatgcagcaatctgcgcccgcgggtggcaaaagcagcggactttgaccccgcgggacggggaacaaggcaacagcatccatcgactgtggcccaccccaaacactttccccttcgttagcatttagcaataaatttgggcaagggggagaggggcaaacgacggcggcggtggacgacaatcgtatctttt

SEQ ID NO: 8792 - DNA, 1316 bp, Heterodera glycines
taaaaatttggtacctctttattttaaatatcaatcccgaaaaaattgatttattaatatttacgatcaataaaagcaatttaatcatttatttacataggtgaagtcgttccagctgtggtcactgttttatgaggcggcggaaaggggcaaaaatgttcggcggacccaccgacccatcatcaaacacactaattgatcggtcaattaacatttttcccattttttatgcatccatccattttcttcttccgttgtctcttcccggccaattaatttcacttcctttctctccctccctgtgtcatccatcggtcactctctcctcgcaattttttattttttgatcatatatttgtgcccaattatttttcacttcctttctctccctccctgcgtcatccatcggtcactctctctcctcgcaattttttattttttgatcatatatttgtgcccaattatttttcacttcctttctctccctccctgcgtcatccatcggtcactctctctcctcgcaattttttattttttgatcatatatttgtgcccaattatttttcacttcctttctctccctccctgcgtcatccatcggtcactctctctcctcgcaacggtccaaagcaatggcataggtgaattttgacaaaagtacttacaacggcatttaaaacttgaagcatctcctcgaacagtgccacttcctgcttgtgccgtccggacgtgtcgacgacaatcatttcgaagccgtcatttttgaatttgtccaccccattcgctgcgatgatcaccgggtccacctcagtgtaactagaataatgcccggaaattcatgaaaaaatattattatttttttagtagtggtgccattatctgattgcaaatagacaaatgaataatgaacaaaggcacagagtcgcaaattgtaaggaaaaggtttttgtgacctctttttatttttcattaattttttgttaaaaatttggagcgtggtaaaaaatttttcaaaccgtttaagcgtttgtataaaaaaatggtcaagaggaattcgttatgtagaacataaaaggtaactcgcccagtcaaaaatattcccaaaattacaaaattcgcccgaggggttaaatccaaaatataaaatgaaatctgtcaatggttttgggcccccaaacctttgtgcaggtggtcgtttttccggcaccctgcagaccgacaaacatcaccacatttggccgccctttgaccggttggaacggtgtgacgccaggatcaactgaaacatggacggatgaacgaaaagatattgtaaa

SEQ ID NO: 8793 - DNA, 839 bp, Heterodera glycines
ttttgaaaagcatacgctgaaagtgcgcctccgcccttggcatgaccgtccagcttggtgatgatcactgagccgacatccactgaatctttgaacgcgcgggcttgcgcctcgcaggcctaatttaaaaaaaaaaattttttttttgccaataaatatacacctgtccaatggaggcgtccatgacgaagacaacgttgtctggtttctgaaattatttaatagttataaaaattattatttttaaatcataaagggacaaaaaccgaccaagaaaaaaggtgtcactttttttttaaacccaatacccaggaaatttcgcgtaaaaacggcaggaaaccagagacggttccaggaaaagcagatcatggaagggctacgaacaagaaaaaccgaaaatttcagcctaaaatactatttttccctcaaaaatttcgagtggagagggggggggggttacaaattggtaaaaaagtgaacttttaatgacaaagtcttaaaaaactaaaattactccaaaaagggtggtggagagcgatgaaagtcaagtttttaggaacgaactccaatttaggcccgattttttacgagccaaccccatggcatgggttatttttgaaaagtacgtacaacggcatttgaaacttggagcatctcctcgaacagtgccacttcctgcttgtgtcgtccggacgtgtcgacaacaatcatttcgaagccgtcatttttgaatttgtccaccccattcgctgcgatgatcaccgggtccacctcagtgtaactgaaaaaatcccaaataattcataaaaaaaatttttttttttagtagtggtaccatt

SEQ ID NO: 8794 - DNA, 3154 bp, Heterodera glycines
  unsure (1)..(3154): unsure at all n locations
tcccctctctctctctctaaatatctctctctctctaaatctctctctctctctaaatctctatctctctctaaatctctatctaaatctctcctctctctctaaatctctctctctctctctctaaatctctctcactctctaaatctctctctctctctctctctcccctctctctctctaaatctctctctctctctctcccctctctctctctaaatctctctctctctctaaatctctatctctctctaaatctctatctaaatctctgctctctctctaaatctctctctctctctctaaatctctctctctctctctagatctctctctctctctctctcccctctctctctctaaatctctctctctctctctcgcccctctctctctctaaatcgctctctctctctcgcgatgtgtccgcccatccaaatgtgcacattggtgtgagttatctccaacactgccgaggcgttgctctccgtgaacagttggcgagtgcggtcctcattctaaacagttcattttcgactcctagaagaacaagtcggtggatgggaaagtcactccgtcgggtgtgaaggcgaatatgtgggcgaagttttggtgtgtgtagtgtggtatcgactctgaaatcatttaattctttttggtgagttaaaatgatattaattaaactgactggtgaacggtcagcaacgagccttggtctccatttctgggcgcaagacgtcgttgcacgggtttatcatccggcttaatcagatcgatgatttaactgactttgagtgattgtgcatttattggatggtcatttttgtttgaaaaatgtttcagcagcaggaattatacaacaatttagttaattttctaaaagctattttgtttgtacttttcagggtattttttaattgctataattaaaagtgaaacgatttgggcaagaaattccaaggaaacgttttgaggctgagaccccgaggagaaaatgttaagtaccgtaccactctcaaaaagtggaagaaagggcgggttttaatttaaaaaatgttataaaaccaaattatctgatcctattagtgttttttgtaaataccaataaataattacagtaatccaattagtcaaaaagccgtcaatgacataaccactgtcatttttggatcccatgaatttgtcggtccaaatgatggaatcggcctgtcaaatattttcttggtaaacaaaaagtaagccgggaaagcacagggttaggaagtccttggtccaacgacgagtcccaatagggaagggccaccgaagggtcaatggaacgaaggccgaattccaaactgaaggtgaatttggaaaataaatgctgttccccatttataccgtttcaaatactcgcggtgccacaaaggaaaggtcggaccgccgtgggcggacggcattttgtcaatgccgctgtggagaaaggcgaggcgatcgtactcggagcagccgttgtacagatgcttcagtttcaagagagcggaatgctttaagggtggtaagaggttttgaaatttcacaattaaatttaattgcttacgaatcggtcccgttgctcatcactgagcattcggtattccatgcgcaatgccttcccataacttttcccattgattgagcactgagcaggcgaagaggaaattcctgaaattggaattgaattagaatttaaccattaattagcttagttaaacaattgtatttgtttattattaccatcaacatatgagcagaagcaggtgaggttaagacaagcgagcttttcggcctgtaatttggcgggggtttctcatccaaaagttcggcagctcgtgaagagggcacagaagtgggcaaacctttaaaaaaacaaattttaacctaaatttggcaaataattcaaaaaggaaccaattttgatggatggtgggagcagatcatcttccttcgcaacccttccctccctttcggcctaaaaagcgtcattattgtaaataattggattagttaattaactaattaattggaattgcacaataattttattataaattcattctgttcttcaatatgtttttccaatatgaaaatgtagtaaaatgccctttcgacgcacattgcgcgtctcaaacaaattgtgcaccattattctgcacgctctctgcttgttggccccaaatctggcacaaatggagtagttcggcttttcctttccgtttggcactgaatgtggcaccgatttggtggcattttcagctgattggccgctaacggtgaaaatacagaggaaaatgatcagagttagagaagacaaaacaatacgcatttttatgacaaatgctatctgataatattcatgtgtcattaatgcatttttattatttgaaatgaatttttattcatagaattgtgattttttaaaatattcattagaatgggaatgaccacggcgagtggcgctgactaatgaatgttgggcgccgcgggtcatgatcattcattagcagacaagggtcatttatttaatattcatggtcatgttaatgcctaatatttgtctggacgaatgctaacacagttaatataacataataagagattttcttaatacaatcataaatttaatttttttgtcacaaaaatgggcaaacctataaaatttatgctaatgttaatttggtaaaaaatgaattaaaatcgagaaatgactctcatttaaaaaaatttttaaattttttgaaatggcgcaaatgaatcaaatttctggccttttaaaaggatttttgctttgtctgaagtgtccgcatcatattttcgctgatcatatggtgcaaatgggcgaccactttcattgtcataagaagcaaaagcaacacgactaaccaaagaaaaatggaatggccaaatcggcgtcagcagatcacacacttttggcgacgatgctttttgtcgactgctcaatgactaataaatttaatttgagtttttgcttcactaaatttcaaaagtaggcaaattttgaaaatgattttttanaatttatttatttcttcgctcgcaagaaagcttaattanagagtggccgatcgtttcgtcactgtttagttcgtcacntgagaaataattttttaaaaat

SEQ ID NO: 8795 - DNA, 2565 bp, Heterodera glycines
tcatatattaaaatgattttttccttcttggcaaaaaattttatgggtttacgaaatttttttcaaaaattcaaagcaattttcagaatttttatccatattttcgtattttttgtcgatgtttcagggtttttgtccatatttcttccatattttggattttttagtccatataaatccgggccctaatcattatcaataaattattttccggcttgttccactaaatatacgttacctttaaaaaataagtcatgtaaaattcagggcagacctattttagattaattcaattattaaagaagcgattcaaattctaaaagttcttaaattcccactaaattccttaggcgaacagaactaaatacatgttcaacttgagaatgcaatagtttatcgggctgaaaaagaaatgaaattcaaataggaaagttacccaaatacttgttacaattacgtcatcccgaatagcaagtggaataataagtctaaaaaagataatccatcctcatttctcatcctctagcattcttttcctcccgtttcccttccatgcttttttttgtcttttcttcatcatttcttcgctcctctttctcttcattcatcaacctcagatacttcccctcgaatgaccatcactatgttccttgtaagtttccttccgcttctcatcactactctccgcctgattgttatcactgtagtgtccatcgctatcattgtcgtgcgaatcttcactaccactatcaccgctctcttcattttgcatattctcttccacgtcgtcttcttcatcagcttcacaagcatcacaactgctttcgccgttctcattatcatcactttgataattttctctaatcttttcagcatttttgttctcatttgacagcacaggtaccgtgcttctgacaattacactcggctctgaacaagcaatgctgctgctgctggcgctgcttggcacaccgtctctttgcatgctggcatttgtaatgctttttctcgatgaactgattttgcttctactgctgctgctgctatttcccaatcggtgttgactgcattaataagcagaagtgccaaccgagtcgtcatttctctctttcttctcgctacttctctcacttttcgctgttaacttatttgatgccgcactttcattcggatcattgttccaactactcgttctgcttacaccagcacactctccgtcctcatcacaacactctccgtccccgccaccacactctccgtcctcatcacaacactctccgctttccatcttcttgccacttctctcacttctcgctgttgatttgtttgatgccgacctttcaatctgctgattgttcccactcctcgccaatgccatcgtggcgataggagcagccggtcggctttgatgagaagcctcaccagcggtgcgactgttcttgttgttgttccgattggtcggcgggtagtagtcaagtttaaactcaaattctggggtagataattgctgctttaataaaccaggcgtcgcttgttgggcatttccatgacgatccctttctgtgtaactacccctatgaaatgcttgtagtccatgtgtttgtggaacatttctgtgcggctcatcatcactgttgagcaatggctctcgctctgtgtgacgatctgtcgtcccataaatccgatttgcaacattagcaattactttggcaatttgattgggccgattatttgcttgttgagaattaagtgtaagaaagacaattgcaacaatcgcccatgggttaaggtcactgctgaaggctagtacagtgatacaaagaatagcaagagcgattaataaagcgtgaattgtcgaagagtcaattggcgttatggcacgtcgtcgacggcggaatttatcattgccaagagaaaccgctttcttttctgtcacttttttttgtctatctgacgaagccgtgtgcttttggttttttggaattgcttgatttttagctgccttcgttggagcctttgttttttgtgccatcggtgtgttaagtttcgtccgtagcttaggtgaagattgcttttcctgagttgattttaggaaaaatgcaagtttttcgctcatttttgaatatcgaaaggaattagtggttctgggatgccgataaggccggaggaaaaattttgaaacaaattttcctcccatttttttatttgcttaaatttcgtcaaaaagtttcttcattattgttgttgagcccatttttagtatgtttcatgcccgtccacggtaggaatgaggtgcggggatccccgtttcctgggataggaaaaacggggaacggggatgaaaatccttcccccccccccgtccccacacatcctcactcattagaattacctctggattagtttgagtagctttgtcttggtctgatttgcgaactctttgcaaaaaatgtgtccaaagccccatcattaagcccactaattgacttggcattacagtactaccgttgtttgccaccgtactcttgccggttacttttcccaattgcttctttttccgtactt

SEQ ID NO: 8796 - DNA, 4364 bp, Heterodera glycines
  unsure (1)..(4364): unsure at all n locations
caaatcaaaatcggatttcaatcgccctcctttaaaccatcaaaaccaaaattttgaatttgctggtccacggaacactaatttcagacaaaccggagacttacaaaatcaaatgattagaaaccagcccaccccggcaacaaatgcgaatactgttccattgaatgctccaaatcgaactcaaaatcaaaattttcgtccctacggttctaatgcaattgttgtaaccgaaaaaaatgaggatgattcgccagtaatttctgtcgcccattttgaacaaaaagagactagggactatgaaaaattttttaatgctctttcaactcattccacggagttcccaacgaacaatcccgcacttgtcaaaacatcaaaatgtttagacatcacattaagcgttgtggaaaaagaggctaaaggcttaatggattcgggagctgaggccaacattgcaaaccctgaattcttataccaaatttcagtggaaaagggaattaatctcacagattggggattttgtccaaattctggtcccaccaaattgccattttcagttgcttcattcaatggcggaaatatttcagtaatcggtgtaattaatgtgccaattcgtaaaggaaatatcgaaagtgttatttcatgcctaatttcactaaaaccttttagttacgattttgttttggggccaaacgcattagacgcattgggttattatatcgggaacacaattacaaatgaaatcctgaattttacatcgaaatttcccactaaaaatgcacttctaaatactgtttacgtttcttcttttaaatctattcctccgttttcatcctgttttgtcgaatcattcgtcaaaacccaaaataactgtcaaaaaaggtcccaatttcttatagaaaacagtatgagcgaacaagaccttcttgactatgaatcggaaacggagcgtgatgaaaatgtgatggaattatgcggcgaggaggaagagaaaatgctcaaaaagttcgggattttggacgaaaagccaaaaattgtccgctcaaaatcagctccggaaacagacgatgtaaaagttcctattaataatttgatggtcgttgagcgggcaattgtcggatcgaaacgtggtaagttcaaaattctaattcacaacaaaagtaatgaacggatttttttggaaccgggtatgaaggtggcacaagctgaagtaattgagagagtttttgatcctttttccgaactaatgcccaaaagttttgatcaattgcttcttccacaaattttcataagaaacctttccaaaattgattcaaaaaacagaatcaatgatcttttttctattctcgatccgaaaacaggcccactttccgagtcggaaaaagaacaaatgcacgaagtctggtgtgaatttaacgaaattttggcgttagacgaatcagaattgacccaaaccggtcttataaagcaccatataaacacggaaaattcgaacccaatcaaaagtcctccaaggcctatcccatttggggtgagagcaaaagttactgaaatgatcaacgattatctgaatcgaggcgtaatacaaccatcttcttccccatgggcctccccaatagttttggttacaaaaaaggatggaactgttcgattttgtgtggattacagaaaattgaatgcggtaacagtaaaagattcatatccactcccaaacattgagcaaattcttatgtatttggggaaccgaaaatttttctctgttttagacttaatctcaggctattggcaagtcaaagttaatccggaggatgttcccaaaacagcatttactatgcccgagggactatacgaatttttagttcttccatttggtctttgtaatgccccggccaccttccaacgtttcatgaataatattttgggcgaatttgtgaatgattttgtctatcttgacgatattctaatcgcctcaaaaacgtttgatgaacatatcattcatctcaaaaaagtttttcaaaaactcaaagattttgaagtcaaagttaaggcgaaaaaatgtggtttcgcacaatccaatttaccgtacctggggcatattcttacaagacaaggccttgccaaggatcccgaaaaatataaaccgattttggattttccgcaacctaaaacaattaaacagcttcaaagatttttgggcatgactggttggcacagaaaattcataaaagactacgcaaaaattgcggcacctcttaccaaaatttttaagaaaaacccaaccaacaaatcttgggagtgggacgaaggggctgaaaaggcatttacaaatctgaaagaaagcattgttaaagaagttgttttaaaatatcctgattttgaacttgcccaaaaagacccaaaatacaaattccatattttctgtgacgcgtcaaaagaaggcctaggagcggttctttgtcaaagggataaatccgggaaattgaggccgatttgttatgcttcaagaaaatgtaataaggcagagtcaaattacggtcccacagttttggaatgtttaggaattaaattttccgttcaaaaatttaaacagtttattgcttggctcccaacaattgtcgttaccgatcataaagcacttccggggatgtttcggagcaaaaattcagttgggaatccgaaagttgaccgttggatcatggaattaggtgccccttttcaattggaagttgtttacagtccgggaaaagaaaattatgtcgctgacgcactttcaagagcattcccgaatgatgccctatttcaatttggtgataatgaggaaaatgagaacgtgacaatttcagtgatggtcattcaaaaaaataattccttgcccaaaaatagttcaaaagaagaatggttaaaagaagtcaaaaattcggaattaggctttatctttgaatttttggaccataaaatcttgccatccgatcaaaaacttcgccaaaaagttattggattcccttggaagatttactgttgatgacggaattctttttcgtttaaatgaacacatggaaactgaacttttcattccaacaaaattccgagaatccctcatcgcagaacatcactcaggaccatgtgcaggccaccagagcgggaaaaagatgtttaagcgactaaaagctttaaattttttttggcctaatatgtactccgactgccaacgtttttcaaggtcatgcagaatttgtgctcataatcgtgttccaaaaaaaaatcatccgggtttaaatccaattgttacaattagaccacttcaattagtctgtatggacattttaaaactcggtccaacacgtaatgggaataaatattgtctggtaatgattgaccatttctcgaggttcgccgaaattgtgccagtcccaaacaaaacagcggaaactgttgcccaggaatttgtggaaaagtggattttaaaatttgggaccccggaaacaattcattctgatttaggaggtgaatttgtcaatgccattttaaaggaaatttctgaaaaactccttgtttcccgttccacaacctcagggtacgaccctaacgctaatggtctcgcagaaaggctaaatcgaacagtcattgaaatgaccaggaaaacctgtacaagtccatgggaatgggatttacgtgtcccatacgtcacattttcatacaatattacaccaaatgaaagtacgggatttccaccatcaaccttatttttcggcagacaactccgttttccatcaaaaatagatgcccccaaaagaccgaatcccttgtatactgtagatttagacgaatatttacagttctttagagaaaattacgaaatgattttaaatgaggcatccaaaaacattaacagcgcacaaaaggtccaaaaaagtaaatttgattcgaaaccgaacgttaaattgggaaagtacaaagccggtgatcgggcacgtgttcatgcattttggtgcaggacatttttccgaacttgccaactcaagacccactccgccgtattcaattgtcttctttgggcgaattgatcccagtcgttttggccaaagaaaaagggattctgcttggccacatccgcaattgggcaaattcgaatgatgagccaacttctcttttcaaacatattccaaattttgcaccaaattcccaggattttgtctctcctatcttaatttgggttgatcactgtgccattgcttttcaatccctcaaaaaatcggggatgaaaaacaccaaatttcacgtggcaaagacaaacggtctctaccggttncgagagctgataaatgangcgatggaagaagtgaaagccaaaatatttgngcttttca

SEQ ID NO: 8797 - DNA, 1967 bp, Heterodera glycines
ttttctttttttgaaacattttatttatgtctaggcatttttccgttttttggttaaatacaattatttccagaaatagaagacccctggggcgtttttgttggttttttatttcaaaaagtttttttttgcaattatattatataatagttagactttggtattttgcgcaacttcggtttcacctcatctgcgccttcacgcgtgggtcccattacttttgcgccctgtgtcataggcgtcaaaatttttttaaaattaatttcgtgatttatttgttaacttcgaacaaaagaatttaaaagaaaattttaaaaaattatttcgaatatttttttggttgattaaattgtgagaatgattcaaaaattttaaaattttcaataaaaatgaatatgcattgtataaaatttgtaaatgatcaaatcagcagaaaatgagtgattttatgggcttatccaccggccaatttcctctttgttgtccctttttcttcctccacaaagatgtcaatggccagcgtcactttgtcctcatttttgtcgtaaaatccgttgctcgggtccatcaattcctaatttttattatttattaagccaataaatggtgttttggctacaaactcaccgaaaaaataataaaatttgggaatccccagtttttttcttctttcttaaaaacatggtcatattttcccgtcaaatccttcgttccgttcttttgtgaaacaattcgaagggttgccgaacatttgcaactccaatttccatctttggcaatcaaaattaggtaatgtaatcaaaaaatcttaattttgacttcaccttttcccgaagcggtgcacgaaaggaaaaatcccaggcatttctcatcagtgcttttttccttcgtctttatttctgccaatattttccatccaaatccatttattcgtatttcataatcactaaatcgtctgctccccacttcctctcgcgcaaattccgaaaatttctcaatttccaaagccaatgtccccctgttgcctttggctgtgttccaatcggaaattcgtccatgccatgggaatttcaatgttttaaggccgggcacaccacggagattggggtgagaatggaattgataaatggaaacaatttcatcgtttgtcaaaacgccagaaggaactgcaaaaaaataacaaaataatttctatcatttaaaaaaaatgttaccgatgtttttggtaaattcctccggtgagatgagaggaaaacgaattttgaatagtgccgggccaagcaaagcacgacgctttttggcggaacacacattacccttttgacggcacttttcgtcagcccaacgaagtgcctaaattaaaaatgaacaatataatttaaatacaacaaaatatatgttaaaattacagcttgccaaagttcatattcatcgttgatcagtaattgatcacgttcgaataattcacacagcaaattctgatcaatttgcaagaattcgtcagattcgaacaattcgaacgcattttgacaaatgtaacgaaaacagtgatgggcaaaatcctaaaaaataaaataattatttttagaaaatatgctttaaaatggacccttaaaattaaaaattaaattttcccggcggcaatatcggcactgccggacccccattttaacttattttttgaaatttatgttgacccaaaaatggcaggaaatagccccttttttagcgaaaagcggatacaaatctctgtatttgctttcggcgctgatttgaaagaaaccctggaaaaaatatttcatacctgaacaaggggtcgccagggcgaggcccatacgacggacgatttgcgcgggggggggggtgcgccagggccaatttttcgtacgaaagcccccaattttcaccggcgacgaccttttttttttttgttattcagaagacttttttctgacgacctttttttt

SEQ ID NO: 8798 - DNA, 2938 bp, Heterodera glycines
  unsure (1)..(2938): unsure at all n locations
aatttcgaccggcgtaaagcacagccattgcgttttctccgtccaattcgctcaaatcatccgcataaataaagctgagcatcactttgaacgctgctgcttcaacatcgggcactttcacgaggcttgactgatcagcggaagggcctaaaaattatgaaaaatctaaaaaaagaagttgaaaaatgctttttccacctccgctttttgcattttgggcgtcaaaacgaaacattgcttcaaatacatccgaactcaacgtcaaaatgtgcttgtgggctcgaaaaagctaaaattaaaatataaatgaaaaaatgaattttctttttgaatttttcttgcctttttttcctctcccaccaaaaattgaatgtccgccccattggccgtgctcagcaacactttcatccgatccgacaaattcgctgattccgatgacggcagagacatttatttggtaataattaggtaaaaaaacaaaatttcttcgctaaaattttgattaaaatttttttcatgatcttagagacacaaaaatagtacaccaaaacgagagaaaaagaaagacaaatttcatcagctcataactttttaggaaccccttaatttgcccaaaaaacatttcactgttcagattttttgttggtatatttgtggaagattgcagcgaaaagtaaatgagtaaatgttgtttttttctatttaaaaatgaagagatagtacgcctaactgagagaaaatagaaaagaaaaagagagcgaagaaatagtgtacttactatgttttcttgtggaattgacccctaatgagaattattattgtttgtgcgccagaaaatcgtcaataatatgtaggaaatatgttgttcatctatatagaggtatgcatcagggatgggccaaattgaaaaataaaaagcgaaatgcgaaatttgcgaaactgaaaaatgcgaaatgaaaaaaaaaagcgaaatgcgaaaagcgaaattttttctacaactttttaatagttaaaatcataaagcaaaaatttttttaaaattttataaaaatttaaaaatcaataaaacgcttttttgaggcgcgctttttccaaaaaaactttttgggaagagggggcaggcggcgccgggaaaatttttgaaaatttgattaaaattgttgacagattttcaccaacaaatcatcaaattttgtgatttttgtatcatttttctaatgagaaataagagttttggcgcgccgctgagaacagtttttcatcaaattaccaaattttgcgattttgggcaattttctacgggaaaaaaattggaaattttgatcatttataaacagtttttcactgaaaattagccaatttataggtaaaattttgaaaaatttcatgggaatttaatccaattcttaggggtgtaaaagtcgcatttcgcgccaaaaagcgaaatgcgaaacgccaaaaaatgcgaataatgcgaaaggcgaaacctcggcccatccctgctactcactgagcccataaaattttcatagctttgcgtcaccgccggcaaattggcacgcggtgtccaaatgggcgcgtcgccttctttgacctctttctgcaatttaaaaaattttaacttccgaaaatagagagtgccaaaagacgcgcactttggatgccactttgtaatagggcacaatatccacgccctctttgaccaacattttgcggcattggtccacgacaaagtcaccgccgaccggcgatttgacaacagctgaacaattgttgaaaattaattaataccttttaattttacgctanaataaaatctaaattagatatcttccggccaagacatgaccataaaataatttaactaattagtgaatcataactttttctataagcatccaaattaaaaattcttggtataatttgttaaacccccatgagtcctctattaatctacaaaggtgaaaaaaaaaccccccaagatcaaaaaccttttgaaattttgcaggctaatagaggagttcttggaactttcaaatgatacccaagatgtttaatttagatgttcctaaaaaagctataatgcattaaacttgccaaattattttatggtcgggtaaactgcaatagagccaatgttatcatatactaatcctctctatccattatatattaatgtgccataaaaatgctttgttaatttacaatttgtgatgcaatatccgtcgtacaccggcacagcggaggtgtgggaggagccgctgtcgatgaccaacccggctgtacgaccgcttgcaaatctgacacaaaatggggggaaaatgccattgaaaaatcacccaatttgtgccacaaaatgaaagaaactcacgcggccagcacggcatttttggccaaataataggccggcacgccgtacttctcgaacaccaactcggtcaaccgttgccgcttttcctttgggttccacttgaaaaaatgaataattaaaagataaaaaaccaaattaaaggaataactggtggctctgtgaacagtacgccatgctcacgactttctgtacaaatgcaaaatttaatcaaataaacaaaaaatgaggtagaaaattttgcctgctccaagacacggcccgtagatgtagtcgagcatcttctcaaaaagttcccagtcctccactaaacagaggtaaaataggcgaataaataaatgtaaatgtccattaaaattactcaagttaactgaagaattttttcaacgaaaaatcgtggtaaatttttgaaaattctattcaattttggcgcctatcggcaccaacggatccccctttttttgttgcaaatttgactccaaaatggtaaaaattagtcatcttgcagcgaaaaacggctaaaaactaatagtttttctccccggcgctggaattttcgaactataatac

SEQ ID NO: 8799 - DNA, 669 bp, Heterodera glycines
  unsure (1)..(669): unsure at all n locations
tgatcatgggtttgaacagataagtctacgatttaaagaaaaaaccgattttaaaatatttttaaaatccttcatttgttggtaccaaaatgaacaaataaatatatgtcaaattttttaaatggtataatgatggttagaatctagcatataataaatagtagaaataagtatacaaatgcaaaatttgaaaataaaatgaaaaataagataaataaataactaattatgaaatttcaatctattataaataaagcaaaatttaaatttgaaaaaaaaatcaaatctatctttaattttatttcattttattttataaattatgtacttgttcagaaaaatgtaaataaattattatataacatgaaatgtaaatgaaatacaaatagcatttacagtgcataatgacttttaatatgcataaaaattaaaggaagaactattgttttcgtttaatccaatgataaaaatataaaagtgaattcaattgaaaattcattttanaatattttaattaatttttaaaacaagttaattgcctttgcttacattanaatantataanatatannnatgaaatgaatatccgagacaggattagaagtagaagaaattattgctggacgagangtgtanngggtggatgagaaaatctttcatatatgcatt

SEQ ID NO: 8800 - DNA, 3169 bp, Heterodera glycines
ttttttagttataaattttcgttgtttacttttaacgcccgatcccgattgttcattaaatttttgttttaatattccactagtcctcgggtcgtttctcagtcgttgctctaaagcttttgtacctatgggtgatggagcattctcgggtgaccgtctcaatattcgctctaatgcttgattaacattactttttaaatatgccgtaccatcagctctcagtatatgtcctctagagccaaccccaaatttctcagggtcattatttataacttttttcttgactacaaaagacttttgcttttgacgaaatttagttgttcctacacgcattggtcttatcagtggtctcgtctttggtgttgatgttgttggctcagcatcactctcttcagcagtagtgtaagggtcttcaagtgttggaatagagcctgtttcatccaatccttcgtcattaacaatttgtgtaggaattattttgctatctctttcacgctgttttggtttaaacaccatcaaagatccatcagtgagttcaacctttacgggtttgtcttcaatttccttccttagtttcaagaaacgcctcaattcctgattataaattaaattttttgaagtagcgtctaattttctctgcttcaaaagtgatgacaatttatttttagcattttcaacgttaatctcgccagactcaggtttaataaatttttgtacaagtcggaaggaacaagaataaatatattctccatattttaacgcagcaataagtactggtaataataaaggagacaaattaacgaaaaaaccaccaccgttttgttgaaaaactttctttgcacccttctcagtctaacttttgctaattttcttacaaaatttgcgtatggtaaaagtctatatttttgtctcttcgtgagcgggaagtacccctttaatatataataactaatttcaattaataatccaatttgttcagtagacgcttctttaaatatttcttgcatctttttaaaagattttgtttttgccaatttctttaaaaaatccaagttttgaagaacatttttaggtaaattaatcattttgaatatacaatgcttttttttcatctctttaaatatttttgtccgtattctcagcaatggatttgatgccggttgtaaatccaaaaataaatatccatacggtgataaagtggcatctttataagcacttaggaaaaatgcaagattttttggaaacagttgaacgcctaaattacgaatttgtagcgcggcattcggagcagacattaagacaatgtactgtgaattaattcgggctaccttcacctttttttcaaataaattctgtgttatgaaaatcacacccatattaagatggtgagcttttttgatgaatgattcagacaggtttttctcatcaattattattaaaaggtcatctagaattaataagagcggcttctttagcacctgctttattttttaccagtcttggcggcacccattccacattgtctcagtttttcaaccaaattctccataccatgttttgcatgtgcttgaattgactctcggagcgctttgccctgagaaatgtcttcaagcactcgatttccggccttaagtccttcacgagaaactgtctttagcaaatttgacgcaaccggcatcaggaaacgggccaaattcttcagaagaccggcacctcgttgtttttcaatgttgattcaaaaaaatttacgccggaaatgtagcgtgatgatgcaagtaccccagttaaactttatgtgtcgtccaaatgcgttctgaatttcaatttgtatttcagaaactcgtttgttttgaagagaatggaaaatttcattagtatatataacctcgggcacgtccgtccctccaggtgttgtagatacattaacaaccctcagcaatggagccattttgtcgccaattatggattcatcaatcagcttaggagcgtacacatacaattgtttaacgccgccggaaaggtcggatgtattgtgcttgttcaccatcatagagacgagtactgttaaatcctagaacatatgccaggtgtttgctgacatcaatttgtaccacgcctgatcctgttttcaacacaaatcgttgagcaagcccattgaaaagtagttccgcgccagtttttccctttctctgctcttcaacaagccttttgaagctcgcttcagcttctccggtatattttgatgctctaagatcagcttaaaaatgtctcctcgttttggctgcagaataatattgatgctgttgctcatcctttttcttttcaattaactccttcagtgcttcacctcttgtaagttgccgatccgagtcggatgaaccatgaggcggcggcctcaacttgtcctcctttacaatattttcgatcagctctttgagaatctggcctcttgtgtgaccttctccactgttcggcgtcacatcatgaacaggctctttatctgctatcgataacattttctttaactgttctccatgtgtcagctcaactgtaattgttgagccagcgggactttcaacaccaccatcccttctcttttctatcatactcaccaatttttgacctcgcgatagtaaagctactactgtatcgctgtgatcatcatcccttttagtagatagctggtgctgcctttattttgttctatcttctcctttagaagcttggcatgggtttttagtctgttgccgctttgccaccgtcatttgcaattctgttggagttgccgtggttatctcctgttgttgttgttgctgtattttttctttgagaacctcagcgtgggtttttggtttttccatcgaattattattatcctgatccgacttttctgtctccttcacttgagcggcacctattcgctcctttaacgcctctccagcggtcaatgcagctgagattggtgaagagaacggggaggactgttgctgctgttcatcacgtttctttgcctcaaattccaatgcggcaaatctcttacgtctgtattccagcagttgttttgctcggtcgatttgctgctggaacgatgagtgctcgtcgtcctttagctgcttctgtgtccttttttgttggagttcttctatcttgtcgaactattcacggagac

SEQ ID NO: 8801 - DNA, 3726 bp, Heterodera glycines
tcttaagctattaaaaatcacttaaaatgacataaaagtatttccgaattaaaataggtcaaaaaattttaaaacttaagcaatttggccacgattttcgggtttcgacccaaaaaacgagttgaagtaataaaaacgagttggaacaataaaaacgagttgagtcaaaaacgagtcgatacaaaaacgagttgaagttttaccttttgcgaccccccccctcataaaaatgtcatggttccgaggaagaaaagcacttttatagggtagttttagtcgctgatcaagaatctgaagtcaacactgaaaaaatctatggttatatcaatgcttttcatattgatttttctatttttttgaaaaaagaaataacgagttttttcgtgtatcaatcgattccgttaatcgagagaattgaatggtacttgtttcagggttctccgatgtctatatcaaaagttatagcccagtttaaggcttttttcgaaaaatcattgacaaaatcacatgatgaaaatcatagatttttgcagttttgacgtcagattcatgatcagctcctaaaactacattagaaaagtactttcctttgtcaggaccatcacatttttatggggggggggtagcaaaacctacaagtacattattattattattatacaataggtaaaatagatctaatgaaacacgtagaaaaggcaactcgtacaatggcttaggctaggcttaactttaggcttaaactgatcccacattttataccaaaaagatcaatcactcttttttaattaattttttagaaatgctaaactaattttctatttttattcttaattagaggggcctcggtccctcggacagtccctgggggaggggggggggcgagctgctcgttctccatttttgcatgttactcaacttgcggttctgttatagccgaacattatgcatttaatttgtcaactgaaatgtttgttatgtacatatgacacactgacgaaaatgtgtcggtggaaataatgaaaggtcaagaaatgcaacaaaacggggcagagggggggggggagacgagatagaatgtcatcgccagggggggcaaagagcaaagagataatgcaatagagattgaagaaatggagaggaagagtgtagcagaaatgactcacaaatcaggggaagagagagagagcggaagggagagagagtagggtatagagagagaactgatcgctgcaatggttttcaagttttaaaaaaaaagtttagaaattttttctatcggtttaatccccgttctgttaaacatgggttgtgccgtcattgaccctggcgaggcaaacacctcggcccccaaaacgcaccggcgccgctccgcgtcccagccctcgggcgccaacaccgccgcactcgcttccaccacgcgcagcgacccttaaaacgagcattccgacaatgaaatgtctaattgcaccatccctggtacttttgtgttcagtctacatgcaaccgcccctgtgacttagaatcatctaatatggaagaaaagcggcatttttcgattgacttattcaattatgacttactttttctaaaatttaaagattatccgatgattcatatgattattacaaacgaagataccaacttctgtgatattcagcgacattttctgccaacctaccctttcttccgataaatgaccacgaccgccattatcaattaccacattccatctttgctgttgttgtcaaacttgaaggtgatgcagctttctttgcttaaatgtttcattttgttagtgtgaaagtattagggacccaacaattcgggttgtcggaccctaacaaaaacagatcacgaagattttggaaaaacgctaaggacggtaccgagacagaaagcaccgaatttagatcccaggataacgagaattagtcgcgtggccgtcacggtccatagtaatacacatattcaccttatcaaattaattccgttggtaatcgcctttttgtattgctctgtatttcacacttaaatttaattataagaacatacatatgaaaaactccaacatttttcactgaattttatcgaaatcggtaattttgtccatttccgtgctccccgaatatttgggctggcctgccgtttttgacgaattgtcccaaagcactcttcacatgcttaaaacatttcctcagaacgtagtttaattcacaactgtccacgcattaccttctttgcgttcgtcataaatttcttgtgcatccatttttgtgaacaaagtgtcgcctgcctttaatggatcaccaaaggggatttgcacatgctcctataaaaattaatatataagacaaatataatttaaatgaatttataaattggattttgtcttttaaattttttcgcggatttttttatccaaacaatttttgacttaaaggacttataaaaacataaaagcatatcacaggcaatttaggaatttttagcacaaattttggcattttgagaaaaacggtaagaaaaatggctcgggggttttcgcgccagcggagtttttggactgtaacttttttcactgtaacccaaatccaactaaatttattgccagaaatgtttagaaaaacagctttttgaagttttctggccataacttttctgaacctaaaccaaatttttcgcaattttgcaggttaatagagaacatatagggctatcgaatgataccaagaaacttggatttgagttttagtcgctgatcaagaatctgaagtcaaaactgaaaaaatctatggttatatcaatgcttttcatattgatttttctatttttttgaaaaaagaaataacgagttttttcgtgtatcaatagattccgttaatcgagagaattgaatggtacttgtttcagggttctccgatgtctctatcaaaagttatagcccagtttaatgcttttttcgaaaaatcattgacaaaatcacatgatgaaaatcatagatttttgcagttttgacgtcagattcatgatcagctcctaaaactacattagaaaagtactttcctttgtcaggaccatcacatttttatgggggggggggggggtagcaaaacctacaagtacattattattattattatacaataggtaaaatagatctaatgaaacacgtagaaaaggcaactcgtacaatggcttaggctaggcttaactttaggcttaaactgatcccacattttataccaaaaagatcaatcactcttttttaattaattttttagaaatgctaaactaattttctatttttattcttaattagaggggcctcggtccctcggacagtccctgggggaggggggggggcgagctgctcgttctccatttttgcatgttactcaacttgcggttctgttatagccgaacattatgcatttaatttgtcaactgaaatgtttgttatgtacatatgacacactgacgaaaatgtgtcggtggaaataatgaaaggtcaagaaatgcaacaaaacggggcagaggggggggggagacgagatagaatgtcatcgccagggggggcaaagagcaaagagataatgcaatagagattgaagaaatggagaggaagagtgtagcagaaatgactcacaacaggggaagagagagagagcggaagggagagagagtagggtatagagagagaactgatcgctgcaatggttttca

SEQ ID NO: 8802 - DNA, 1868 bp, Heterodera glycines
ccactgtgcagagaaaagcctagtactatctcgtcgtttctctttttctttataatttctctcactttggcgtactatctcttcattttaattatgtaaaaaacaacatttacttctctccatataactttttttctatgcatacaattttcaccaaattttgcatatcgatagagaaaaggaaaataaacaaaatttcagtgatttgattaaaaatttcggcctagaacattactaaaaatgggatgaaaaaaatttgcatttcctttcctctccttttggcgtactattttcatgtctctaacacattaaaaatcatgaaattcgtaaatgctaacaattttggttataaggatacaaaatcactttggacatttagaatcaatagagaaattaatagttttagcatttttgctgaaaacagcagtttaggacttgagttataacgtgataaaaatttgaaagtatcacaacttttttctgagatgtcaaattgcttagcattcgcttagaaaaagattccccttttcaaaatctttttttagataccaaatttgttcagtttagttgggaataaagcgagttatggcagatcaataaaaaatacaaaaaaggcatttttcagtgtaaattttgaaatagcgggcaaaaatttacgccaaatgcgctatttggcgttatgagcaattttgtctgacactggcgcgtacccatagtgtttctgcttttgaaagtcaggtttctgcggtcagacactaactgcaggaacctgttaaaaatgacaggttttgcgcaccttagtttccgtgtcgaaaggttcaatgacgaaaagtttagtgacgaaaagtttagtgacgaaaggttcggccaccattttcccttataaaagtgcaacagcaagacgaattaaaagcatttctttataaacaaatcattatctgataggggaggtaaaatattgggctatacaaaatttaaaatcctcattttgacgcactatttccatgtctctaacatataaaataataaaaatcaaaggttggcattaaatcgtcatattacactactaaaaggctcatcattttgcttttaatttacgcgtataaaatgaccttgcgcaatgatactccgatgcctccggacgaagaattgagagtgcctcatgagatttcgctgtcttcgccttggctaagggctgtggcggtttatatgggaatcgcctgcgagaaggaggccaaagtttgactttgccactttttttgtgtgggaatgaattgagtcaatggcattcgattagtttattgtttttcaaattaatttcctttttttctatttaatgatttgttcaggagtttatgcttttgcgttccgaacgcgacaacgacccgcgcaaagcgttgccggaggggcgcgcagtgactgcgtgcgctatcaattttttgcgtaaaatgcgccgcgagtgcggtgacgaaatccgcgactacgccaattgttttcacagagagtccggcaaaatgcatttgcatcagtgagtgggcagttttgttgttggttagcataaacaatgcccaattttttaaatgggtgggcaaaacagaaattgtcctgacattttgggatttacgttttttgttaggtgtcgccgtgcacaatttcctatggatatttgcgctgacgaaaagctgggcgttcgtcgtccgatggtcggttacttcagcaaattgcatgtgcacgaaagcgctgtcccaccgccggaccctttgggtgagcgaaacgatgggaatggaatgctattccgattggcggcgacgccatgtattaacgggggatcaatgtcgacataccgtcgtttggcggggggggggggg

SEQ ID NO: 8803 - DNA, 1353 bp, Heterodera glycines
gtttacgggggttttcagggtcgctgatcatgattctggcattcattttgaccaatttcgaatcccgcacccgaattcgaacaaaatcgaaattttcaaaattcacatttatcttcgtttctgtacagaatgaccatattttgatgctgaaataatttttgactaaatttaacttgttttggtcaatttatgaacaaaagtaagaatttcgactttttgttcgaattcggatgcgggattagtattacccaaatttaaattttcccccttcgttacgacccccctccacgacgaccccctccctcttttacagccgccccccttacgacgaacgaagggggggggggtgtccgaggcctcttacgacgagaggggggtgtgtcgagacaccccttgcacatgtatgaataatttgtaaaacaattttaaaatttgtgtttcagtaataaaagtttgaaatttccactacataaaatatgggtattttagcaaaataataaaatccatcgacttaaaatttttttttaaatcctttaaataaatcattaattttttttcaaaattttatgacaaaaaaaattatttccgcccatcaagtttagtcctgctgaaactccatggacagttgggggccctcttttgttaatagcattcaaaagttgattaaggaaccgtggaaaaccgcacaaactgatttatattttaaaattaataaggcccattttataggatttgccgacaatccgaaaacccacaaataaatattttaattaattttcaatcaaaattgtataaatccctctgatcaatggtttatttaccctttgcttcttctgatatttagcattgcttttgctttgttttcaatttttctcctcattttcctttcctttttaaattcgcaccacttaattaccaattattatgaataaaagcgtctatccctccttccccccccccttttcacaaacattgccttttgcccactgaaagaaaagtcacgcgaaaattaggccataacaattcgacgatggccaaattgggactttcagcggggaaagcgttcgccgagtgcactttttggatgggaacaaatcgatgcttttcttttggatttataggcactttaaaaaatttagaatttttcattttattacaattaactagagtagagcgggaccgggaccaaaacacggacaactgagtacaactgagtaccgaggtcccggttttgaccgggaccgggaccagtcccgggttttttcccggttttcccagccaaaaatttccgggttttcaacccgaaaaggtcccggttaagcccaaaattcccggtcccgctctactctaatt

SEQ ID NO: 8804 - DNA, 1778 bp, Heterodera glycines
  unsure (1)..(1778): unsure at all n locations
aattgcgacatttaataatntggctattaattcctttgcgttcatttgtacactttgagcaatttatataattgtgacagccgtttcggttgaaaaacccttacaaattaatggttcgatgattatttctgttctttattaatttccccgctaatgggtaataattaccgcccccccctttgccccccccccaatgctcaaagtacgggagcacaataatccgcgttttgtgttctgcttgggtcgccattattgagccgagccccgggggagggaaatgataaaaacggtgggcaaaaatatggcacgggagaaaaagaataagccatggcaaaaaaggaaagttaaagggcaaaaacaagtcgaaacgacgaaagtgtcctttaaaagacggccttaagtgatttctgccgcacattttcacagattttacccatcgcattgactttcccattgatcacaaattgtctgatcagtcgctgaccgatcgatcaattggcccttctcttccccatggccacttctcacgccgggcaccatccccaccaccacaaaggctgtgctgccaatcaccaccaccacaacaaccaccagctcaaccagcagcaacaagcgcaacaggtggccaaatgccacaaatttcggcgcaaaaaaacattttggcattccgacaaatgcttgactgttagccaaaatgagcctctctctgttgatggggccaacaaaaagaaagagtggtctgactctccccccctccccctccccctgcagcgtgtcaatgccgcacccccttccgccgctcattctgtgcctttgtccattctgtgcccggccatggccccccaatccgtcgtctctcccccgctgccctctcgtccgtctcccccatggttgggcccgtcaccggcggaagaagtgaccgaggagctgaacatcgtaacaacgcccaaagtgatctcgaataattcgggcagttatacgggcggtcggccgaacttcggcacaccgccgatgccattgcatcacatttctctgccgtcgccccaggagatggcaccggtgacccgacagattccgccggagatggaacgcgagacgaatcggtggggcgggggaaatcgtacgaaacgaattcaaaaccaacgaaaaaatggaaactttggaaaaggaacggcagaaaatctaacgctttctaaaatgcacttttatgttcagatggcgtcagtacgctgctgctgtgctggtccatggccgcaagggaatgccaccgaaaagtttggacgaatacgaaaatgaggaggacgacgaggagttcagaggacgacggatgaccgtcacttaccgggtgagagagtcgcgcacaaagttaagaggaagcaaaaaaaagggcggagtgccttttaccataattaattactaatggcattttcttgttttggattgttattttttcaacaatctccttaacgaattcgaagtgaaaatggcattttaatgcgtatttgttaggccgattcctccgaaaaacgaacgatccctttttatttcctttctttctcttcaaaatggcataatttcttactaattcttctctcccctcttttattttctcctttccctcctttttctctcttttcctttcattcctcccactctttggactttttgttgctaaatgcgggaacatcatcactttttttgatgcttttttctccgctttttctttcctccaccgccggtgtcaaagaaaatgatgggaaaagggaagaaacaaactg

SEQ ID NO: 8805 - DNA, 208 bp, Heterodera glycines
ttttttagtagaattatcaatttttattatcaagatgtgaggggaggggaggggaggggaggggaggtatgtgatttacggatgttacggatggcctattacaaaaacaaacattgatttgattttgattagtcatcacagttttgtttaaatttgccctctctttgctccttttttgtctattttctcatttccgttgcatcattag

SEQ ID NO: 8806 - DNA, 2817 bp, Heterodera glycines
taagggtaagggttacgggcttgacaccaatacgggttacgggcttacgggctaaaaacccgtaaagcccgtagcccgtaaaaacccgtatccaggaaaaatacgggcccgtatacgggtaagggttttttaaatttttgaaaaaaatcggtttaataaatacaaggcttgaatgttaaagctagaacattttttataacaaatttattaacaattataagcaacaaaattcaagataacaaaaaattggcaacaaatggaagtgagggtaaatattttagtatttgtaattaatttccggaagtgccttgtttaaaaaaattaacatttcggctgtttctggtttcaactgagaccgtctgtaatcgtaaacatcccgggcaactttaaaagttgcttcgcttggcaagcttgtcgcaggagcagaaaggtattttcgcgcaatttttgacaaaagtggaaatttcggtgccatttttcgccatgcttcaaccggatcatcacgtgagtctccacaaccggatgccagatatttgtcaaattcatcttcgatgtcattggctaccacttaatttatttttatatgcaaaaacattgataaattaatgccttcattctctttattgcttgatgacgcaatttcattgagttcgtcaaacagagaagccctttgtttttttataggcggcggtggacagtcaagctcatcaatttccgtaattggcgggctaatgaacacggcattttcttcttttatccatgtcaaaatttttgccagaaagatgtttctacgttccagcaaaaatttgtccttgaaccgaacgtcaaaaaatgttgataggcaatgaacactaaaacacagaaaattggaatgaactaaataaatatgtgtttatgaaccgtttttcgcgtaggccaaagaaatatttttcgatctcattgaccaacgagcatcgaacactgtcgatttctttgttcatcaatttggcattaaataacttgctgtggagtgtcacagcaattggaatttgggctaaaaatattcgatttaacttagaattaaaaaattttgttaacccgacaaaggtgatttcatgagcatttttgaagcttcttaaattggctgaagcaaagaaattaattcttcaataagtttccattcttcttcggctaatgtcaaatcaaaactccgattctcgaacgcatattgataaatagcatctttttgctctaacaaacgtgaaatcattgccaacgccgaattccaacgcacagggatttcctaaatacaaatattagacgcaaaaagtttttagtaaaaacttgtaaaagtgaatgctccggtaactcaagaattgactgaatgttctgcagcatgcccaacgctttgtttgaatgtttaaaatgtgagacaacttttcgacactgtttgagcaaattggcaattttctcaagcctgatactcttttgaacgacgagattgagtaaatgtgcaccacagctcacatttgcaaatggtaaaagtgggttcattaggcctcgttcctcagcccttgtctcagaaaatgcctaaaataaaatagcaaataattgaaaacaaaacaatatcaaccgctttcatgttcgccgcagaatcgctcacaaaacaatgtattttctcatcaccaatttgccattcaccgatgattttgtccagcaattttgcgatttcttgtccagtatgtgagcccggaaattcgcacacagccaaaacgcggtttttctgaacccaatttgaagcgattccatgcgcatttaagcttgaaaacacaatttatacacacatattcaccgccttttttaccatagaaaattgttggttggtccgctccacgcatcagttgtgaatgaaagccattcacattcttctaattcgtttttgattttcttccgcacttgcttatacacatcaggaagaatttgctttctgtaatagctctctccctaaacataaaaatttacaaagctttaaaccatcaaaaactttaatttgttgaggcgcgagcaatgaatggaaagtgggatggtcaatcgctttgaacgaagtgttcgtggcagttacaaaattaatcacctttttgtccatgtaaatcacattctgttacagtttcaagtagagaaataaattgtttggcgaattgactacacaaaatttaaaaatttactcaatttaaccttaaaaacgtaaaaaattaacccgtaaaacccgtgtcgtaattgtacgggtaagggtaagggttacgggtttgacatcgatacgggttacgggcttacgggctaaaaacccgtaaaacccttaacccgtaaaaacccgtatcgaccgaaaaaaatacgggttacgggttacgggcccgtaaaaacccgtatacgggcccggcccgtagccgatctctactatttacaataaaaatttatgcagcatttctaaaaaggatgtaaaaataatttcttgcgtaatattttttacattatgttgttgaagaatttgagtctgcttctgatgcaattggaaaatttttcagcttttctcgaaaagttttttcccagaaaacggatgggtcaaataaaaaactaaacatctcacatgaccaatttaaattcacttacattttgggtttactttattatgctggcccataaaaaaatggagtttttccggtgccaaatttttgtgaattttctttcggcccgtcataagcggattgtttgggggcaaatgaaaacaaattttgtgttattcgaatgcgctagccgagctctacattttcaaatgtatca

SEQ ID NO: 8807 - DNA, 2066 bp, Heterodera glycines
ttacgggttacgggcccgtaaaaacccgtatacgggcccggcccgtagccgatctctactctacatattgttgtgttttatatttattattttaattttttggatcgtaacaatttctaatgaaaccgcctgtcgaaaaaaagaaaaaactcgctgaaaatcagcaacagtcgtcgggttcacttgtgacaccacctggaggacggcgaagtgttcagaggaaaatgtgagccaaattaggcattttttcatggcattaagcagataactatttttagcacggtgtgcaacgaattttggatgcacattctgcccttctttgatcgtgttcaactcggcctaacattggcaatggtttcgcctcgttttgatgagctggttgacacacatttcaatgacaaaacagaattggcactttcgaaccaaatgataattcgaaaaaacactgatgatggtgctgaaaagcccatctttgtgtgtggtgaagacgaagctgcgcaatttccgttgccggaccgcccgctgcctcaaaaaatccgttttgggaggcttatgattgagtaatttggactttctcgaaaccataattaattctggaaacatcccattttcaggtacatcgatcattacgtcgtcggatttctccgttccaatcaacaaattttcaacaaaggcacccatttggatttgtatgttcgttcgtcaaatgccacggatgagccgatttgggatgcgtttgtccacgaaatttggccaagttttgcgaaaaacatccgccatttgcaattttttgacgccagtcttgtggacaaattgcgttttcacatttcgccgaccattctctccgacgtcaatcccaactcaatccattcttctgagctggtgcctgatgtgattggtgttgatggaccaaatgcgactggtggccaagcactgtgcaaatggttgcacagcccgacaaacaacggacagccgaagcgattgttttgctgcttctctggccatgatgcagcaaatgaatggctcaacaatttcaagcaggtcgccatttttatccgtatttcgtcgtatcacccaaaaattttgttgcaaaaaatgaaacaaaatttgctgattttcagaaaatgtttttgaaattattgcttttttgaggcatatttcccctagacaaatgcatttatattttttgttattttcaattagacatttctccatgccaccaattcttctgccggttacattattgattttacattggattcaccgacgccgcacatggagccatttgaattgacgaacgaaacgacccaagaaatgttgacattgaagaaagaacgcaattcaaatgtgaattgtttgaagcgacaatcaattgggaagtcgggcggcgacatggatttgaacgctttgaacattgtcagctttgaattgcgcggtccgaagtgcattgggtgagcagcagcttttgctttgatcaaataattataggcaattttgctgttgatggcccccgaaaaaattcttagtgaattccctttttaggtctttttcacggttttagggaggataatcacgaatctgatatctttttagtgtaattcaaatccctacaaaagggtcctccctttccgggagggtggtcaatttcgtataatttccggcgaacactaacatgggaacattccgaactgtatccacccaaatcactttaaaaccacttttatcgtgtagagcatagtcgatttactattgcaaattttcggcttttttggctacggagccaaaaatgatcagaaaaaattgatcaaatgaaaaccccagccaaaaattgttaatttcattcattttttactcttacattttaatgaccatttgtcgtgggttcggatccgctcgacagatgatgaattattttgattttttttaaactattcttctacctaacgtatttttattccagatattttaatttttttgtgatgctctttgatagataattgttttctgatcatttaataaaaaaagtttatggctcttattatttgtttaaattttttatgaatttt

SEQ ID NO: 8808 - DNA, 2896 bp, Heterodera glycines
gattcggtttgcactttaaattttgtatgtgtaacaataaagatcctttaaaaataccaaaagatttgcttgttgactccatttctgacaaggaatcaagtaatgtacggcgttgtttgggaggaggaggaactataaaaagcgacgcattttcaatgtcttcagttgtaacaagcgcagagtcattgccattttgttgttcgtccgagagccagaatttcacccttaattaatcacattttagataacttaaaaccctaagatatgcactttaatttgaaatggtcattgtcatttgcaaataaatgtttgtaacgagggtccaagaatgttgaaagagcatgtaatctaaaaaagaaatttaaaagaaatttaaaaatatgtacacacttctcattctccaaatgaccgaatctttcctcaagtccagccaaaagctttgaacgcatttcttcaatttcagtaattccctgtaaatatccattttcacatatcacccgaaggtccaaattctttaattgtgaaattaacgcttttgcaaaaggaatttgagttgaaagcggtgatttgcaaaaataaagtgatgcttcttccaaaggtgccaagagcatctccaatgcattaagcagtcgccactcgccatcttgcaaagtcaattcaaatttcctctgttcaaatgcgattcggtcaatagcagccctttgctcagaaagccgccttatcatgatcagagaagaattccatcgaactgccatttcctaaatttacagtaaactggtgcttttcctccgaaatttcagcttacctgaagcagcttgtgctgcggaagtccctcctcaatttgtgcttcgttcaattctgtaaatgctttaatcgagtgtttaacccatccaacaatccgacgacaatttgcttaattattaagaaaaattttaaagaaatttagatttcatacaaaaaagtcccgatatttcaccctctcaattgccaaaactgtttttgacagcacggtccaataaatgcgccgcacagtttgatcgataaaaaggcaaaattcgcccgttttcgttctcttccacaaatgcctgcaaaaaacaaacgaatatttacactcattagctcataaccaacttttttcatgtttgttcctccatccgttgcaaaggcgtgaattttgtctcgacattcccactgatcaataatttcggacaaaatttcagcaacgcgacgtccagtgtgagtgccgggaaagggtttaattgcgagaatgtgtctcacacgctcccattggttcgtaactccttcgattattagacttaacatttgatcagaaatggtaaaatttcaaaaatggtatgatttcgctaccttataaatccttcatttggtccactccaaatgtcagatgtacaagaaaatgcttcacattttcgtaactcctctttgatctttcccttgactagttcacttgcaacgggcaaaattttgcggtagtgtgattcatctttcagttgctcattccatggcttacataatgctcgaaattgtggactgttgatcaaattaaacgacaaattgttgcaacatattaggttgatgaccactttgtctagccgagacataaggcccaaagaaaaaataaatatccctatagattaattttattcgtttaccactactacgcagaataaaattgtcaatcttttcggctttcacttcagtccttttgtctgttttcgttagagtcttcatcttttcatcaaatttggttttgtactccgaatctttatgcttttcacttttcagatgacaaattaatgatgatatgctcccatcggaaagcttgaattggtattttggctgttttttggctttgcattcaacgcattctgccagtttgtcgttttccttgctcttctcaaacaacccaattttccaaattgggtgaaatggcgccattaattatgaattattaaaatcttaactaaattggaagaaagaatatcaaaaatattattcctcatgagaaagttgacaagtaaatattaatctgactatttaattttggcaaaatgttttgccaaaaattcaaaaaattccaattcttaccagtgcatttttactcccgttttttttggtaaaatttccgggagcgggagcgggatcgggagttcaaaattttccgggacgggagtcccgaacgggaatcccgtaaaaatcccgatcccgtaaaaaatcccgttcaccgaaaaaagcgggagtcgggagcgggaatcccgtaaaatcccgcgggagtcccgatcccgccgggctctagtttatgtatatgattgacaaacaaaagaaatttataaaaagtaattaatttgtgggtgaaaacagctaaccagactaaaccgaccctctgactaaaacggccagactaaaccagggctcggatcgaaaaattttcaaaatcagaacatcgggtccaaaaaatcagattttggggtcgaaaatcagaacattttgcaaaattgcttcaaaaacatagttttgcgtagagttgagcgggaccgggaaatttccaaaaaacccggggaccgggacttaccgggaccagaaaagtcgggaccgggaccaagtttttcgaccgggaccgggaccaaccgggacttttcccaagtgaaaattttttttgaaaaaattgaaaatttaagtgcactttgttacgaaaattgccaatattcaaaaatgtaccaataaaattttgtatttacggtttgggggacgagttcgggaaaatttttaaaaatttgtttttcaggggggttcttggattttctgagtcccaaattctgtattttttttaaataatttacaatctttttaattttttgcttttaaatcgctgttt

SEQ ID NO: 8809 - DNA, 1482 bp, Heterodera glycines
aaaaaaaatagatcatacctctattttgtcatttgcacaatcatctccactaaaacgcaatcataaatcttgaaaaatgtgtgtccagagtttgataaaaacgccttttaaaatttaaatgggtttgatataattctctggcgcggctttttaaagttttaattgttttgttatattaacaccctaattcagttcatttctataagtaaaacactgaacagagaggagtttgacccacctttaaaaccatgggatatagttagggtattacgacaacaattattcctagctaaaagacaattctaaacccttttcaagaaaatttcatttatctttatatacgacagaccaaacatccgtttgataattgcaaaacaccctgctgcatattggctgtggacttagatgtaaattgtgaaaataggctaaaaccgaaaagtcggagctaaaatcttttgctaaaatggtgaaaaaaggtgaaagatcgaaactacaaggtgaaaaatataggtgaaaagtcatatagtgccatgttttcgagcgggatatgtgatgaatgtctaggtgaaaacaggttaaaataggtgaaatggtaaaagaacaaaggtgaaaaagaaaactgaaaataggacctaaaaatccctaaatttataagtaaaaatttactaaaatttttattgtctatataatttattgtattttttatattaatttaaccaaaaaatggaaaatttttgactttcaaaaaaaaggtaatttgacaaaatttcgtttgcttgagtggttcaacgagatagtcgaatatgtattatgagttaacgtcgtaaattatgttaaatacgtattatgagttaacatcgtaaattatgaagttttggacactaatagtgtttatacgcgcttggttaaacctgttgttcattaaaaaaagcaacatataattcatgcctcaggcgaatataaaatctactgttccctctcgatctgaagtaagacagaatctggctgatgattatgtcttcgcgtgctaataaattcgccattgctctcataaccccaacccttacatccataatggttaagctcaaacttccaccatattttattcttggtctttttgtgtttatagtaacgatatccatcgcaaaacataccttttgcgcagctgacagcgaccaattttgtcattatttttattatgctcttaaatgcactcaacctatatatattttcaccttttccaccatttctcgaacatttcagctttgttcttttaccatttcacctattttaacctgttttcacctggacattcatcacatatcccgctcgaaaacatggcactatatgacttttcacctatatttttcaccttgtagtttcgatctttcaccttttttcaccattttagcaaaagattttagccccgacttttcggttttagcctattttcacaatttacatctaagtccacagccaata

SEQ ID NO: 8810 - DNA, 2055 bp, Heterodera glycines
ttaatcaaaaagtcttcattttgacattaagcatttaatgccaatattttaaataatttctaataattgattggacacataaatttttgattggacgcgtaaacttttgattggacgcgtaaactgtgattggacgcgtaaacttttgattggacgcgcaaactgtgattggacgcgtaaaagtcgattggacgcgtaaactgcagtagagcctaattttttgtctgttgcctttaattttttgctttgcattgccaatttccatatcgacgaccaacaataattcggatttttgtttctccgccacaccgttgacatgtccgacgcgcgtgtagaggctccatgttttcaaacccataattttttaaaccaaaagccaacctcgggaatagcggaattctaacacaagaaaccgctgacattttgtttatttaatttaaaagaacgtgtatcggactacaaaatactttacagatacatcaaatgaattgatgagggaaatagagtaacacatagggtcatattcatccgtaaaacttaacagcatcaatccacctcaacgatctcttctgtcactactgactcggaaaacggtgccatcgcataattcttgaaactgtgaaacgcttggatgacgtcttcagatgacaatttgatttggttgtcgagttgagcccccacagcaagcagtgaagctggccttaaagcaaaggaaaaatgggtatttagttattaagctatagaatcggtttgaactcacgcattgagccgactcagtgcgacatggtggtaacgcaaaaggaatgcgaaacggatgacttccttcagctcggagctggtcagctttttcgtcacctcaacaacctcggcgtagtcgaagccaacatccacattttcttgtgccaaaagcatacgaaggagtttctcgcgagattcctcgtcgggcaaagggacatgaactttgagtgaaaagcgacagaacaccgtttcatctacaaaacaatgaaattgtacaaaagagcgaaggatgtggtgaaggcattctcacccaaatcgagcacacgattggtggcaccgatgacgatcacgttgcagtcggaatagcagcgcacaaactcatcccattgcgcgaggaattgcgtcttcagcagctgaaagtcattccgactgcgatggaacagcaaatctgtgagacaagaacaaaagcgaattgcaaaaacatgaaaaacacaccaatttcatcgatgaaaatgacacacggctgaattttctctgcctggaaaaggaaggattggcagaaagttcaaaaaaagactgaccaaagtgaacagagacttcatagtaacggatgatccgttgacaaaatctgaaaaataaaattattgcaattaaattgttgtttttaatccacaaccgaccgacgagcgaagttccaaaattgatgaagcacgcatccacctctttggcaatggcacgcgcaatcagagtttttccacaaccatttggtccataaagaagaattccttaaaagcattcattatgcactcatttttactggtccaatttcataagacaaaggcgacctttcggcgcactgtacagcaacgacggaagagtggtcttgttggccgccagttgaagagggacaacaactttctgcctcagaagttccaaaatggaagaacagccgcccactttctcgaacgaagcgacatcctcggaaaatgctaaacgaagattttcaaaaggaccgacggcaaagcccaaaaaatactgacacatgagtgaagcaatggccaactgaaaaagaatttccattatttgactaatcggtttgtttgtgtcgcttcaaaacccgcctcgtgtgagttgagcggagtgttcgggtccaacttcagtaagtccataagctgtgcctcgaatttttttttcatcaaagtcatttcgtctagaagttctttctgggagtttttttgctgcaacaatttgtacgcaatacagccgagcgcaacggaagaaaggcacacgccgattatccacggcacattcttttcg

SEQ ID NO: 8811 - DNA, 2192 bp, Heterodera glycines
ccattcaaaaaataataggtggcttttttaaggggcagggcaacagccgagcggtttttaccgtacgtacgagccaaaagaggtgagtgtgtgcaaatcgtaacgaatccgatttgattacaacacggaatcggccatcgtcaggtgatcggccggggactcgcttcggttgtgaggcgttgtgtggagaaaggtgatttagggagaaccgctcgaaagcacatcttaacaatcgccattttcattttgaagagtcgaggaaggaatacgcagtcaaaatcgtcgatctgagcaccgaaagacagtccgaaagggaagcgaagcgcctaagcgaagagactttttcggaggttcgcctcctcaaattgttgtcgggccatccgtccataagtacgttcttacgccttcgtaaatttcctctgatttttctgcgtttttcagtttgtttgcatgagttctttataacgccaacatttgtatttgccattttcgagttggcacgctgcgaattgttcgaagcgttgaacaaatcggtgacattcagcgaaaaacggacgcgactcgtcatgcgacaactgtttgttctgattactttacataaagttgaaaattgtcattacgtttcaggtttgacggtgtccattatttgcactcggttagtcatttacaaagtgacgagaaaaaataaacgcgatattattttaatgatccaatgatgataaataactaatgatttctaaattttcagaaaagtattgtccatcgagatttgaaggttttatttttaaaagtcatttaaatttaaaaataatataaacgtcgttaaaacagctcgaaaacattttgtgtgttgatgacaaacgcgttgtgatcagtgactttggttttgccaaacaattggagccgggccaaaaactcaaaggtggacactgcatcaatttgcataactaatcagtgttttcattaacaaaacttttaagatctcttcggcacccccgggtatttggcgcccgaaactttgcgctgtcaaatgtatgaaaacgcggagggctacgggttggaggtggacgagtgggcacttggcgtaatcatgtacacactgctggcggggtacgcccctttctaccacagacaacagttgcgaatgatgcgactggtgcaggagggacgttacgaatttgacaaggaacactgggaaaacatttcggaggaggcgaaggatttggtcggttttgggaagtactcctctcaccaacaataattctcacaatccactcactaattgtgagaatatcttgtttttggaatctcaaaatttacgaaagtgcctgtatttccagacagtgaaagtcccctaatcatggctgatgattcacccacctgctttacaattagcattgatttaatttcaactaattgagtggtctttcgtcagattcggcgtctgctcatggtgaatccgtcagtcagaatttcgagttgcgactgtttgtcccatgtttggatggccgcttgggtcggcgttcccccttcccccgctcgaatggtggaacccacaccattcaaacgctcccctgaacaaatccgtcgccttttccgtgttgcacaattttctgtctgttttatggtgcggcttcggaacttcaagcagttcaaactcaaattcgatagaggttatcataaaatccggccaattgaaattgcagaacattcatttcttccattttcagctgcgcttagaacgcggccctaccggtccagggaaatacggcacgaagccgaaagtaaataatgcttttcataatttttaaaaggatttatctattgttacaggcgcttccttcgccatctacggacattgggtcaaccgcggctttttttattccagggatatgctttttgcaaacaaacctcgacctagatatgttaaaatgaacaacggaagtcgtgatagtaaaagccctcaaaaaagtgtgaattcgacggagaaccctttgaatcgtaattagctgttccctattatgaattcggtaatagtaccgatggtagcccccctttttccaaaaacaaaattttgaaatattttcgagagattatattaggggttttaagggtcggagaatccgaatctgacagaaatctcgacctatgtctaacccccaacccggattcaagccgaatgtataaaattc

SEQ ID NO: 8812 - DNA, 550 bp, Heterodera glycines
aaaattcatattttagaatttcgcatatttggtctaaaaaggtttaagtgattttgttagaggatttgttgacttttagttttgtttccctatatgtaatccattttaaaaccaaaaataaaaaatataatcttttctctcgaaaaaatttcaaaaattttgtttttcgaaaaaggggggctaccatcggcactattaccatgatttctatctcattgaaaactaccttaattgatttagctctacaccttttttcatgtcgtgtaaatatctgaataaaatatcttaatgcttttaaaaagacgtttgttttctgcctttagactgggatttatttaacaacttataaaatagtgactaatatttacaaaaaatgatcattaatgattaagatttgatatgagtaggaaggtagagaccaatcacattaaaataacattgaaattaagctcacggggaagaagcaaagaaaactgggactttcgataaacgcttagaaatgaaaagttgagagcttacagaaataagtaaaattcggaatgaatttcag

SEQ ID NO: 8813 - DNA, 2270 bp, Heterodera glycines
agaacatctctaaataattatttatttggtcggcaattgttttgcctttattttcccatttgcctgtattggctgagcagcgccagcccaaaaaacagttcgaaatgacgagaacagctcatttccgcagcccaaatcacttcccaaagttggaacacttctttataaaccaattctgaaaggaaattagccattgttttgggaataattcattttttctgatgcctcttttgaagtcgagcaaaagccaccgatagaaaacgacgaaggaatagtcgatgttgcgcattagctgacagtacagctcggggtccatcacttcgaccagagaacgctgaaaggataaaaattaaaacaaaatgaaaaatatgaacggcgaaaatactcacaaaattattcaaattttcctccattccgccattgttttgggagctctgtgggaagttccgtcgcagtcgcagcatcaatcgctcaaaacaagccaacgtcagagcctcgtgccgaaataccaccaaaaggggggccaccaaatcgcacattccctgcacgtaaccgtcctccaagtccaacttcagtcgacggaaaatgtacgtgcaaatgatgcgatgcaaaatgtccaaattgtcgtggcatgagtaaaatttggtggttcgatcgcaacggtcgacgtcctttttgattctgagcaaattgttggcgaattccttagaaaatgcctaaaggaggaaaagtgccaattggttatatttagataaatgcaccatcacctttctcttcttggaaaagtcggtggtccttttctcttccaaataaacgtcgctctcttcaaacacttcgctattcattgagccaatagccccaatgggagggaaatgccgggaaatgtcttcctcactttggtgggttgacaatgagtcggagagtgctgttgatgggatgatgtaaaaaagtaatttcggatgacaaaccttcttcctcctcatccactccatttctctgctcattatcagctattaatttcgcatccatttctgtccactctttcaaatcgtttctgtacgtctcgtcgatggcgtccaattcgcgacgtccaaaatcctcgtgccattcgatcaatcgcagcaaatacggccacactttggccctcaaagttggctcaatgccacaaaagtaaactctggtgaggaactgcttgaaaaggacaatctgcaaagcgtgagcaaatgactgattgtgttatttaattgtctcactgttttttcagaacgacaaatccgccaaaatgcttcgttcaccggcatttccattccgtccgaatttgggataaatctctcgatggtcacaatggaggccaagtttagtcggattttgcgcaagtgttgtgagtaggtgagccatccgaggaatgccctggccaaaatttgactttgcatcgctttggtcgcattgctcagcgattcactgaagttaaatggataacacataatcaaaacttattaaagacaaaagaaaatccaattaaatgttcggccaaccgtaaagaaatcttcggttgttgtccttcgcattttgccgattcttgcgtggaagagcgcgaaaatggacgactaaaacttttttaaatggtcgaattttatgaactttcccattggcacttgcttttctaacggcattttctggtcaaaactcggagaagcgaaggaaataatgcgaaataccaattcagaaccgggcttttcaacgagaggtcctttttggtgagaacaatcagtcgctttatacaaagttgtcgaatcaacggcaaatggttctaaaaaaacaaatggaaaagtaaaaccgaattccaattagtagacgacctgtggcaccgcattcgattttaatggaatttaatggtgggtcgattttgaaaagtggggaaagtgcgccttccaacgtcttcagaaaggagaaacaatgctgctcaagagagaacgaaaagcaaaactgttgaacaccatcagaatcgataaggacgattgaagatgagagagtgccctctgaaagggagggaccgattaattgacgagacgtttttggcacggacacggaccgtttttgatgcgaagtgcgaatgtgaaacggtctcgaatttaatcgacaccggcacacgaatgcgatgagtgacttggacttttgaccggccatttgttgttgaacccccgggtctaaaaggaaagcgaaaatgggttaaagtgaatccattaaccaacaaatcgcttaaatgaata

SEQ ID NO: 8814 - DNA, 1346 bp, Heterodera glycines
ggaataagacaagggtttttgccaatggtatatctctatcagtcattcacggtcctcatgttcgtgttgagccccttttgcacgcaggccacccacatatccttgcatctgcagactcagcagtgaaaggatgttcatgacgtcttcgtcggcgttgtactccgcctcgtccaatgcatctccgatcaattgctccttcaaaatgtatttgatgcggcgtttgtacgggaacactcgggcagatcttgcgatgtccacctgcttgtcaacatcatccagaatagctgctagaaagtctgacaaagatgggtgatggactagaccacgcttaagttttaaaaaccaaattaaactcgcactaaaaatcgcacaaccgaaaattggaggtgtgatgcctccatagcattgttcgttttctccactgctgacttcgcacggtcgtggacattccagaagtgcacagggtacagtggtggacgcacaattggcagctcccagcgcggcacgacggaaacaattgttgacgattgggttgttggcgttgatggaacaggtgaagggatgccgaattggatgaaattgttaccataaacatggtccaaattcactaaaagcacacataatgcgagccgccggttgacaaaagcgccgatcacgaaacactgcgtccatgcggctggtgacactttgaatgttccatcaactgaaattttcctcgcccgcttcaaaacgtccaacagctgaaaacaaaagcgaaaaattgaacatgaaatgaatgaacttaacttcgggtgtgcaaagaccaagaccacatccgattctccttggcgatgcgctcggctgtcatacaacaatgtgctttcgccatccttaataagcagggcatcgggtaagacaacactcaaagggttgacacggtccatgttgccgtaaatcttccttttctgcctaaaaattttgaaataagagtgaaagaggaatacacgtatcaaaagagaagaaccttctcattactgccaccagtgcgaggtcagtgcccatggaaacaaaggtttcgtccttggtgtttgcacggatttctgccaatacttttgatggcttttggcgcgggttttccatcgttgtcgtcttaattccgttgcgttttacctccgcgtggaagcacgctgggtccggcagatggttgtgctcttttcttccgagcacaccattagttccgccttctttactcaatgctgcagttgcctcacagtcccggttggagcagcggaaccaccttccctttctgcgagtgaatcggaaccctaaaatgacagtgattttcctaaaaaaacaaccgcagacct

SEQ ID NO: 8815 - DNA, 1726 bp, Heterodera glycines
tttaaaaaccttaaattttaaaaaccaaattccaaatttaaccaatcattgcttctattaataccattggcgcagataggcgagcacaaagtcgcggttgaactgcgcccccagcgaagcgaggccgacttgggtaaacgggaagcggttgcagaacagcaaatggggcagtgccaagtgctgggcaggcacactgcaaaaaaacgccaattggaaatgccatcggacggagtaagccgaggacggaggaacggacggcacggcactgacccttcccgttgtgattcaccatgaagggtcatttttgagactctagtcaagcgactatgccgggattccacacttttttgggtcccgctttttggaggagtagccaagcaaaagatggactggcattatggctggcattttggcctaagacaggcccttccttatgcaagacaaaacgccgtacaattcggtacgggccggattgacttgtccggacgagcattggccagatcagtctccggttggatcaaaccattgttgtgaaaatcaacaaagtcgagtgttataagctatgatcaatgtttgatcagccgatttaaaaagtgaattgcgcacctccgccgcttcacaatgtcagccccttccatgtaaaggaacagcgcgggaagactttgcatcagccaaccgacagcacaaacggtgaacagacaactcttggccaaggaagacacggtgggaaaagcggggaaaagcatcggcgaagggagaaaaagctcaagcaaacagatcagtgaatgattggaaaaaaagtgatcagatcagtcaatgattggccaaaagcaaacaaaaaagggggcgggcaaaaaagagtctgacaatgagcaatacgcaaaatattcagtttgagatttactggtgatgacttaattggttaatgtgcctaaatgactgctgatgttggctgaccaatcggaatatggggatcactcattgaccaatagcaaggtgatccgatcagagtggagtcataatcagggttagtcccgggcatttgggcggaggaatgtcgggaatgtatgatgaaaacccgcagtcaaattacgacatatacttcctatttggagttgtaacccaaagcatctggcaaagcaaaacaacgtcgaggatcagggaccagtgttcaaccaacagactaagcacaaagtttgtgaaatggcgctcattgaaaatggggaaaagtgaatggccgccccctcccctcgggggacaacggcggtaacagccggcggaaggaagccaaaacctgaagaacaagatggacaattggggaggggggagaaggtggccaatgccgcaaaggcaaccaaaccaattggcacagcgtcgcccgggcaactccacgacaaaatgcccaaaattatattttgtgtgtgcgttgtgccagccacccggcaccaccaccaccagcagcagcagcagtgggtggtggccaagcagttgacagtcagtcccctcatctcagagcaaagaatggcaaattggcaccggcaccggtcgaaaagtgccgtagggggcgccggggttggtgaccggtgccgccgttttgtcgtcccattcgacgagggcaccaaagggtttctctcattattcacatgccatactcaacttatgccgagatgagtgactaaactgagcgggggagagggggaatggtcatcggcggaggggggggggg

SEQ ID NO: 8816 - DNA, 1469 bp, Heterodera glycines
atccctaatcatttgccggatgttttactatggcttcgccttcaccgccccgctctcctccaattgcttttctgtgctggccaaacactgcatcagcccaatggaagaacagcatcagcagagccccaatttgttgtaatgctgaagaaagtgccgggcaaacagaacgccaacaaatcggcacaaaaagcggacaaagtgaacaatttgaaattgaagggacgaaaagcatttataaatgatgacaatgttaaaaaaggtgctgaaagtgatcactgctgagcaacagatcgaatatcagcccaaaattagttcgagttgggaaccaaatttgatggcctaattagtgagagatgggaacaacataatgccagtggcgggtggagtaacccaaatgttgaaaactctccatcataatcatggcactttgggatatttagcttaaggcagaattccattaatcgtacgcctcaaaaaactcggaacagtgcacacagcaggcgttgaacagcttctacaacgaagaacagcagcagcagaacgttgcttacggcgatgaacaacagacggaaagacattctacggccaattcaatcagttgaaaataaccaatgaaatggccaggcacggaaataaaagtgccgaagaaagtactaatagagcgacgaattccgaagaaaatgccaatagaaacagtgccaaagcagcagcagaggaagacggagaagaagcagaaacaagatctccgtcttcggcatgggagggagaaagaaagagagaggggagagggagtgtggagagagaggagaggcagagaaagtgggaatggggagagagtgacagagagagaaaggcggagagaaagttaagaagagaggaagggatagacactgattatcgaattggtagcggagaactgggattgatcagttatgggtagtggtatcaatcaattaagtacgagtaggagagaagtgataaaaacactgaacaccaaagtgtacgagcagaaccacgcgctgtgcttctccaccgagccggtcaagcagtgcccgcgcggcaacacaacaaacggaggggaagaagccgaacaacagcggggaaaagccgaagcatgtccgctttgtgtgcatggaccgcgcggagtcggaggcgcgccattttatgcgccaactgcgccgcgggcagcgatcagtcaaagtcagcggcgcccacggcgattccttcacagaagaggtggacgagccgcagcagtgctggcggcgccggaactgaacgcggacgaatgggacgcggagagtgcgcggagaagagaagagtagaaattgatcattagtcagtaacacacgtaacactctccgatcacttcccccccccacccgcctgatcagtgatcaatgtgattaatcaccgtaataaaagtgccaattttattttgtttaaatgtatcagtaaaataatgtagtaaa

SEQ ID NO: 8817 - DNA, 3940 bp, Heterodera glycines
  unsure (1)..(3940): unsure at all n locations
actccggggaaacttttgagtgtgatttgttatcagatttttcaccaaaaaataaacagattttgtgattttagataatatgtttacagaatttatatcaaaatattcaaattttcgagaaatatatggttaaattcttctaaatttcggttcttttctgttttgtgaccccccccctgaaattttcaaataaaagtcatttctagggtaatttggggcgctgatcacgaatatgacatttatttttcaaaattccgaatcccgaattcgaacaaaaactcgaaattgattaatcacaaggaaaacatttttctaggggttttcaaggactgacctctaccgtaccacggcattcaatttaaaattgaatcattaggaattattagaattcttttttggcgcaaattttggcatattgtaagagcaaattacgcacaaaattttttaaatttgattctttcaattcttttctatgcctcttgtcatagataagtagcgatgtgaagcattaagcagtagtgatgaagtggtcatttaaatttttgaggggacacgtaaaactgaaataaagcagatttcccgctgcccctacgaatcaagcccgtacccaaaaaaaagtcaggatttttatgtgtaatttttcaaaaattttcagcaccggagccaaaaagcaggcatttatagcggttttatacaaaaaatgacaactttttggcattttggcgtcaaatctatccccctccccccctggggatacgaatataaacaacgattaaaacccgagaccgtaattaccaatatataattttataatgtgttttagaaagatgtcttttgtccaaagtccagaagctaacgttccggtatgccatttttgagagtctaatggaagtgaaggtttttgggtgtgcagaagttcgttaactcatgcaaaaatatgcataaatttcattaactttgagtttagaattttaaaatgtttcaaaaagggacattctgcattcttaaaaacttttactttacaatttgtgtaaaattccaaacgtttttgtttggattcacaagggaaatcaatgggtggggctgtgggaatggacggattcgtgggttttccgcggtgggcgttgcgtctgtgtcccttccataggacgggcagtaaattcattcttcgtccattcacttaccattacaacaaaactttgattatggattctaaaaaatttctcccccttgaacttatttacgaattggttaatgcactgccaattaaccaccattgggcagctcaaagggtttcctccgagttcgacaatttggtttttgagagacaggctgacttgataaaaattattttgcaaaaggtatgggaaaatggtgacccttgaaaaatcagaaaaataaacaactaaacaaaatgaattcaaaataacattttcgtgtaattcaggcaaacgtgtccaccgcgcagtcgtacatcacaactatggtccaattggcaaatgcggatgaacgaatagtatttttgacggagtatgcaattttgaggaccattttgggtggtaatctctttttccattgtcattctgtcagattcacgccctcccaacatgaattctgtagcgaggcggtgacacttggcaatcgattattcaattgcgctgaaacaaaacaaagcattgttgaccattccgttgtgatgactttctgtggccgtatgccccacgtttggtaactgcagatgatgcactgttgaactttttacttttttttgtaatttttagccttgatgtctcttcattctcccaaatgtctccccaacaattcgccttggccgatggcgcctcagcaaatgtccaatttgtcggctgttactctggaggacaactgcttatcaatgatttggcactttttggtggtttgcaaaacagcgttgtcctttgtccgtccgacgcgttctccgctgagcgtgcgactcagttggccatgacgcacaacggaatcacttacattcgaatttccccatatcccactccggcgatttacggcagcagtgaccacgacaaattcgaaattggcttgttcattgtgaggcttttcaattatagaacggtgaatgattaattaacagtggaaaactaattttttggtgaatgttaaccgtctcaaattagcggtataattaggtatttaagtgagtccacgaaattcgcctttctgattaatcattaagaaaatttgtccagtttttgattttgatgggtatttatttgccataactctttttgattaaactaaattaagaatcgacatcaatcgcacaaagacaaagttgttctcgtcggaattggagctgcggtcaatttgtgcgagcaagcatatcgtcaactgttgaatgaaaagattccggtgacggtcctcgacatgttttcgctcaaggtacgtaatcgcaatcagttttttgagtgtttttttaattcttcagctgacgcgtgagtttgctgttttatcgttggttagcattctaaacgtcggtcgagtcgttactgtggaagaaggcgttactcccttttgtcttccactcgcttcatcaattctcagttttatatctgaaaaaaaactccaagtgagagtaattcataaaaaagtcaatcttccatgcaatttgaactattcaggtttctgtgcgaagtctttgcacttgcggtatgtgtgtgttgtctaagtgaaattgtttaatttgggagaatggggcttaattagacattcaatatttcagagtaatccttttcaaaatctctgaggatgaaaattagcgaattaatttgagttttcaattcttccatttttttaagaagatggcttttctgcggattccattgtcgctgctgcgaaagcattctcaaagcgttaaacgaagaacgacgggcaatgctttgccgttttgttgacaaattctccttttgttacgataatttgttgaaacgttaaatgttaagttgagcagatctcttacgtcttttgttttaaataaaattgattttatatattttttcaattaatcctgtgacagaacccgaaattcttaattatcgaacccactgtttacataacatatgtacacgtttaatactttttaagctaatttaattacgagaggctttgttgggggatatgaactcgattgaataatttttaaaagcaaccattaaacggattggaatcattttaatgctttctgtcgaaattcgccattattttaactcattgttatacaattgccgaacaatactggcgaataaatcttatacaaaggctgtgaattgcgatttttcctattattttgtttttaagcgaaaattgactagaaaaagagcaatacaaaaagttgataaaaattaatgttattttttaaacgatattttatataaaatgataataaaaattcatggaaattggtgatcaaaagataaaaatgattaagggcaaaaaactttttaagtaaaatgcgtgacattttaataaaagtcaaaaaagaaagcttaactgattgtgaacttaaaagaacagatattgtaaatgaatgaaaaaatgtattgatggaatcactcaaagaaaaacaaaattaagtgccatggaaaaaaagatcccagaatttgttgcaattgaaaattgaatttacaacaatttcactgctttgtcctcaattgtttcatccgacgtactcaaacggatcaggcancaaagatgcagcggatcagatttatgaaggcagcgaccaaaatcagcacgatcagaagagcgatgacgccgacagcccaatcctaaaggaaaaggcatttggccaccaaaaagcatancaattattagagcccggaanttcaaagtatcgggacttggaaaatgaatcggaacgcagattccttgaccggggtccctgttt

SEQ ID NO: 8818 - DNA, 678 bp, Heterodera glycines
agctcgagtagagatcaccgcacattttgaagtagtaaagcggactcgactcggggcatcgctcgccgacgagcaatggacacgccgaaacgccgctcctataacaaagggcgaaaattgtgccaaaaaaggctttgagatggaccaactttagctggaaaatgtccaaatcgcgcagctcgtccaacaggtttttgtcgccatttgcagtgccggagagtaaacaaatgacgacaacaatcgcagtcaaaagcaatgggaaatgtggcggccgaagcataatgtgcgcgaattatgttatcaaatggcactgataaaagataaaaccttggagaaacggaaaagctaaatgactttgaaaaattgataaaaagccgatgagagaaaacaaattggaaaaaccgttaacccaaaaagaaagaaaaggaaatgaaagaaagttgcaatttgaaattggaataaatggaacgaatggttaatggcaagtggaaggttttgcttgcctctgctggccaatgtcattgctcatcagtgtttggacgccatttgatggaatatgtatcaatgtgagatggaaaaaaggggagaaggaaggaagacacaaacaaaaagaaaagaaaagaaaggggcagggcaataaagaagagtgaataatgcacaatcgatccaatttgaacg

SEQ ID NO: 8819 - DNA, 2686 bp, Heterodera glycines
ttggcccttctccttccgatcattttgctggccacaactttgaacccgctttaccagcacatccatccctacctcaaatagtcagtctcgaaattttaatagtgaataagtattttaaattaaaaaagcaaaaatttaaatcgaaaatttgctgctgccttttgttgtcagctattgtatccacgccaactaacgttaattgtttcaaaatatgtttttaaatttaaatttgttcattcagtccgctgctgcacaccggtaactcgtcgcccagtcacgacgcgttcgccaccgacatttacgcgatggtcggctcgcagcagcagcaacagtaccatttgctgccaacgcaacagctcaaccacaacaggaacaagcagtacacgacgcaacaacagcagcagcaacagttcacctcgccgtacgccacctcaaactacggttaccacgagctgacccatccaccggcctacagtatgagcatggtcggcggcggaggcacggggcaacgacgatagacaatgggagatgaaccaacaaagaatggaagccagaatgaacaaccatgatcacacagttattttcatgtagatatgaggagttggagcctatctcttgccggaaaattggaaattcattgtctggggtatacaatttcccatagccaggaactttgaaaacgcccgggttagggcacggatttccgagatgaaccggaacagaattccggattgaagtactgttttaacatgatctcctccggtccaaagcattttctaaaacatacagaactctgagccagcacctaaaatactgtaaatctttcggttatttcctgacagagtatttttccgattagagccgaaaaccgaatgaattgaatttttgactaaccgacccaaagaaaattcaacataatgctttcaagaacaccatttattcagaatccattctccgcctttttgtatcgggcagtttctggagatttaaacaatgtccgtcccaacgtcccattcctcttaaacgaaatgccatttaaatttctttatgttttttatcattgcttattttttcattttgaatgattatgtaaaaaaaaaaaataatgaatccaagcgctgatatgtatgtaaattcttataaaatcgtgaaataagcataaatgctgtaaataaagatcctagaccacctaattttgaaatagggaggatgtagaaaactatctttgtcagatagtccattcgttgcttttttgaatttctcatttttatttcattctccgcccactccccaagcctttctttctccccccccccctccataaatgtgtaagtacagcgattcttcttcagtcctttcactttttccatcgataattttttaccaatagactaaattgacctttcaaacacccatccattggcaattgataaagttgagcacggctattgtgaactgtagggagtttttctttatggacgggtcaagacggatgtgatattattataaattgaaatctttccatgagacgtacccatttacatactgtacgtgtgtatgtaaggagttgatcagaagcgattaaaccggtttttgaacgtccgaaaactcgaagagaatagacacagtaccaaatacataagacggggcaagtaatggtacttgttaattatccctactcagattttcaaaaatcaattttttgaaaataaacttgtgttaggggttttcggggtcggggaactcgatatttactctctaacaaaatttttggttctagtcggttttacgcgtcccatgacattttacgcgtcccatcacattttacgagtcccaacaacactttacgcgtcccatgacattttgtgtccatggcggggatggcattccgaggccccaaaaattttcggaaatcggaattccgtgccatccctggtctcatggtataatagttgtcctaataactaagagaaaaactttattttttttgtcaggtattcagtaaagtttttaactaaagatttcgttgttaaacctaaggttatcatgacaacttatacacaggcaactcgaacaatggcttatggttagactaggcctaagcttaggcttttgtaaacttttttcttatattagttgaatttctgttgacatcattaagtgtgcttagagttgcttttgcacatttcgatgatcaaagtatacaaacaagaacaattagactattcggaaggtataaagtttccgattgacggttcgaaaaacattttttgacgcgtaaaatatgatgggacgcgtaaagtgtgatgggacgcgtaaagtgttgttgggacgcgtaaaatgtgatgggacgcgtaaagtgttgttgggacgcgtaaaatgtgatgggacgcgtaaaatgtgatgggacgcgtaaatttcatgggactttgaatttaggcattaaataggcaaaaaaaatgaaggttcatgcatagtcagaacttagattcgtgatcagagtattttttaacccaaattcattgctaaacttttaaaacaataactttataattcgaaaaaaatcaagtagttgacaaaagatcttaaataagaatcaatgattttccaaatctgagctcagattcgtgatcagcgcatttttttaggctaaaaaaaaaacccgacaaattttttaaaatttttt

SEQ ID NO: 8820 - DNA, 1496 bp, Heterodera glycines
  unsure (1)..(1496): unsure at all n locations
aaggttatcatgacaacttatacacaggcaactcgaacaatggcttatggttagactagtcataagcttaggcttttgtaaatttttttcttatattagttgaatttctgttgacatcattaagtgtgcttagagttgcttttgcacatttcgatgatcaaagtatacaaacaagaacaattagactattcggaaggtataaaattttccgattaacggttcgaaaaacattttttgacgcgtaaaatatgatgggacgcgtaaagtgtgatgggacgcgtaaaatgtgatgggacgcgtaaaatgtcatgggacggcgtaaaaagcgacttagaaaccccaaattttgcttttttaagtgacaaattatcattttaattttaccaaatttaacaatcgaaaagcaatgactacttcactggcggacttggatgtggaatgggagacgtacaaaacggaattcgagaaggcagaggtgggcacacaataataaacaaatgacagtcatcaatctttggaaaagtatcgaaaattatccaggccgaacacggtgcatacaatgcgcgtcagcgcgcaaatgtgaacaaattgtaagtgtttttgttttctttgccaattgaattaaaaataatcttcccctttgcaacaaggaagcaaaatttggctctgttttctgggaagatcgaccggtaatataggaaatccgaattttgagggggagtgggttctttccatgatgagaattgttaccttactgtaccacaaaaaacgcattaataaataaataaatagccaacaggctttactaaggatgactctaatgcagttcgtgcgtttaattagctgctcaaactgtgacaaaatcagtttaatttcgaacgaatacgatttgaataaaaaaactgaaagttcacattttcgtataaaatcggcttaaatacacggaaaaaacggagacaacaaaaaagcgaaatttgaacttttcttcattttcttcgaattcgggtccgggttttatgattggtcgaaatgactctcattatcaagatcagtgaaaccttatgatagtgtttttatgacttaaaatgattaataatatttaatgttttcgttggttttcagcttggaaaggggcgaactcagcgacgatgacaaacgcggattggaagcgctgaagacacaggcggagcaaatgcacatcaacctgtccgatttgtggcgtgaggaggtgttttaattctataaacaatttttaatggccgaaggtgtaggataagttaaaaaagtgccagaacccgggacaatcagaatgcttattcagttttaggctttggtttaaaatgngtgttataatgagaggngagaattatntgtgtgtggtacgacgaaagggacagagaacaacactttctcgtcgccatctctggcccattccgtccactatttcgtcattttgtcatctctctttcttgccttttcgntgtttttaatcaatt

SEQ ID NO: 8821 - DNA, 3898 bp, Heterodera glycines
  unsure (1)..(3898): unsure at all n locations
actcatgcaaacccaactcatccatacccaactcatccaaacccaactcatccatacccaactcatccatcatccatagacccaactcatccaaacccagctcatccatacccaactcatccatagacccaactcatccatacccaactcatccataacgctgcgagtcatcgtcgtggcatggcattttctgcttatgtggtcgtggcatgacattttctgcttatgtggtcttgaccgtggacatttttgattatgccggtcttaaccgtggcattttttggttgtacggtcttagtcttagtattttttggttgtacggtcttagtcgtggcattaaatgccacggcgacgactcgtatcgtgctatggatgagttgggtatggatgagttgggcatggatgagttgggtatggatgagttgggtttggatgagttgggtttacccccgtaattgcagtggatttcaagtttaatgggttttttttagactttatggatattaaatggcattttgttggatgcttttttaaaaacatttcttactacccaaagcagtgtactgtttctctctttttcaattttcatattttacattttcacttgataaatgagtatattaaatgatttattttggtaaagaaaagttgtttcttgcttttgggaaatgttcttcaattagaaggcgaattagtgaaaatggcacttccatttttggaaatgccattgtcagaaattgacttttcccctaatcagaaaaggcacttttacatttattacttatgacaaaaggacagctaatggagttcaattgggagaacactcagtgcaaagcatttaaaacgcaaattgtgccgttcttttcagttgaaaacgaaaattcttcttcggaagtatgccgacaaagaaaggaatggcagaaaaaaaatgccaaaagtaacaaaaacatttgccggggcaatggcatttgggccgacttttacttttccattttcttcagattgactaccttttcagatttattcattttaatccaacaaaagagagaatggctctgtttttggccaaatactttaaacttttttctcttttccttctctgttttctgttcactttctctttggccgatgattctcttctcgctgacaatggccaaatggcacaaattgacgaagtctgtttttttgttgggttttgcgtttcttttgccatttccattaattgtgccattgtccaccaacagcaacagcaggacattgtccctttggcggagaagagagtgccgcatccgttgtaagtcgagcaatacggagacagaagaagcccaggaccttccttctgaatttgccctttttagcgggtggcgtcagccgggcacgggccgagtccgaaggtgggccaagaggcggtggagaggaactgctcgaaggcgggaggggtggatgaccatcaatccccgattcagcagcttccacccaatgtccatggcgccggccgaattcggcgggcgccgctttaaccgtttttacgactacgcggcccccggacgtccgctgtttatccgttacatgcgaaattttgtagctgacaaagcgactgaatgagcaatgaatgggcacagcaaagctgaggaaggggccggggtgtgatcgaagactgatcagattgaacgccgatcacttttaatcacttttttttgttgctgtaataatacatcccttttttggttagtttactagtaataataaaagtaataataatatgttttctgttccgatcagggctggccgtgattaaatttccaatcacggaaatccgtgagccgtgatcacggggcttccaaaaaaatccgtgaaccgtgatcacggcaccccaaaaaccccgtgatccgtgatcacggccagccctagttccgatgtgccaattctcccccttccccggcgaaggtttttctttcttcctctctttctcttcctcttctcctcctttcttcctctttcttctttctctctctctcctcctttttttcttcttcctctctttctcttcctcctattccgctgactatgttctgctgctctcctcctcctcctccttctcctcctcttttcctttgcttctattgtttgctatttctcttccgtttgtccccctttccatttccaatgcttcttctctctctctcacattatttactttctctttttcctttgctactgctgctgatcgttgctaaaatttcgacactttaaaaatatgcttaattccgcaaattttacattgctttgcgatgccgaactcgtgttcagaatgtccatgtaattatccttaattcattgcctttattaactttctcccccccttttccccggccacttttatgtcgtcatcctccgatcggtttctcgtctctttcctccgttgcatttcttcaatttttctgtccaacagacgagagaacatcgcataaagcaattccgcgttatcccgattagacatatacttaataagtaattaccataattaatgaattaattgctttccttcgcccacttgtcccaattccatttctctgcttcgtattgtcattgtttcgttctgctcctcctcccttcgatgtgcttcggctgtctttggcattgtgttcggttgcttttctttcactctgtcaattttggcacttttccctcttccatttttcctttttcctaattgctcttaattcgtcttaattgatcccccgtccacttgacccatttactttctcatttttcgcccaatgtgcgcaattttcagcgcttcctgtagcgttattttgttgtacgcccgcacaatgtctgttgcgtcgaatgttttccgtgtcatattgcgcattagcaatggcttcaaaattttggcgttgaaccgttcgaaacttaaatttccaaaatgaaatgtgccgtcgtccattggccaattgactgacgcgtctctgaagaagtgtttgccccgctgaccaacaatgtcctcaataccggccattgtgtagtcaaagtatttgttgtacaccttgacaaaagcgtacagtaaccccgatagaatacggtattattggggtggaaaggcaccttctccaccatcatctcctcgtattccatgtcctgcttctccaccttaagcaaagacagcaaagggcgaattgtgatgccctaaaacaacggcggaggataataaaaacagcaaaacaaagaaaaggacacctggaggaaaacggtgaagtaaatgacggcgatgcaagtggtgacgaacctaaaaagaccgacaattcgtccgttggctttcaaatggccaaacattcgtttcgcttcaataatcgccgggagggaaacgaccaaaccgaaggcaatggcaccgcgcagccccccgtaggagaggacgaactgatcggtggcgctgaactttattttgcggaaacggttcagaaaggcacactgcacgagaacgccttggggtggggaagattacggtaccatttggacactacggtaagaatgggcaatggtcggtaccgatgacacggtaaacgaaacagatgagcacagtgcaggcgacgaacagagtgtcccagtggtgtttgctggcgatggaagacaagccgaggaacatgaaaatgactgaatgccaaaacattgcgccattttgaacatcgcaattcaaagccccaaatgacctgtctcactgctctgtgccaacattttgacaaaatatttgaccgaactgttcgcgtcgtggctcatgttgcccttgacgtactgtttcatggcaatgccacaggcgacgatgctaatgaaaagcgaaggaagggcaattaggagaagcaattaangtaattggggatgataatacgcgagaatggcg

SEQ ID NO: 8822 - DNA, 1799 bp, Heterodera glycines
  unsure (1)..(1799): unsure at all n locations
acacctntttggggagaagggataagagacgaaaacaaatgagaaggggatggccaagtgtaattaataattaattaatgattgttgttaattacccccccccccccgtttccccgggactatcacttctagcaaaaaaaaaaatcgcttaccggcgcaagaatcttcacacgtcctgtgaatctaagcgttttgagaataaattcacagtgattttctgtgacccaatcacctggtcaaaatggagacaaaaaaggcgaaaaacaatccggtgagagcaccgccgaacgaaatgaccacaaaagagccgacgccggccaaataatccgcgagagacaactgatcaacgccgatcagagtgaacttgcggaacatttggtagagcaccggaaaatgttgccccttttcactttcaattcaaaaacgcaacaattcactgaccacgctgactccgtcgttgaacagcgccttaaaaaaggggggaaacgattgggggggggaccaaaatgatggattgaatggaatgaatgatcaacagtgaataatgatcagcaaaaagggaattgattggactgatcaatcagtgacaaactgattaaccaaagaccaacagcagttcacctctccgaaaacattgatgaaaaggaactcgttgacgtgaatctcttcaaagacagcaatgactgccacgggatcgacggcactgatcaaagaggcaaagaggagaatttcgaagggggagaagggcacggagaaaaggttgaagtggccgaggacatgcaaggtgaaccttcaaattcaactaattggccatcgtttagtcggttttacccaaccgaacccaatggacaaagtgttccaaattgtgccgacaatagcgaagagcataacggagtcccaattctcgaacaattgcctcgagggcatgaaatagcctgacaaagaatgactaattggcgacgattaagccaaacaaaagcatttaccggcatcgaaaataatcggaggcaaaaggtaaaggaaaaatatggtggatttaaggttgtacaggtcgatgctgacgtgcaactggtgaagtccatagcccaacacgaggccaacgacgatgagaagtgcgctgtcgggaattgcttctccgaactttttgttcacgtgaaagactaacggacagatagggcaattaggggataattatgcttaatgatgatggccatcgtacgaattttagcgatgctggcgaggagaatccaaacagagacggtgtacggcgtttccacatgatgccaattcagcgagacaatctgagcaaacgaaggataaggcaaatatgccaatttggaagatgggaatggcattctaattggcccatttataatttcgacaatttgcaattaagcatatgtgtcaaaagtgactgtgccgtgccgacttggaaatgtgtcatctgtctctcctcctcctcctccccatttgcatttatgtcaaaagtgtgtgccgtctgctgctgctgaacatccgtccgatctctgccttttcggcgttcgttgatcacttccccgtccaccggcgtggtggtttccgcttctccgtcaacttcgatcagttctgataggtcaagcgcattgcttcggttttgaagttgcaatttgttcagtaaatgctccaaatttggagcagaaaaaatagaagagaagaaaaaagtgagggaaaggagaaaaaatgaggaaggcattttgggcttacaattaaaaaattatgaataatgaattcatcgattgaattaaacgcaaaaaaggaaa

SEQ ID NO: 8823 - DNA, 167 bp, Heterodera glycines
ggggagtgagggtgtggggcgggtgcggtaaagggtcacgcgggaagcgatcgctaatcgccaagcaatgcaccaaaagggaccaactcgcgccgcattcagctgctgttgctgatcagcagcacaaaaggtcgatcaacaaaatctctccgtttcgctctcgtcag

SEQ ID NO: 8824 - DNA, 1363 bp, Heterodera glycines
agaaaatttatgacggatttttttttcggaaaatgcgtaaatttggcagtttttgcgagacgaccgacccagcacggtgttatttttattttaaatcaacctactttttatcaatgattgaacatcaaaaattaacaaattaatatttctaatataaaaattggtgaataaaatgcaaatttgcctctttttttttcattgataggtatttaaaattttttagagtggtcaccggaaatgattaaaattaaatttaaatttctaactcctagttaatgcaaaaaagaaaaatatatatatatatttaaaaaggcggcgataaaggaaaaaatatgcaaaattttaaaacaactcttaaaaatttagtttttattactgataaaaaacgaaaattaataataaaaataaggaggactgaaaaataaaatactgaatgtcgtaaagtctccatatcgttgttcttgcattactcatttattccttctccaattatctgcttccatcgataaacgttaaagtgattaattttcataattttcgcaatttctttgtcattcattttcggatattctttttttgtttgccaataaactttcattttttccattttttctttctccgttatttttttgcagcaaatgccaaattgtttcttccattttctaattgtgtcataaccaactccaattttcttacaaatttctttatgattttgttgccattcttttcttgaatattttcttttttgtttaaattcatttttcattgcaataaacttttgcacaatttcaattttttgttcatcagtttttgatttgtagcttttttgcatgcgttgattaagtcctaattctttaatccatttttgaatatatgtttgatttgtccccaattttttcgctatttttgagttaattttattccattcttttcgtgaatattttcttcctttttgctttattttttcttttattttataatatttttgaattatttctctttttttgagttcatttcgtttttcttcttctttttcttgccatttttctccaaatatttcgccaaatgacttctgctgcaattttttcttttctgatccaattttgacaattaaaaataatataattaataatagtagcggaaataatttcatttttgtcgtctcgaaatgatttattttatttttcttcaattaaatggcaattcattttttgaggcatttaaatgattttttttctgataaaaaactgaataaatcattattttacttaataaaataaggaaatcctgttttattttcaaagaaataataataataattttatcttaatgacaaaataattgccaattggtaaattaatga

SEQ ID NO: 8825 - DNA, 2715 bp, Heterodera glycines
aaaatgagtatttagggggttttcagggctctgatcacgaatcctaacccgtatttgcccaattccgaaccccggacccgaattcgaacaaaaaagttgaaatttttttccaatggtactttttctgggtaaaaagctttgaattcatttaacaactatttattttgatgcaaaatatgcttcaactattaattgcatcaaaaatatgcaatttacgccaaaattagatcgattttaaagcgttttttgaaaaaaattcaatttttttgttcgagttcgggtccggggttcggaattaggtaaatccaagtccaggttcgtaatcagtagggatgggatttttagtgataaaaaatcccaaaataattaactaaatagtgaacaaaaaatgccaaaatagtggcaaaaatattgtcgaaaaagttccaaacctagaggtgtaattttttaaatagctgtttttaatttgaaaataatttaaaattaaggaaaaagattttattcactgattgcagttacaaaatattttcttagcaaatattgaacaagaaaaaaaaaatttgggtgaagaatttttgtgaaatttttccaattcttgggggtgtatttttcaaaatttttatatcgattcttaggggtgtatttatcgtttttattgcaattttgggaagttttccaaaaatgccaaaatagtggcataaataatgacgaaacgccaaaatagtggcaaaaaattattttagttgccaacttccgaaatagtttttttttagtggcgaagctcaaaaatagtgattcctgaatagtggcactaaaaatgaaaaattttcgaaaaaagaatgtgtttttcgtgcatttctcgtcgagttaaagccgcagaaaaaatagttaaaaaactaagaatcccatccctagtaatcatcagcaccatcgaaaacctccggaaactgtttttaagcctaaaataaaaaagttaaattagaaacccccattctttaggattgcccagaaaaatatctttttcgcaaggaaattttccaatttacctgcattttccatcaaaatttttatgaaaaattataaaatgtcatttttagttcttgagcacatcattaggggatgtatttttcacattgaaaaatcagtcattatgagtgttggtttttccgaaacttcgtgtaaattaaccgaagccgaaatccggagcccaaaaactctaagttttcgaagccaaagtttcgccaagccctgatcgaaagataatcaaacgttgcaaaaatgctttctcgactaaaatagagaacagtcctttggatggagaaggtttaagcaagacaatagacaattagcaaatggaattaatttctgttttttatccaaaacaaataaaattaaaacctctttttataaattaaatgaaatgatatattctgtttaaatttccctcttaataatccatttttattcctaatttattaaatgaatacacataattaagagaatgaatagagtaaacaaagaacacaaattgatagggtcaaaatcataaaataaggggagacaacaaaacgccacaaaagctacaataatttagaattttctaaaaagaaactcttgtgtcgccctttatttataattaggagtcgaaatttctcgtacaccaactaagaattttggaaaaaaatatattaaattttccatttaaaatagtaaattttaaaattcgatttctctcttgattatccgttttcaatcctcatttatttattctctaatctttttcttccatatcgaaatgctcgaatgattaattttgaacaatttcgcaatttattttcttttttgcttatatccatttgtcatttgaatgaatttttgaatagtttctaacttttgatcattattttttgatttgtaactttttgattaagaccaaattctttaatacattcataaatttggtttcgatttgttcccaattttagggaattgttgatcaaattaaatatttataattggaggtaatattaagtattgtcaaattgaagtaattctgtatcaacatcgttctgaattccgaaccccggacccaaattagaacaaaaactcgaaagtccaaattttcgaaattgggttgttgattcaaaatcggtttaaacgcacggaaacaaactgaaagccaaatccttcaataaggatcatttacgccttttgtgaaccaaaaattctaaattcggaaattaggactttcgactttgttcgagttagggtccggaattgaccgaaatggaaacaaaattcataatcagtgagaccttagaaaccccaggaattgtttttatcacattaaaattttggaacgagtggttaagcaactaacattcaagtcattggcggcaatgccccgaacaaaattattgttcgatattttgattgatataatttatattcattcctattattaacccaatattttttataattaatgagataatcaacatcatttagaattttatatttgaatgaaaaattttatctaaatttgcaccataattgatttttgtttcattttttgttattgcaaaaaatgagttttgcttataaaaaagaagaaattaaaaatattaccgattaaaccatgactaattacgaagatattgattaaaagcgaaaaaaaaagttaaaaatatgaaatatttaattaaaaaaataaaa

SEQ ID NO: 8826 - DNA, 3520 bp, Heterodera glycines
acgattccatttccatgccatggcattgatgagaggtgccatttgtgatgaatcactaaagaaatgcaatattaattaatttgttctcacaataatgagaatttccgttattaattttatttttgaatcttttaaattaaaaaatcaacgaatttctgaaatttattcaattttcatttaaaaatgaattactcaattcccatgtgtttaggctcctcctcaatgtcatcttgcaaatcatcaattgaattttctataaataaaagttatatggctcatattttctacatatttcaaatttttgtttatgttttttcattgttttttttacttgttttgaaatttttgtgaatttatagaaattttcttatgaaaaattcaaaaaaattttttttgaaaaaatttactaataaagcaaaaatcaattctttcaaaagataaaaactttattttaatctaattatatctttttaatacttctttaaagtatcgtataaattttcttttgtaagagttattgtataccatcggcgtccaacgtcagcgattttttccattttttaaatgttcctaaactgattggcaataatttttttacaattttttcctgccccagctcgggatgtcgttgcttatattgataaactgttctcaacatttcttttttctcttcagctgaataaattttcttccctatgaaaaaaaaaaattaaatttaattggcacattaaaatgtaataattaaatttatttatttttattttatttggtttttcgtcagaggcattgaattgagatggacacaggaaactgagaaaatttaaaagatttttcagtagttggccgatggacaaaaaggcaaatttggcgatggacaaaaagtgcaaaattgctaaatttcaaaaaaatttattaagtttttcaaaagttatgacaaattttccagtttttggcttgaacttttgaaaaacttaataaaattttttgaaatttggcaagctaataatgcaattcaagggctatcgtatgataccaagattgtttgcaatttggttgtgtctgagaagagttttgagttgatttattcaaaaatttagcaaattttgcactttttgtccttcgacatagcaccgatttttcacaagggttaggatcgactcaaattagtcatgtagctcggcgtcagtccggcgcttttttacagtaagaaaaacggtttttacagccttatatatttaatgagaccgtttgattgagaaattcttaaaatgcttgaattattttgatttaacttacagaaaatgctgtcagttttgctaattttctccgatttccattccttcaatgtgctttggcccatcttcagtttcttagctattttagaatcgctaatttttggattgtcacttttaatttcggaatattttttcatcaacatttccttgtctttttccgaatacgttttgttgactaaaacaaaaaagaagtattaatgtaggaaatttcataatgaaaaaataaaaataaaataattgtaaattaaagagaattttcgtgcaaataatattattttgtggtattttatacacaatatttatataaagttctaaatagcgaaaaatataggttaatttactaataataaatcattaacatatttatattattaataatttaacgattttatgcatttttaaagcaaaaaaaaaaattattttaattagaaaaattttaaaaaattaatttaaaaaataaaaaattattcatacatgttaagccaaattctcttttccatctatatattatgccaatttgcactggcatttggtcagtgatcatttgattgatttcacgccatgattttgatggatattttttgtgtaattcatccttcatttgaataaattgcgcaacaattttgcgctttttttctcttggaaaattcatcgctatttcggcttaaatattcaataaaaaaattttcaatgaaaagtcgaataaatttctcaaaaaatatctatcattctagcattaattagcttgccaaatttggttaatattcaatccttttaaaaaacataaataaaaaaaggctgtttaagactttctgagttcggaagaaaagcccaatgccattaattaatggcaaaattacattcctaattagcccatttaaaatgagcagaaaaattcatttgaatacatttattaaaagaaaccattttttaatgatttcaaataaaaaaaaattaatactcactaacaaatggtgataaatggcactaagtaaaggtaaaagtgcataattagtccaccaaaagtgattataaattttttaaataacatttttttacaaaaaacccactattctgtacacccaattctcttttccaggtgcgtattctcttccggcggatgccaatttgctgcgcaacttttgtttcaagctcaacattgctcattttttggcatttatttcttttcattaattgcagataattgcttttaattttaaaaaatatttttacaatctttttctttttatcattggtcaaatcattcaaattttctgaatggaatatgttattattttaaaaattacaaaaaaaaaattatgtacttaattggaataatttaataaatgccctatttaatgccaagattttttattgaattataaaatttttattcatttttacccatttcgtctgaatcctgatcatccgtagatatagactgatcagaactgtgactttcaaaactttcactatcatccatttctgattcttcattttcattttgttcaatttttattttatcattaccaattcttaattgttcatctatgccgttaatgggttcgtttttaatggtaattgtttcttgcttaatgctaattggtccattatctatgttaatgagttcttgtttgacaaaattatcttcatctaagtgttcttctttaattgaggaaatcttcttttcaaattgtttttcatcctcatactgagtttggtaatttgtgccatttacctcattttgaaaaaataatataattaaaataaaaacaataattatggtttttagcattgcgtaaatagtttcaagcaaaaaataaataaatttgttttttaaattgatgtttttatttaattaatatatcatatatatatatatatttaaatattaatattacactattgccaacacataaaaacatccgtttgataaacctttaaagaatttcatgtggatatcataaagctcattaaattattatagttgattatggattcacgagttttcctgcggaaatcacgtcatcgccaggctttacatagttattccaaagctatttcagggcttttttcattaattatattatgatgcacttaataaatcctgtattttaaattaatttttaattacatacagcaaaataataatttttattttaaaattgaaaatgtcttttaaatatttattttaataaatgcattttctaaattggaaaatgcat

SEQ ID NO: 8827 - DNA, 969 bp, Heterodera glycines
atgggaccagtaaaagtcagtattaccgcccccgcacaggttgtttcaatactttcactgagatcaaatttgtctgtgtgaacggcgttggagtcaagtttatcaaacaaaaaaacgacgcctaaatttgccaagtatcgaaaaattatataaaaaacgaaaactttgcaataaatggcaaaaacattgattaaaatgtgatttctgatagataatttttagtcatcagcaatcaaatttcactgtaataattgacgcatttcacggtcattgctagggttcgttctccggtgcccccaacaaattgtcaacattttttatcagtagagaatcatcatgtataatttaaaaagtttggcaatatttggtaaaagatttttcccagaaattttgtgcaatgccaacatgccaattcggtttttgatttagagcaacataaaaatataaaaacctttattttggggttttggcacataaaaacatatcgcacatatttcaaggtttggtcatattttagcatttttgagaaaaatctgtaagcaaaatataagaaaattgaaaaatacacctttgaaaatcaactttcttgtcatttcttacagaaatttgaaaaaatttctttatttattccgtgtgccaaaatctaatcttcattagctcgtcacttgctttcaaagtttcttgctggcacttactcaattgatgtgaaaattatctttaaaaaaatttttcagaaaaaaaacgaccaatagactttattttcccaattttaccacatattttcgcacatattttagcattttttagctatatccaactctcttccgcctacaagtttacaattacattaataaaaattttcaatactttttataaattaatagatagatagaagatacacgtatatgtttattgaaataaaatgtctctggaaagcctaaaacattcattattttgcttttaacaact

SEQ ID NO: 8828 - DNA, 3152 bp, Heterodera glycines
  unsure (1)..(3152): unsure at all n locations
ggatatgtatacttttggggacccgacatttggggatataaaaatgatatgtataatttggagacccgatgccaagcctagttttgcttgcaaaaaagccttatntaaagattttctgcgcatgatcaccttcgcttcaaatccagttacgtgcatcctttaagtggattcatataaataatattttggcttcccaatttatgaaaagtctcccaaaaaagtttataatttaagcataaatttaatatttgtcaatacttctttattcatttaatgttacataaaataataaatttaaaaaacatataaatccttttacactttggttgaatgattttttgttatgaaataatcaaattgatataatgtattatcaaactcagtcccgatagtttttttgtaaaagaaaaataagaaatgaattttaataatttcctttgtgtaaattaaaataatataataaaaaccttataaaaagagtaaaaggttattatacaattaaaaaatttatgagattgggttcgtgtcctgagggcttgcagcgaattagcttccattttgctgtggcgaaacttgaattacatttaaattttgtttaaatattattggaaattggtctcgaaaggctttccgatattccgtgctaaaataaaaatatcaattaattatttaatttaaaagaaccttgtaaaatataaaatgggtccattcgatgcggcgccaatgttcaacagaattgcagtgattacttgcagaaaccaagcagtgatcggagaggcaattaattgattgatcagagtaataaaacatacacagattaaatagcctcaaacattcactgtgatgatacaacaaagagctcgaaaaacacgatgattaatcgatttggccgagggcaaacctaaattaggagtaattatttttaatgatgtaattaagcttaagcaacccgtcatttaaattttatcaccattccaacaagcaaataaataattaaagtcattatgatgatcagcaaaataataattaaacgggagattgacacacaaactaaataattttttattattttttatgtcatttaatttaccctgaaaaaatcaacaaagcaaccggtgaccatctggtcaccgtgaaactacatttcaccaaaaattaatacaatcagtcggtcaaacccagtgaaaagcattgaagtgtaaattgcacctgccaaataatttattcaattataaaattaatatattaaagtaattaccaaaaccaaatgctgcggtaaatataatctttgtggccaagcgatactcaattaaagtttgtccagaaaaagcgacgtaaacgaacaaaaaatggccagattgttgaagaatttcaaaaaaggagcaaacgaagaaaatttttcggtttatttcgatttttcggtttttttgaatttgttattttttttcaaaaaagcaataaactattctattaatagaaaaagcaaaaattcctctgagtaaaattgtagagctattgaaactctattgaatggtgtactaaaggtttgtaaaatgatagaaaaggcagccaaaaaacatgtgtttgctccttgattctaaaaaaaccacaaagattagttttagcgatttggtgccttttttggcgttttttcccgaaaaattccattaaaaattcaaaaaaatcggaaaaatacacccctaagaaatgatctaaaaaaattcagagaatatacctttatgaattgaacgccaaaattcatatattttttttttgataaaaaattttaggtttaaaaatttccttattgaaaaacattataaaattgaattatcaataaatcagcaaaatttagttttttggttagtttttacgtgttttgctccctaaaaatcattaataaaaaaatttaaatgccttttttcatgtctttttcggatttttgtgcctttttcagtgctattttgcgctttttggtgccttaattgtgagctctaaccataactttagggccggcggtgctgataagcgccgccgggaaaatttttttgtaattttaatgctatttgttagcagattttgtctaaaaataccaaattttgagattttgggctaattttttaagaaaagctagctttttggggggtcgcggtgccgataggcgccgccggaggaaaattttaagaatttttaatgaattttgttaaaaaaatggccaactgatttgtcaaaaaagtcggtcgattgtttcggttttttaattatttcggtcgaacggttttggttaaaaaaccgaaaaaaaccgaaaccgaaaaaaaccgaaaaactcaaaaatttctcgatcttttttgagatgttgcgaacaattgagcccatggcacaattagatattttggtacaaccattgcaccaagtcggaacaaaaaacaacccatgtatttgatatcgtagtcaaatacagtcgggtttttgaattttcgacaattaaaaaatgattttttagaatgagaatttatatcctttttaatgtatatttaatgtttcttttcccttttggaaccaatttaattatgatacaaaaaatgaagtgattaaatacgggtgttttttcatacattttattatcatctcaataatatttggaaggtacttacgagaaaaaatatatttaaaaatgggatttttcatgcagttcacaaacaaatcacagtgaaaaaattgtttgagcaatgaaattctggcgctagaataattggccataattattattacttgaatttaatgcccaaatgatggatggtaagtttcaacaattcacctgccaattaattaccgaaattacacatttttctccaataatgaaatgtcattttttctgttttatgaatgttaatcatatgcacccaaaatgaacaaatgaactctagaaagaatttgtatgacaataattgtttaaaaattaaataattcttaaaaatttttgcattttttatatatacatgttgttggactcggctatcggtgctattacattagtcaaaaatcattaaatgagaatattttttcatgtaacttgctatgacattagtcaaaaaccattaaatgagaatattttttcatgtaactctgctcaaaagcactaaattttaatt

SEQ ID NO: 8829 - DNA, 1242 bp, Heterodera glycines
  unsure (1)..(1242): unsure at all n locations
tttaattaaagtttgtaatcccaatttttgcccgtgctttcattgggctgtcatcatgacaattgcacctatgagatttgatgaagacgattggtaatgcatttattacnccaataaaattttaaaattaaaattaattctntaggaatgtgttcatgggcaagaactcatcgttgggtcacgcatgcttttcaacgcaaagggactactgcaaacaaatgcaaaaaacattgtgtcctgctgtttcaaattgtgtccgttgaatttgttaaacagcggtgcctgcggtgccattctccgctcgtccaccttttgcgtcaccaaattgaacgacatgtgcccggcataattagcaattgcctaaagaacggaagaactaattgtgagaaaaacccctattgggatgttgttaactactaattaatattaattaatctatgattaaatccatgtgtttgatgagtcatatttcaaataaatgctatggaataacattcatacatagccatttggattttataatcattttacggtaatattttgtcaaaaaattatggttaatgaaagagggcggagtcattattttaaacgatcaatatgatattgatgaaaaattatttacaactaagctcaaaagcaaccaaatttttaattcttgatattattcgataactctaaatattctctatcagtttaaaaatttcaaaaaatttcgttaagtttcaaaagagttagggccaaagatgctcgaaaaaacaaggtttttgagttcctctagccataacttttttgaaacttaactaaattttttgaaattttgagaaaattcttagggctatcgaataatatcaagagttaataatttggttgcttttgagctaagtttacataatttttcatcaattcttttttcagggtaaaattggattttttcaacaaacaacaattttaaatcgcgaataagttgaatcgtttttttaatgaaaattttcaacaaaaaactacccataactttggcacaaaactaactaaaattttaatttttgatatcattcgattgctgtaagaattctctataagcctgcatgaattcaaaaaatttaattccgtgaaatgagacgttctcgtccattttcttcttcttatctgcgtcagctgctgctcggatgaaggttgcagatttggtcacttccagtgcctgctttttcctctctcttctttttcgcttctctgctgctgctg

SEQ ID NO: 8830 - DNA, 2333 bp, Heterodera glycines
attctggcatcatttgaaagctctatgtgtgctctatatttacatgccaaaatagaaattaatgattcaacaataaaaaagttatggcacgcggcgccgaaaaagccaagaaaaagtcaatttttgaggttttttggccataacttttttgtaaacggatgaaattttttgaaattttgcaggctaatagagaatctcaagagctatcgaatgataataaaaatatttaatttggttgataatgaaaaaagttatttgaatcggcgccgaaatggcccgcgccgaagtggccggttcccatttaattcatcataattcatcatttggcccatctattgattctaatccaaaatcggaacttggccaggcgagagaagcacacgtggggtgtcagacagcgcgacacgcgcagtcgccagtgctcctcattgatggcactcatgcacttgtcaaaatcttaaaacacttcttccacctttattatattccgaaatccaatcgaatgccgcggcttccctcccccccccccctttttcccgccgatggctttgcctcttttggccgttgcttttgcttttaccttcaaagctttccaccgacgagcgtgccaacattttcgattgcatttctgaagaaaaattggactcggcacggaaatgccaccgttcgttgagcatttggcggagttttgacatgtcaatgggccactcgttgatggcaatgtttttgtaggagtggcgcaggtgataaaagtgcgcttgtcggcacggcacacggacctaaaagcgaagaaacggggagatgggaatgagattagaaagagaattggacgaccggactgaaaggaggggggactgacctggacgaagccaaaccgatggatgcccgattcgtgcatgttcaccttcgaatgggcaaacaagcatgagaaacggcatcctaattatggtcgttaattggttgcccactgtgtccacgcgactcgcattgaccgccacgcgcgttttcatccgccacactttgcaactcgtcttccatttggagtgggcgaggaattcgaaattgaaactgcgcaaagtgttttgagtggatgggtcggggagaacgaactttaaagtgggggctaatgaagcaaatagcggaataattaaaagcaattagcaatgataattaaggaatagcaggtaaacaaaggaagcgaaaaacgcacttggacatcgcgatgttcgaagagcaaagagccggcatttggatgctgatggaacagatcctaacaaagggaacaaacggaagcattaaaaagcattcacagggagtaaaagcattgcccttttgaccttgagtatgtccacgtttattcccggccgaactttcattgggtccaatggcatcaacctgaaaaagcaaaaagggaccgactgatcggaaggaaaagaaaaaacgatcaatgcgatcgatggcagacggacatgtcgtcgatgtccgttatgaccaccatttcggcgaacggcttgacaaagtgcagacagttgacgtgagactcttcaatgcctcgggaaaggaccaatccgttgggattcgcatcggaaagcaccggccatttgggccacacgcgcaaatggacaatgcctgacattagtttaattggtttttaaatgaagatttagcacaaaatttgaccaatgcgctgatactccgtcagaatttgaattgtgtctgccgaagcggattgaattgggaaaaccttaagggggggggggggggaaattgaggacaataggcacagtttcagaagaaaaccattttggaggcgcccaatgccagccaaacttcgatgcccgtcaccataatttgccattcggtgtactgtacaaaaaggcatcttggtcgggcactctcctaccgtgtccgtgttcctaccgtatacattggtgccacgcaaacgaccaaagggaactttttgggcccaaagtgcaaaggcttttccaatggcacctcaatggaatggtcactcaatgcggaagtggcaagggacagaatgtgccgatttggagtcagcctgaaaggggttgttggactgacactctgagactcattttggcatttttaccgaatgctctccgccgttccgtccgccaattggcactccgccaaatgtccgccccacgcgcaaatgtcgttggccgccctctttccctggtgaatgcgttcgatgtgcgcctcactaagcacctttttgctgtcttttccttcgctaacacagaacaacgcgtgcgtttgacgaacgtcgccgagaattgaaacacccaaaacggacgaaatgatcagaaaag

SEQ ID NO: 8831 - DNA, 2035 bp, Heterodera glycines
gggggtttaattagcatttgaaaggaggaaattcgagtgagtgatcagagaggaggagagacggggctttcccctgactgatcagtgaacgacgagttaaggccggggaattgcttttagcggaaccgatccgatcggcgtaaaagagccaacgacgaactccggtcaaagatgagaaaagggtgctcaaaaacgattaattatgaaaaagcattggctttttcgggtaagaaatgttttattcgggagagaaacgcgcgaaaatgaaaagctaatcagcggatcggatcagccgacgaacaaaaagcggagatggcaacccattttcgactgctcacttgaaaatgggcagaagcagaagaaaacttcctcgttcaatccaattccatttggtaaatttactaacaaataagctggtcaatgtttttaaatggctaaggaaggacagaaagtccgtcaaaaaaaagctgaactacccatttttttcttacggtgatttgaatgtccaaggaaacgctttatttatcaattatcactatatgttaattattaagtgcaccaaacggaagtgacaacaatgaaatatgaaacgaaattatcattatgttcattgtcagattattctgccaattcctccagctaaaatatatgatgagtgattctcggattcgcgcctatccatcgcatattccacacttctgttcaataagcgtgctttgccacaaaaagtgattcagcggcagacgcggctgcctcctcgccggtgtatttcccctgctgagcgtcgccgttggcctaaaggaaagtcagaaatgaaatgttaccgaggacagcataaaagaaccaattgctgggcatcatcagtcgccccccccctaccttggcacggtgcagcaacactttctgcgcatcgcccaaattctcgtctttgccgttccattttttgatcactgacgactgcagcgctcttccgtaggaaaaggacagcgtccacggcttcggcccgggcacactgttaatggcgttaagattgtgtgtagcctcgatctcggattggccgccggagaggaaaacaatgccttgaaaaaggaaatgcaaaatgcgaaggaaaggcactcattacgcaccggggacggcaatcggaacagaacggcggagggcagtcacggtggcgagaccaatttggtcgggcgtggccttgggcgagtgggattggccgggggtgaccatgttcggcttgagcagagtgccctccaggtaaatgtggtggtcggccaatgctttgtaggtgtaggccaaagtcaactcagtcacctaaacaaagaccgatacaacaattaaaaatgaaattgaaaatgtgtgcaacaaaacacccgatgatcttcagtttttaaatgctcatccgcgtttcaacattttctctctatgattaaattgctctcgaagactcaaccaataaattttgggcacattggtcggactgggctaattgtaaaagcaaccgatggccaacaatccaaatcaaaccttctggcatcgttccaagctgtgttcgccgtcacaaagcacctccggctccacgatgggcacaagtccgttctgctgacaaatgctcgcgtatcgggcgagcacattggcattctccatcaatgccaaatgggacggtttgtgggcaccgatgttcagcacacaacgccacttggcaaagtcacagccgccctttttgtactcggcacagcggtccgacaatttatcgaggcctaaaaatgttgtgtcattgctttccgaatttttgggttttgctccaaaacagaccctgggtcgtcccctcatcgagagtgccggccaatggcacaactcccgtgtccactttgatgccagcaacggctcccgcctttttgatgacgtcaacaaatcggactccgttgtcggttgactaaaaaacattaaaattggacccaattatgcgatgtctgcccacctgaaggaatgtctcatcaaaaagaatgacgccgctaagattctggactctaga

SEQ ID NO: 8832 - DNA, 2238 bp, Heterodera glycines
aatggcacaacgacctgtgctctcgtcagcagcgagaatccctttgcccggctgaagaattttctgagcaattgcgcggagttcgttttgtttctcttcgcttagcggcggtctgtacgagtttccgacttctgccatttggacttcgtttgcgcaattgatttatgtggattaaacgatactgaaatgtaatcagtaataaacacaaaataaatcgaagacaaaaagaatgaaatcgaagacaaaaagaatggtaatggggtgggcgaaagaagatgatatgaataagtgaatgaatggaggacgaaatgagtggggaagaagagcagtggggaggcgtggaaagaaaggtcagggacacaaccaattgataaacaaatgttgtaaaaataataacaacccaataatgcacatgcccaaactgaacattggaggagaaagggaataaataacaaaagtctttatgaggtttcgctgatcatgaatggattatttatgcggtatttttctaaatccaatgtatgggggggcgggccgacggtgccgataaactctgccggaaataatggttaacaaatttgttaacagaatttttccaaaaatggccaagtttagatgttttgagctgattttaaaaaaataaggatgctgttgtggcctaatggtgccgacaggcgccgctcggaaaatttttaaaaataaaattaaaacagaaaatttaaagggaaatttaaaagatttccgtaaaaaacaatcaatagaatgcactttcgcaaagtgtggaggaagaaaaatgaacgaatgctaaaataaaggaagtgaagggagcgaaaaatgatgaaagaacgcacagaaagattatatggaaaagaaaagaatgaaaacagaaagaacgttgacttataaaaaatgagtcattgtactaaatatttgcgtgtttggctaggaagcaaatttatttaattacaagtaaaatggataaaattgcaatgtcaaagtcggaagaacaatcctaacaaaataaattaattaattataatcaaagtcgaaaattaagtccatgggtagttttggcatcacgatttgcgggattccttcgtctcattccaccgtcaccgatttggccaagttgcgcgggcgatcaaccttgaaattccttttaaaaaagaccaaaaattaaaacaggcacattaaatccattgagttcggccacgtggtatgccaacagttggagtgggatgacagtcagaatgttctgcagacagtcgacagtccgtggcactcgcagcacatgctcaacatcggcaagttcagacgacggcaccgactcatccgcaatcacaatgggacatccgtcacgggctttcacctgctgcagtgcgttcagcgagcgctaaaaaacgtgaaaataataaattaaatcaacggggcaattagtacggtggtccgtcccaccttgtacacattgtcgttgcagatgaccatcacaatgcatttgtctttgtccaccatcgccagcggcccgtgcttcagttcaccgctcagaatgccttaacaattgcaaattaaaaggcgggttcagcagcagcgcgaccttcgcaatgcatgtaggagagctctttgatcttcagcgacccttccagacaagtggcgaagttgtaaccgcggcccatcaccagcagagacttctccttgtagatttggtttgcaatttgcaacacctgctggtcaaggatgagcacctgcttgatttggtctgaaaaacaataaatgggggactaggcaatatgacatttatctgtttaattcataatacgaccttttaaaaggtgccatgaaaggggggggggggtttattttcttttattaaaaaatctaggactttctaactattgttgaattgaatgaaattttaaatacggagccttaaatactatattttgggagggagcatttcatccgaaatcctaaaaaagcaaaactttatttcttttaattttccaaaccaaatttgtcatttttccgatcaaaactttgagaaaaatttttaattttttcaggtataacatagtccgaaataacaaaattaaatttttaaattttcatttttttccaaaaatttttaattttcaatcaaaccctttttcattccatttaattccaatcgttgttggtcgatcaaaaaaatattttactaaaaatgatcacacaattttcttctggtgggtttgttgcttt

SEQ ID NO: 8833 - DNA, 2298 bp, Heterodera glycines
tgccattttatgagaaagtaaaaataaaaatttctcacttctataaatattattaaaatttgccaaataatcttattttcttttaaacaaaactaaatttaacaaaattattatccaatagaatcaaaaacaatctattcaactgcatcatcatcacttgcaaccgtcatgatcaagtgaattagaaaatcctagcaagtttattggtagaaatgaaaaattatttaatgcaaaatttagaaataacaaaataattgtaatgaataaaactaattctttaattttaaatataaacaacaaataaaagatacagcaatgatttttaaaagatggaaaaacttttgcttttttatttaatagataaaaaagttattttaaaaatttacaaataagatatgaaattatttataaaatatattatacattgaagctataaacataaatgcaaaagaaagtggggggtctgagtgaaaaattagtgatgaaaattggagttaaagggaaaaaattaagaaataatcataaatatattctttcaaagaaacaataccaatgtgcaaatggcctagtggctagtctccttgacttttcccttcttctttcccctggttcaatccctctacacaaattaaaatattttaaattttctttttgtataatcatgtgatttatgtttaatgtaattttttgattttaatggaaaaatatttaaaaagctcatttggcaaaaatggctaaaattttacaatagaaccttggggtgatctacacccacacaccaagcttcatttggaaattccacggtcacttgccgacccttcctttgtcagaattgaacttttaaaaaaatttcaaagattacatttattttaatatcttttttttatcaatatcttcttataattaattttaattaatataatttttgttttaaaaagctcattttatttttaaaaaggagagaatcgaattttgtactttgaattcaaaaaatttatgaaatgagaaggataatttcttggtcaagtttcaaatgcgaattccgtcgccaaaaagtgacgggtaatgttggaatttggtccgagtagggggccgttttggtactgaaaatgtagtgacattaaatttacattttaaaatcaaattagctggtttacttttaaattttctttttgtataatcatgtctttcctatcgacaaaatatgattcttaatttttttaattgtattttatcattttttaaagaagctccgtacaaattgagcctagtaatcccaaaaaccagccttttttttgttgaaaatctgttaacaaattacacccaaatttcgtaaaaacttttttagaaatagttttaattttaaaaataaaattaatgtgttgcgtttgatagcccgtgaaaaaactttatatttggtgagttgaaattttttattatttttaaatttgaaataatattagacatcgatgaattaatttaccccaagaatatttttattcttgtgcgctacttcctgacaggatggttcagttgactctatacatttcttgatttttttaaagatcaatttattaagttagttaaaagaacggattttaattaaaaattatatttgctattataaaattttttcaaattatctaaaaaattatatatgaatataactgatgaaaaataattataataaataaaattattttttcagctagctaattatttttgtaaaataaaatcatattatgattttttctgttgacgggtcaccgaagataattattatttaggttaaatatattttcacaattattaatgctttcatattaataagtataggtaatatatttttttcaattattatacatataaataaaaataccagaatgcagcttttcgtaaacaaatgaaagagttataatatttaatttttttttcattaaaaataaatactaaatattcgatttttaattcttttaattattttttattatgctatgtacaggatataataaattataatttattcaaaattattcaaagaaatgtatatttgcaagcatcattttaatagggtattttgaaaattcaatattcattttgataaattttgtgacttttttttaattgatttttcattaaaattagtaagaattttttattaatctaaaagtatctcttaaataacaaaatctattttgaaactgtgatttcttcatttttaaattgttaaataaaaagataaaaatagttcataaagttattgcgaagatcgattatttaataatttgttttacaaaa

SEQ ID NO: 8834 - DNA, 2161 bp, Heterodera glycines
aaaaaattccgcttaaagattttgtgcaatttaataaccataacttttctacaattttgtaaaaaaatttctaaattaatattcttgtagagaacaccatgtgctatcgaatgatacatgaaatatttatttggttgcaaatgaaccaagttatgaatttatgtcttacattttttgttttcctatcacttggcggtttttaggaaaccacccagcacgtaaattttgatgttatattattataatatttaaaatatcacatggcgagttgtgtatagtctgtgtaaatgtcaacagcttcgtatgatatagatattgagtcttatcaattaaaaaatatatatatacaaaaagcgaaagacgaagcctctaatttgttgaacaacttgatttaatgtaaaattgaaaagaaatgtttacatttcaattaacaaaatttatatgaaattctaattatattgtccttgttttctgcaattttcaataaaaatatttataaaaaaataatttaaattcgacaggagattcccgagcggctccggagaaggaaaacttctacgtccttttcacttccccccccccccttttcgattcccggataaaattcatctttggttctctttcccactcccctccccgggccgtccctcaggattctcctcttttcggccattttcactaaaggaacacttagaactcggaccatttccattttcaccaatttctcatttacgtaatcttatttttcaccgattttcatattaaaatcacaaccattctcacatttaatcacaaccattttccattattttaaaataaataaagcgatcaagttaaatggataatggagaagtaaaaagaaaggatatggaaattataaaaagcggagaattattttaagggatttagacaattaaatatggaaaattggggaaaatcacaattatcccggggaacccaaactcgggaaaagttgtactttcggcctggcacgttccctttctaaattaattaattaagaaattttaaataattttcatcttgcaaaaaattaaaagttaattattttaataaatacaagatatttaattttctactaaataatttgaaaacaataatacaaatattttgtgataaaccttaaatatatatagaaaaaaatacatgcatttttatataaatatatttatcttttaatgcttatatagaacgagttaatatcaaataaataatgcatttatataatattcaaaaataggacaattaaatcataaatttaacatcatttaatagtcacaaaaacattcaaaaaagtttgattttttgagtcatttttcaaacacagttcgaacagttctaaaccgatcgaaaccgcactatttttcccttatagccagtccaaaaccttatcgaatgataccactcccgacccataaaacgcgctaaaaagtcttaaattagtttttaagcttgaaactggggtatattattcttatatagggaactgtaaaaaaacattttatactaaattattctgtatatttttttttattatttaattgttttcggtttttgcattttcgttaagtaatttggggaccgccatgctgggcaccgccacggctgccgcctcgtcctccttggtcaccgatgccgccattgttctgtcgcagaccgacactttgtccaccgcgggcttcgctgcccttcctcgccccattctcgtaaatgcaaagcgcccagagcaccatcagaaatatctagtagtatgagagtctataaataagcactcagaccgacccataaatcatgtgtacccaatttaaaaaagcatttttgagccccaatgtcacttttgaagcatttgttgaatgaccatcttcatattcgagacggagtcgtcgactaaataatcgttttatgatatttttaaaaagaaaatttgttcttaccacgaggaaagtgaggccagcagttcagactgtctctgctgttcccgtttgttggtaatgtcaatttgttctttcggtccataaccaataattggattttctagaacatttgaaatataaattattgtttattttaactcccactaatcttttccaaaccttgtcctccaacgatgcgaaatcggtttgcgcagcagacaacatgccga

SEQ ID NO: 8835 - DNA, 1996 bp, Heterodera glycines
  unsure (1)..(1996): unsure at all n locations
atcaattttaggaagttggagatcagaaattaggcctctttatcatccgcaaatagcttaatttcaaccttttccgtgtgacaaaaatccgtaatatcatgaatatatatattaaaaatagtaagggccccaggatcgaaccttgcggtacaccactcaaacaattatactcatcagaaaaagatgagccaacttttacataaaaggtacgattggacaagtaatcactaatccatttaagtaatgaatcatttatcccaatgtttttgagcttagagattaatcggttgtgtggaactgtatcaaaagcttttgccaaatcaaaataaattgaatcaattgctttcttttcttctaaagcttggctaaaatcatcaactacttctaagagttgagtgataactgatcgatttttacggaacccatgctgacattaaggtaaaatcttattggtttcaacaaaatctcttatatttcgagctatattttcttctaaaatttttgacattgtacagagcaaagaaattggacgaaaatcaatgggattagcaggattcggaatttttgggattggacaaacaatcgattttttccatattgtaggaattttgccacacattaatgaaaaacagaaaaggtgaaataatggagctattaaagtttctttgcagtttttcaaaagaatgcttggtataccgtcaatagaagtattgtttttatccttaagtttacataatgaaaaataaatttcagcatgtgttatagtaaaaaaatccatacttttttccagagattttttggaaccagtgggttcgggttcaatgttttgactagtgaaaactgagaagaattgtttagccaaggcgtcagatttatccttattggtaaaagcaacctttgaatttttatcgtttttaaaaacaggtatgctattgctttttgttttgacaaatgaattaatatagccaaaacgtttctttgcagaggtcgaatttagtaatttgttctccttgttcttataaaacttcgaggtttcaaatgtaattttcttagaaatttcaacatatttttcccttattctttcttttttaatgtctttccaaagtaatttccgataattaattaatttctgaatgtgttcaggcaatttgggctcaaaattgctttggactaatgggacatattctctaattaaaaacaacaaaaattgattaattttatgaaacattgagtcaatctcagtgcaatctgaaaagaaaaaattccagttaatcgaataaagaacagagttaatcgctaaataattagctctacgaaaatcgaaacctttttttagaattttcttagaagtttttagcttaatttcacatgaaatactgttatgatcacaatgttaaagggagggccaacaagcacatttgatattaattgtttattatttgtaaatagaagatcaagaaaaatttttccctcttgtcggtgagataactaattgctgaaggctaaaaccatgaaggaatgataaaaaaagtttttctaaagatttttcggtcagatttttgtagatatcaaaatgccattttagactaggaaagttaaaatcgccaaaaagaagacaattgtttgattgttcaattaaaagtgataatacttctaaaagttctaaaaagtcttcatatttttcttgtgttactggcctataaaccaaaattaagcgaaatttttggtcggaaaacggagaaagaatatctatgcaaattatttcagaatttttgtgttttggtattttgataatttcaaaaggtatctgattagaaatgataaaggctacgcctccaccttttttggttttttctatcattacgtacaattgtgtaaggaaaattttggactataaacgaattatctaacttattgctcatccatgtcctccgagatggcataattttttatattttgttttctanaagtnagtttttttaaatcatctaactta

SEQ ID NO: 8836 - DNA, 1550 bp, Heterodera glycines
gaacgaccccacttccctggggtctattagcctttccgccgaaaagctctcgcataaaaaaaaagcaaagcctaagccctcctaaaaggctggacggttatcccttcctccccgagtaagaaatcagggagcaggaatgctgacaaagttagaaaaaaattgacgggatccgggccatgacaccaagagccccaccctgcaaatctccgggcaattcttttttgatttttccgtatggtttgccccgccagcggatgagaagcaaaaacattgtcattacataacaaataatcactcgccactcattcataataaatgaaaagcaacgggctgaaaaaagccaatgttagcatattattcaggcattatcgatttgtttattacgtcaataaaatgagaaaaaattgagcaatattaatataaaaaaacaatattatagaatatttcaaacaaatatttccattttatgtaaaaatgaatttgttgtatttaatatttattataattttctttatttttgtaattgactccgacaaaattcgaccaaattttgatgaaatatttggcaacggatgggacaaaaaagaaagtgagcaaacagtgaaaattgaacaaaatgaacgaaatgagaactcacaatcagcagcagttgatcaaatgggtgaagaaatgggaaatgaccgaaatgatcaaatgaaaaatgatcacaaaaagagagaaataattttgaaatttgaagcaattaaagaaaaattgagagaaaaaggaaaatacaaatggaaagatcaaggcaaaattgagacaaaaattggaaatttattaggaattggtcgtcataaaatatacaaatggaaaaatgaattaaatctaaataaaaataaaataaaaaaggaattttatgagatgaaaaagagtgaattcattaaacgatttgatgaatttaaagatttatatggccaaggcaaacagaaagaatttgcgaaggaattgggcatttccaatgacacattttggaaatggaaaaaaagaattggtgccgaattaccataaaagtcaaagtagaatataattttagtaaagttaaatctaattttaatttaagagcaatttaccaatgaggacaaactgaaaaagatgaagcaatattttaaaataaaagaagcaaatccaaaaattattgacgaaataattgccaagaaattgggaattggaagtgcaactctgaaaaaatggaaaaaaagaatgctctcatccatttgatcagtgattttttatttgattctaaactataaaaatattttgtagggcatctaaaactcgccagtttttttagcattagaaaaataaagcgaaaaatttactaattttctttttttgtcaatgcttatgaacaaaagtaaaaagttagtaaacatttttattttccaacattatttaactttatcaaaagccaatgtaattaaaaatgccaaaatttctaccggcggccccctaccggtaccgccggacgtcccacctagggatgtgcgagagtctccgttctcgattct

SEQ ID NO: 8837 - DNA, 1512 bp, Heterodera glycines
  unsure (1)..(1512): unsure at all n locations
ttctgacaatggcacgcaattttcgagctcagaattcgccaaatttgttgcggccaacggtatcactcattttttctccgccccaaataatccaatgtcaaatggacaagtggaaagatttttcgacacatttaagagagcattcagaaaattaaaaggggaggggaagccaaacaaggaaatcatcgacacttttctgatcacctatcggacgactccaaacgacacacttcctgatttgaagtgtcccgctgaattgctgctccgtcgaaggccaaggacaacgattgatctccttcggccaccgccacaccaaccatttgaaagtgatttggagatggaaaggcatttcaaccgtagatttggcaccaaaaatcgaaaatttgttttgaatgacaaggtttttgcacgccatcgctcctcgcaaaactggaaattggagtgatcagtggcacatttggagtgatttttgacgtcaaatttcccgacggatcattcggccgttttggcgccaatcaattgtgcgacaggaaaacagccgacaattttgatcagtccttggccatattaaatgaggcatttgatttgccattgcctccggccccgaataatgcgccacccgaagaagaaaatgccaatttagggctcaatcaactggaagatgaggctgcgattcccattcaggacaatttggctgctccaattgaggacgtcccaattcaacgacgcttctgttctctccgtgttagagacagacacacacatgcatattgattgacctttgcccttcccaattattcctccccattgagatataattcattctgttgttttccccaatttactgctccgctcccccgtttttgcatttatttgtaatttattatttgcgtaataaatttatttgttgtttggacttgtggtcctaacactatgcccatggcaaacagaaagaatttgcgaaggaattgggcatttccaatgacacattttggaagtggaaaaaacaaattctgccaaatgatcataaaagtaagggtttttctttttaatcatataataattttctattcagataagtgtttttcctactaattagagcatggagaatccagaaaaaaatatgcatttgcataaaattgacatccctacgcataacaaatccatggtttcgtgcaaaaattgactcaaatgaatcttattgttcataaaatgattcaggaatcggacgttgtacgtagcgaatacggcgcattttctggtcaatgtacagcaaatgtgttcatttgttcattggacgaaagcccgcatcccacgacctggaaaggctcaacaacatgccaacataatgtgtccacgtgccagttctcggncaaattgtcccatcgcatccaaccgactgtggcgccgtttaaattttgaagataattcgagctaacttacgttnnnaatgttaaaactgacaatttaccaaaaaaaatttcttaacaaatctaacgcaaattatcttaa

SEQ ID NO: 8838 - DNA, 2287 bp, Heterodera glycines
ctgtttttcttcttcctttcctgctgttattcttttccatttatttttttgattttcttttgcttccttttaatgatattttggaaagtgcaaatgtccaattccgaaagtgttccaccttcgcccacttcgtcatccgctgggggtggtgatcctctgacatattccgctccagtgaaccaacgaagcatggctaggatttcggcgtccactcaagcggcgagtgagttaaagaactttttgttgttttttcaagtctattttagccatgatggtcaattccatcccggctggtcttgctgcgccgcaacaaattccgcaaacttcccaagtaattgccgcaactgttattagtgcgaccggtgcttctggcgttttgcaattgggtcagcaaagctcaaattctgaatttctgtcagccttcgaatgtcccgtttgtcttggtcggtacaaattaaaaagtaattcctaatctttatttttcaagattacatgcttccgccatatctgcaatgtccatcgggtcatctggtttgtggaaattgtcgtcctaaagtcactgcttgcccgacatgtcgaggtttgttatttgatagtcattcctttcttctaaatgttaaatacttctaattcaggtccaattccgagcataagaaatcttggaatggagaaaattgcagcaaggtttgcgaattcatgcaaaagacattcactttccttctcacaatcagcctgcaatttccatgcaaatttgctcattccgggtgcacccaattcttttatcatcatgagaaagttgagcacgaagagatttgcgagtttcggtatactcaaataatttggaaatttattacttgtttttacttagtccttaccaatgcccttgtcctggagcttcctgcaaatggcaagggagtctggcagatgtgatgagccatctaatgaaattgcacaaatcaatcacaactttgcaaggcaattttaaattcccatacaatattttgtctttctttcattgactcccaattctgttaatgcccaaccaacaggcgaagacattgtttttctggcaactgacatcaacctccctggggctgtcgattgggtaggctttgtgcctgttttgaatgtccaaactgcgcttataaggtaatgatgcaatcgtgctacaacgcctttttcatgctcgtcttggagaagcaagacaaacaagagttaaatttatttactttttcgcgctgatttacacaattcagacaatcaggtcaaagctaccaaatgttctacgcagttgttcaactaattgggaccaaaaaggaagccgaaaatttcgtttacaagtattcatatttattaggctagtacataattttattcaaaaaacatatttcaccactttttaaactaagaatttatttaagattggaattatccaacaatcggcgtcgactttgctgggaagccagtccacgaagtaatttaattgacatgggttattaccaaatggggcacaccagacaaaaaacaagcaaatttttatttaacaggtattcacgagggggtcgctgccgcaatttctcaatcagactgtttggcttttgacacaaatcatgcgaatttttttgctgaaaacgggaatttgggaataaatgtaatctgattttaattccgttgatgactagactaatccaatcattttaggttactattcaacgtgctgaagggatcaatcgctgatagatgcatcaaaaccaaattttgttgtgcataatgtctgggttttggagtaccaagaaaagaccaaaagtacaaatttgtatgtaggttctcgtcattcccataattaattaaacacattcattgactaataaaggagaatttgttttttgtaatgtcttcttctatgacttgaggtcgtcagtgttcaccaggccacgtgctcggttcaaaatgctatcctaaacacgaaaaacgaattagtttcatttaagtaaatgtccttactttggacgcgtcataaggcatttctttggaggggatttcgagcacggccgggatgctggccacgtgttggtccacctaaatggtacaaatttggctctaatgcactttatgagtccaatcgacttttatgagtccaatcgacctttatgagtccaatcaattgacaattccgggtttttatacaataactttgttcatgttcgaacaaaccctatctttttggtatcactcgaaagcacaaagtcaaaagaatgtaattatacgagaaaacaagagaattcta

SEQ ID NO: 8839 - DNA, 2871 bp, Heterodera glycines
aacatcacagaatcaaatcactccttccattcgagttcgagcacccgctgcaaaaaacagtacaaatcgacaagtttggcgatctgaaccaaaatctgcacagtataatttgcctgtttccccaagagaatgcgttaccgttttggtggttggtttgccggctccgtgccccgcctttgtctcaatgcgcgccagcaccggcctccgctgccattcgcttgcctccgtgcgcagcaaatggtacagctgagcaacgtactttaaggtgtgaagaggcacaacgcggtccttaaaaagtaaacgaatgaaaaaggcaaactctggtaagtacccaacccccgcgtacccctccaaccctttgggaccgacccgctgcagcagacaacttacatcatgatcggcactcatcagcagtgttgccggccaattcacgccgttcgtgaggcggagacaatgaaggggcgagtacctttgtcgaagaaacaatgaataagcaggaaaaggggtaaaacatacctgtaaatgaaggagaagtcgtccggtttgtcggggtcgccatattcggtagcccaagcagcgccgacggtgaacttgttgaaacggagcatgtcaaggacgctaaaaaaagttcataataaatagcaaatctgctgttattgcttacttacccaacacgggtgacgacggccccgaagaggtccggccgttgttgagagcagactgccgtcagtaatcccccgttggacccgccatggatggccaacctgaaaaaggaattgcgagttttacgaacggataaagcgccacaactcactttttgttgttcgtgtatttttcgctgatgagaaattcggccgcggcaatgaagtcgtcgaaaacgttctgcttacggccgagcatccccgcctcgtgccatttttccccatattcgctgaatttgaaacaataaaccaaaaaacaagcgatcatcaataccttccaccccgaatatttgcaattactgatacaatgccaaaatgtttagcgagcatcaggcgagtaacggagaaatatggagtctgagcaatgttgaagccgccatagccgttgagaattaccgggttactgccatccaatttcacgccttttcggtggacaatgaacatcggaatctgttattaatgttcaaaatgttttaaagttcgagttactcacttttgtgccgtcatcgcgtgggtagaaaacctgttttgaaaatttgttttagtcagtgaaaacgttaacttttaacacccagaacctgcttcgagtcgaatgcatcacagtccaacccgggcacattcacgcgacgggtctcagtcagttggagaggcgactcgcgggacggacattttgagaaatcgccatggaaaaggatgaacgggacgaggaacgactcgaagccgatgaatattttggactttgacttttccgcaaaaacaccgcccaccgacccgatcggcaacggcagtttgtaaagctcacgcccgtcgagtgagtgcacgtagagcgcgttctaaaaacaattaagccgttgtcctatgactgctttcgaaattctcataaacggtcactcaacttaccttaacatcctccaagtagcagatgagaagtttgtcgccgtcaacagggcacgcccaccccaagttgcgttgtttgtcctcctcaatcacaacctgccattgatcgttcgagttgacaacgccatgttcgccaagtttgacacgcactaatttgaacatcggtgcgttgtggtttgtcaaaatgagagccgaatgttcgtccgaatccatcacctcaaaaagaaaaaaacaattagaattagtaagtgatcggttacttggtatttggcatctgatttattgaacaaaggcacaagaggtatcggtccatttattgcttgtccctttgtgtccatataaaatagctgcttggtcgggtcattgccaatttgggcagttacaaaaaaaatattcttctcttccggaagaatcgcacatctaataaaagaaattacaaataaccaaaacttgaatagacaaataaaggaaacgtacttctgcgaacatggatcatgcttataagccgttgagaattgccgggttactgccatccaatttcacgccttttcggtggacaatgaacatcggaatctgttattaatgttcaaaatgttttaaagttcgagttactcacttttgtgccgtcatcgcgtgggtagaaaacctgttttgaaaatttgttttagtcagtgaaaacgttaacttttaacacccagaacctgcttcgagtcgaatgcatcacatcctccaagtagcagacgagaagtttgtcgccgtcaactggccatgctctctctaattttcgttgtttgtcctcctcaataaattcaccatcgcctggctggacgcaactaaaaaattcaaatataaaaacgaacaaaaacaaaaaagcatacttgttggactttttttttgtgtgctcatactaaattgagaaattttttagacaattactgttaaatattaccactaatctgtccggcgatcccaagcccatttcatggaaataaacacatttgtgttcaagtcttttcgtcgagctcccaccggcaagcagctcagggtacgtcttaattgctttttttattgatcatattggaaaataacgaaccgagtagtaaatgcccgtattgtcggtattaacttttgaggcatctcattgactctgacttccattttattttttcattattgtttgttttaacctgtgatctcactcgatatttattcacttactctgagactactttactgtgatcagtcatcagagtaagtggtctccgcccttctg

SEQ ID NO: 8840 - DNA, 1164 bp, Heterodera glycines
tcacgcgacgggtctcagtcagttggagaggcgactcgcgggacggacattttgagaaatcgccatggaaaaggatgaacgggacgaggaacgactcgaagccgacgaatattttggactttgacttttccgcaaaaacaccgcccaccgacccgatcggcaacggcagtttgtaaagctcacgcccgtcgagtgagtgcacgtagagcgtgttcttaaaactttttaagcgaaaaattgaaaattcgaaatttgaagtttcgattttttcgaatgtaattggagcgagtgttttttaaagaaaattaaaatttttcggtcagcgttaacgggaaaaaattagaacttagaatgattttgagtatgtagagtgcagcgggaccgggaaatttgggcaagaccgggaccgggactttttgggttgaaaacccgggactttttggctgggaaaaccgggaaaaaagccgggaatttcccggtcccggtcaaaaccgggatcttggtactcagttgtcccaggtcccggtcccgctgcccctctattttgagaaaaatttcaaaatctgaatattcaaaaaagcaatcgcttcgataaatttccttaaatatttagtcccaaaaatcgggaccaggtcgcggcgcgccgcgcaaaaaattgccgcggtcgcgaatcacgcaaaaacgccgcgaatcgcgggtggcgcacgcggattcaaaacattagacataaaaaaccgaattaaatttgtatcataaaatatttacttttattcaatgaagttcgtcattcatacatatcaattacaaaattataattaaacaaaaattccaattttttttactaatcattagagaccggatttttatgtgctaaaaatcctgaaatatgtaataaaatatgtgttaaaaaaacccaaaatatgtgctaaaaacccgaaaaatgccaaaatatgtgttaaaagtgtcaaaatatgtggtaaaaattttgaaaaatcaagtgttttaagcaaaaaaaaaatcccagtaagtctaattctttattcatttcgccagcacaattgcaaattaaatacatttcaaggtgttctggggtaaaattgcctttttttgataaatcatttctataaattgaaagttccagcagagaacttcgaaatccaatga

SEQ ID NO: 8841 - DNA, 4397 bp, Heterodera glycines
ttggaaaattcttaaaaagccacaaattaaaaattaatccactttttggccttttcagtccatccaaacaaatgttggttaaacaacgacttgtaaatgtacaaatacagcacaaaggcgccgatttgttcaattttggccatcgtttccccaaatatttgtccaaatgccttcaaatagttgccatattcccaaattctgcccatttcggcatccaattttggcttgatcagtcggtgagtgcgcatcagcgatcggcggcccactttatgccaaccatttgactgatttgtgtaaatgttggaaagttctctgcgcaggttactgtaaccgtaatgagtgaggaagttgccaagtgcttccctggcgtcgaaaattacaccgccatttttttcggtggtaatggcattttgccgaagaaattcggaaagaattaaagcagcggaagaagaattgctgttgttatttggagaagaggaacgggaagaagaagaagcttgtccacctaattaatcaatcaattaaaattttttgattttatctccaaaattccctcaaaatttcctcctctttcgtcggtattttttgtccccataaaaacgtgccatcgtttggcgttttgccttcctcctcctccccccactgctcgttgatcgccagactgagtttgatctgtgcccgcaccaccgtcaccacccaatcgcccgtgccgcccatttcgccaatgattcggccaatttcgtccccattttgcattgcctcgccgaatcgttgcgacgtttctccgtgcgttttgtccaccgtgcccaattggcccaagtgcgaattcgccgcctcatttcgtgccgatttgtcacgcgtcttttccattctccgtgtgaacgctttccccagccgttctctcgtctctttccgttcgctttccgtccgattgatcagtccctccaaatctctgcttttctctgtcaacagatgcttcatcttcgcttcattcagctcgtaactgaattttcaatcggatcatcaaaagggaaattgggcaaattggggaaggttccaccaaatactcccgccgaaggatgggccccatggagtaagtgatcagataaaggaccctttttcgggaagactgaaacaatttccatagaaatggaaaacattaaatccaatacaaagtgagagtgaaatatgctcgagcgatcaatcttagctaataaaagaggcggtagaagaagcaaagaaaatgacaaattgcgaaataaatgaatttccaaaagtttcggtaggaaaactgaaaattagaaactctctttcaatttcaatgggatgtgttcaaaatcccggatgtttcccctaatctgcgctttgacttggactgatccgtaccgtttgctgatctcttttcgcatttgtttcagccattttaaggcaaattctgcgcgactcacatcacatggagaatgaatcttaaagaaaacaaaatggcattttgcaaaattggcatttttatttgcgtaatttttcaattggactttttggtcgattatttcggcaatttgttgttcaaatgtcccgtaaattctgtcgaagagcagcaaactgaacattctgtttgggatggttctcaatttattatgattgttcttcaaagtacggtcgtccttcatgttggtgatgaatccgatcagagcaccgctcaaatcgtggtaatacgggttgtcaacgcatgcatttacaagtgcctgccatcagataattggatttcaaattaagaaaatggagatgacaccaagagcacattcaatggcattttgcaatatggccaccgtggtgctttttttgactaaagtgccgaaaaggcgaaccgcggtgcttttttttgtgcaaaatgctgaaatgtcattccccagtagaaccacctttagtcgtgccataccctgctgctgtccgttgtcccttccgacatttttgagcgatgcctccaaaagcagcaacgactcggccaagtctaagaagccaaacgcctcgaagacgtcgcccatccgttgcgacatcggctccaactctgtctcattttgatgctcaaacacttttctaccttctcgaatgtgcgattcgatctctgcgcgatcgccgtaaacgggggacaacagattcagcgagaaaaagcacgtcgtaattgcagcgagaagaaacggcagcgacaggcgagggtcgtcgtcgctgtcgccgtcggcacggccgaccaaatggcacaacgacgggacggagccgaggagaagtgcagagaagaagcagcacagcaaaagcagtggaagggacggcgaaaaagacgaaaatggcactaaaagggaggggggagggagtcaaaattcgcgacatctctaacacacataaaattgtttataataatcgtttttatcagatctcgattatttgaaaaaaaagctggacctctggacctggattccaggttggactttggcctggatttcctcgacaaaaattcagaaaaatccaggcttctcatggcctggatccaggtcgggcctagactttttcagtttttttgttaaagcaatcaaatcggtaactcgaaataacaagttctaaaatattacacaagaaatcctggttttcatgccaaacctggacctaaatttttttatatttgaattggacttggatttccgggacaaaaactcaggaaacccaagtccaggaaagcccaggcctgctggaaccaggaccaggtcgagctcaaattactattattgttaaatatttttacaatgtttttaattacctcacctctttttgctcttcgaacggaataaaaaagattaaaaaagtgaaaaattgcatttcgaaacattcaaatggattaaaataataataagaaggagctaatgatatgacaaaaaagcaattaataataataatataaaatgagctaatgacacgattatcgtcatcattacccactaatgtgctgctgctttccctcctcattgtgatgccttttatttttcttcgttttttcttcgctttttccgctggcatcgctttatagtgacagcacaaatttggcatggcatttgccatcgctttccttcccttctaataaatccatcccatttctcttccttgaggtgacgcgcgtgttaattaagagaaaatgcgtttttattggcacattaatcgaccaatttaattgtcaaatcggtaattaatgggcagttcaatttcatttgccatcatttaatcactgaatttgaattttgctttcctgtaaaaaacccttccgttttttccatgtgccattttctgcttcccccccccatttttgccgtttgcttatgaatgactcatccatccttaaaaagcgtaatgcattaattaccctcttaattattctcccattcattggcccttctccctcctcctcctcctctgctgatctgtctcttttctcctctccatcttttgcccaatttcttctttttctcattttctctctccgcttttccctttcccttttccctctccctcatttatttttgctcttctaatcgatgtttgtcccattgcctcccccttttctcccccctttttttctaaaattccaatcttttttatttttatatatttaattatttcattttaaatttgccttcttatgtatgcaaaaataaatgttttttcttttttattaaagctttgagaatggtttttttgcggcaattgttcctgttgaccaggaagaatttgttggttatgtggcgcaccaaattttgggtgctttccgagtttttgatgtgccttttatgccttccgattttggcattgatacttaaggcaaaaacagaaaattaaattaaattattaaatttaaaatttaaaaattgcagttcaatcacacggatgaacactcggaaatgagctcatttcggccggggaaaattaatggcaatttcagcgatttgaaccgacgctttggcaatgattcgataatggacttttggtgcaacacttccaaaattttggcctataggtgtaaataaatggaaaattaaattaaatatttttttaaatttttaattaaaatttcccaaaataaaaaacttttcataaattaataattccatttcttttacgttttcttcccttttttcgttatgtcggcgaagcgaatgccgaattggaactgaaggaattggaggagagattcacagaccaaatgaggggggagaagtggttggagttgaaggagttcaaaaacagcagcgaaatgaaaaaggcactgatggacgaccgaaacaattcggcgggcgacgaatgcaatcagaaatatttggtgatttggggggggggggggtgaagccgaccgaccgtaa

SEQ ID NO: 8842 - DNA, 4376 bp, Heterodera glycines
taaaaaatttctcaaaaatttaatcttgaaattttttgtaaaaactttctgttttttttaaatttactactgaagaggccatttattgacacctgaacaaaagccaaaacctaactttacacgtttgttatcaatttggattgaaatacttgagaaaaaatttaaatttttatcaaatcgcttcagggcatggagcttttttcaaaatttgtggaatgttgattaataacataaaaattgctaatcttcaaatttagcttaggttaactcaagccatgcaacgaccttttttttcttttcaaaacagtttttacggctcgcttttttcaaaaaaattttgcggaacaaaggggcggtaagcccggcggtgccgataagcgccgccgggaaaattttgtaatttttaatgcgatttgttaatgatcttgttcaaaaaatgacaaattttggcgattttgtgccaatttttttaagagaataataatttttagaggccggcggaaaattttttgcagattttatacccattttaaatatatttcgccataaaaagatgaaaaaaatttatccaggaaggtttttcatgcctggacctggacccggattttcaaattgacctggacctggatttcctggacaaaaatccaggaaaatccaggtctaggaaaaatccaggttctcaaaaaatgacctggacctggatccaggtccatgccgagctctactaactaggcaccgaatttccatgggcctctcggagcccaccatttctttggcaaatgcaaaaacagaactcaggggtgtgggcgagaaatatttttttacagggactgattgagaccgaaattgattaagggcaattcccaacggcgcttgggccaaatatttggctcttttgtactttaggcgtccaatcaatgaacagcctcagtttcataggccatcacttttttcttgattggtttcaatgcctacattcttggtatcagacaaaagcttaaagcccacggagtatgaatttttttaaataaaactaaattcttagctaaatgcaattgacaaaaagaagccctgaaatataattgaaataatgcatttttgtcttttctcattttagtttcttttttaatggcagcatttgcttgctttttatatttataaattcatgagagtttaagctttcatttgacatcaagaatataagcattgagctagtatgaaaaaagttatggcctaagaaactgaggaaggtcactgattgacgccggaagtgtcacttagattttcaaagaaaaatgcaccccgcctccatgcattaaaagctggggtggccaatttacaaataacagctgaacagcaagcagtacctgccgttgatgtgccaagtcgcatttgttgccaaccagcaaaataggcacttgatcagtaccctaaaaattattttttataaataaataaaatttctctctattggatatttatgcataaattttacatatcttacaaatttaattaattattccgtgctatttttttcttttagttaagacgatgaaccttttaaaattttgcagactaataaagaaaataagaagtgtcaaaatggtaccaagaatgctaaatttattcgggtttagcaaagttatggcaagtttatgttgaaaaaagaattggcgaattttacagaaatgcctaaggcggtgggttttacgaaaagtcctaggcgccagggccatatgttcaatccgttaagactttttttaaagttttcagacgattgggcttgaaccgggccaaataaataaataaatttaaccaacttatccatacttcataagtaaccacaagaaaaaaaaaagggggggggaggcaaaaaaaggagtgattttttttaattagttgaaaaaggagtgggaatttttaaaatacacgcaaaaaatagaaactattaaaaatattaaaaaaatttaaacatagtatttatttaatcccttttttacataaaatgggcgaaaatgggtgaaaagaccccaaaagggggaagcaaatgccaccaaaaggtggcgaaatggcatttctattacatattcagccagatcagttcctaaatctttggctcaacaaacaccttgacccggatgatttggtcccgcattgtccgaatgtcgtgaaagctctgctggttggtgatggagtagaccaccaaaaagccctgcccgtttttgatgtacaggtcgcgcattgaggcgaactgctccgtgccggctgtgtccaaaatttccaacacgcatggctgtccatcgacctgcaaaattggcacaatgattgattatcgccccggttcgatggcattatttaaggaaggaccgttacttaatgaaagaactgcttaatggcgaaaatcattcgttttcactattaatggatcaaaagttcattatttgggcaaactaatgctaatattgctaatgtgcctccgggcaaaaaccaaacaattaacacgtcttaatgcgcaaaagaaaattcaattgattacctaataaggtatgaactaattcgtctcatcaggtgagcttaaaatgccaaaatattttagttaaatattaatgggccaattaaattatacaatttcgaaggaccagttaattggcaatttgcctcagggcgagcaaatcatatctattaaaaccaattagtaattgcttgaaggtaattaaatttcattgaaagtcttgaagacaaacaaacctcaatttccttccgataaaagtcttcaattgtcgggtcatatttcaaaatgaactgttaagaaaaaaatgaatgaatttttggcaaaatcggattttcggcactttattggacacaaattgaacagtgagtgccgatttgccgactccgcccgagcccaacacgaccactttgaactcgcgcattcagctgctgctgctgatgctcactactaattatactgtgcaaaatgcaataaattatgtcgacaattttattaattaatttttaaatattgctaaattggataaaaattaaattattaaaattatttttagtaattcaaaaaattgccccaggctatttaggattatgctcaaaaagaaattgattatttttgggagggattgacgtggcagcgacggcggcagaaactttggccttcctccgctgctgaatgttacagctatatgtgactttatgcaattactcatccaatttttggtggtattggcgacattttcagtcttcgctggatttccaccagtactgaattggcaatgcttttaaattcgaaaattggttaattttttttataaaggtgttttctttattttatttgttataaatccggaaaaattcaaattggcaaggtttgaaaatgaaatatattttagtttagattttttcattttttgaatataccttattaataaattttccaaaatttccataaatacgcataatttaggcttaactcaaaccagtcggtttaatttgttaaaactaaaatccccaataaattttcttcggcttaatttttctgcaatttaacactaaaatttttcgtgataattccagaaaacttcggcttaagccattgatggcttcccttgcccatcggcttaatttcattacggcggttaattcctttaatattcttcggagcaattagcgcataatttactttacgcaaaaaaacttatttttaatgagaaaagattaattatggaaataaatttttgccgatagcaaaaattgatttttttttattcccattcaaaaatgaataaattcatcgccattttttatttaatcacgacaaaaattcccccatttttctgccattcgccacgagcaaaaattataaataaaaatagaaaaaattattgttgtaaattgggagggtcaattgagctcggtcaaatgaagaagaccttggaaatttttagagtgttcgccaaacattttgcgattatcttgcggatgtgtgtttattgatgttcatttaatggaccaattaaagggaataacaaaatgaacaataaaaaaagtgtccaaaaaaatggcatgccgaataaaaaaattaaatttaaaaatctaattatgagtagggagtccaattatatgcacatgcatatttttttcctggactgtgggaagcctgaaacgcacgaaaaacatgtttttagcttggtttgaagcttctaggacgtatttccatatgcatattttgcatatttgtgcatatttcgcgatttatgtgcatatttgcatatttgtgcatattttggcatttcgtgcatattttatgtgcatattttggcgtttttccaaaaaacctctaatagatcggcccccaacagaca

SEQ ID NO: 8843 - DNA, 1500 bp, Heterodera glycines
aaaaaaaactataggcccaaaaaattgaaaatgctctaacattgaatggccaagatacccgcccttcaataaactcgcgcattttgcttgtgaatgttttggtgtcaatttgacgaaaatgttcggcagtcagaaacagaacgatggaagatgaatttgttaatacctatttaacaccatcaccatttaccattttgacaatttgatgtgatcacacggaaaggccgccagcgccgctcaaatgcattttgaattatggggggggggggtggcgactgagcgggggcacgcactcatcgcatttacgagaagaacatacacttttactttatgcatattaatggagggaataaaacatttaattaaatcaaatatttataatttaaaaagaaattttcatttttttattgaaattgtatatttaaaaatgaaagtatttgatttcaatggcagttaagcaaaaaagaaattgaatagttcttgtgggagggtagtaagtaggtaagtaccagggatggcattccgaggccccaaaaattttcggaaatcggaattccgaccctaaaaatgtcggaagtcggaaatcggaattccgtgccatccctggtaagtacccgatgattttcctatgcattttattcaaaaggaaaatgaaaattttattagaagaaatttccctggaaaagcaagctatggatggcttatcttctctgctgatgtatttacaccttattttttccacggaaattattagaaggagaatttccctatgtcccaccattttcgccccactttctcaggtgttatatccctctcaattcacgtttgctgatgatcacactgcaccccttggatcaattatgatcatttgtttgatcaattggataacaaattgatcatcacgggggaggtacggctttttccccttccttagcccagtgtgtgtttatgcttaacgtgagaaattgcttttacaccatccgccgccgtattgttcggttcaattggcttttccccctcccctctcctctgggccgtccccgttcccatcccatcggcccctacggcgacataaatcattcccaaaaatttttttaatggggtcataaacattttcggaggcctttttgtcctgatgtgctctgctctgggattagtatatgtgtccagcagtcagcaagcagtccattagtgacttagaggaggaattgctgacgacgactgctgctggtggatgactaaactgacggatgactgactgtttgttgttgtcggatggattagatggtgttggggctaaaaatatgttatgtgtacaaattgatggcgctagtgaatgatggtggtgcacaaaccaacattcactttttttgtgcaaattgagtctgatttattttgttaaatcataatttataatgtcaaaatttaaaaatgggatggtatagaaaaaaaaaattaataagtgagaaatggaaattttcttggctaatgtgctgggat

SEQ ID NO: 8844 - DNA, 2601 bp, Heterodera glycines
atggccgcttattgacggacatcgaagcaattgtcaggattttcactgcccatatcaccgaagagtgcgaaatatgtcggggaaatgctttcttctgcgaactgtgcacagataatcaggttaatggtgctggcttgaggaattagtacaataatttataagttccacagaaattactccgcaccacttttcagcgcatctatccgttcagcgaaaacgtggccatttgaaagagttgttgtgcagtctatcaccgctcgtgctttgaccgtgccaacaaacggtgtccgcgatgttttacgaagaaaggcgagaagaaaagcggtgatggaagagaatgagggggacgaggaggaagaagaggacggacaacaacaaccgtaggacagcaaacttttttatttttgtataaatcgggtcacaatagtcaaaataaaaagaatttattaaaggaaagtaaataaatttggaaaagatttcgtacacaaatcaacgtgttgtaattgtcgcaacttttgctgaaagacccgagtcaatgtcgcggacaacgggcacaatgtggtcaatgacgtgggcagcgttcatcgatcggccgacagactaaaatattttttggaaattgttttgtaaaaaataaattcgacctaaaggtccgtagcgatgcgttgcgcaccaaaagcgaagcggcctccgccccgtccagcaaatgctcggaggaataaatgtcggcatctgaggctttccttgcctaaaatacgaaaagggccgtcgcgccgctgagaatgtcgccatggccaccgcaacggcgcatcgaagtttccgcttggacaattcgcgtttgggcggcgtaaccgttggagactatgtcaatctctctcctaaagtgccaatgacaattgttattgaatccaaacctcatatatttttcggttgcgtttctgtgccaccgaccctttctcatcacaggcacttccaaatctttgccaattgttccgccatttcacattgaattttcaattcgtccgtgtcctctcccttctgctggttagggaacatttgggtataaacccgaacaaaatcttaagaaacatgcattttgtttgctttgcttttggggtgcgttttgcctctgtggtttggcgtaatgatcactttgtctgtgcaccctttgaacagctgcgaacattctttgacgaagaacagaccgtccgcgtcaatgaccaaacaaagcttgaaaagcaaagaaaatgatgattgtatctcaataattagatggatttagattggaggggaattacattttgtttgctcctgacgaaatttacgccgtccgccagcaaattttgtgtgtgtttctgtcggccaagccccggcccgaacaccagcacgtccaaccgctcaatgctgtgtctattcgtggcgaaatcggtgctggggtaaacctattaaggaggagggcaattagcaaccccaaccccaattagttaactagtcaacatgaaaacccacgatcagttccggactgtaacttttgatcaccggagcagcgtcggaatgggcgtaaacaaaggcctaatcggcaccgattttcattggggtgatcgaagcgaaataaggcgcacctaacggggaaaagccataaaaatgcattcatttctctgcaatatgccaccggtgtagtcgggcgaaccgccgatcactccgcttttgccacagtcgcccttgcgaaggtgtttgccgaggacagggaaaaggcgctttagttgtcagggtcagtcggactcataacaaacgaaaatatcactggatctctatatctgcgcgaaagcaggtataacaaggctgtaaaacagtgtgagttttgaataggagcacaaaaaaattttttttttgaaaattgcgcaatttggcgttaataaatttgatgtctaaaaatttcgaaaattgcgcaaattgacatttttcccctctttaagtgacgcggacggaaagacgccgcccccacgcggggggtggcggacacgcgaaatgtacggctgtgtgacacagggcgttagcaggtcttgaacacatggactctttggaatggctttcatgggacagaattacattccaatatggtatcttacgtgtgtgtcgaatcctctaccaatccacgtccgctcataataacgcaaaaatttgggaacaccattattatgttcaaatttgtctacaatatgtcctataatttttttaaaattttctttctttacgtttctatgcatgcctgccaagccgataaatagctctcgaacgtccgctggtgaacaaaaggctaaattagaaagacatttaagcgacactctgaattcttcgtgtgtctttgtaaggaactgcaacgcctgaactctgaatatttctccaaattgactgcataatatgaaaatatcactcttgaattgttgcaggatcttaaaatcgacaaaatgtcttaatatcatccatctcaaagtcaccacatatcattttcagttttggagaattgcgcactacattttggatacaatccgtaaaaaaataatatctctgcagcagatttcttctgactaattatttgaa

SEQ ID NO: 8845 - DNA, 3614 bp, Heterodera glycines
aaaaacgtaactgattcaggaaaatgttctcttttttgccaaaaatggaagcatttggacctgtccggtaacccggtgaacacgtgaagcccccacatttttttggtttttttttttttgaatttttttggtgatttcgaatcccccagggctttccccttttgtccaacatttggacctttcgcgcaccggtctcttttcgctgcccaagttgcccaaactgtttaccctgcgttatttgaatttggtaggcaattttctgtacgaattgcccccggcagccatttgccctttgctgacacttcaaacgctcgacctcgcctgaaacaggcacaaaaataacaaaattatctttcctattagcgtattattattatttgtgttttatttttttttggagattggtcgaatgcttaatttaagcagtaatgtcgaacagcgttggagcatcggtcgcctcacaaaagacgtttttgaacgaatggactctttggaatggctttcattggacgtaattagcccaattatcatttttacgttaaattttaattcagttcaacaaaatgcttgaatttcccccgcaatactctttctccgctgaaccgacttaagcacctctcgatggagtcaaatttgttgcaaatgttgcccaattatgcctttcagtaatattaaattgcttttgctttttaattacccccttttttggtggcttgtccatcttcaatggctttcattggcccgtaatcggtttgtttaatccctgttcatttaattaattgccatttcctaattctcaggttgtcttcaattaatgcgaaattgttccactcaacaagtgccattcaaattcggtggctcaatttggccaataatcggatcagtcggatggagacagccgcttttcaggccccacttggaaatgttgtccattgaacatgtgtcttttcctgttttagaatctgccgaatttggaacgcctttatttgtccaacaatcggtttacaactttgccccctcaagtcaattgatcatggataattagcaataatacttttgtgtcatttcataaaattttgagtttagattctttcagcactgaagaatttgcgacaattgagcttggctcacaatgacatcaattaaacgcaggactttcaatgtcattcgaaagtaaaataattaatttaaatttattattttaaaaattttcagattggaaattcaatcggccaaacattcgcttcggtctttggacataaacaacaacaaccaattggaatttgtccatgctcaaattttccagggctttgtgcaactccgatccgttgatctttcgcacaacgatttgatcgttcgtaattaattaaattgattctaatcaaaagaatttaatgattttaattagaacctctgtgccggctctttttggggcagtgtccgtttggagcgaattgtgctgtcggaaaacaatttgcgcacaatttggtggcactgtcagaagcaaatccatctaattaattgatccttttttccgattagactctgatcgttgagcttaatcttgccgggaatgttcttcactcgttggattctgttgaaaattttaaagttttattttgtattttaaaataattaagggagtttttggccaaaacaatttgcagggcttggacctcagtcttaaacaatttcacgttcattccagtccgagcattgtcatcggtccgagcaagccttacggtgctcaaaatgtgaaaaaatggagtgaaagtgctgaatcggagggcttttgaaggaatgcgcaatttaaattcgttggaattgggagaaaatcgcatcgaaacgctggaagaggcattttcaaaggaaaacagtgaattaaaagcgtaactggttaagcaaatgttctcattttttgccaaaattgaagccttttgactttttgaatttgtcgggcaattttttgtatgaattgcatcctacagacattgaccgtttgcctgcacttcaaattaatggctaatttgggtgattttcagttggagtctctttctctttcccaaatgtcgtcactttcgcgactccccgacacttccgaaattcgcacatctgctcagactacaggggcttgagataataccatttttgtattaatttatttacattaattttctttacagatcattccaagccgttaaaaattggccacagcgaaccttcaattattgcgcgaattgagcataactggtgcaaaaaaaatgtcgaaattaaataaaattaaagcttctttaatttctgaaatttcagagtggccataataccctcggccaattgcgcggctttcgttttcgtctctccgtccaaaacacgcaaatttcggcactttctccccgaggcgttgaaacatttggtcggcgggccttttctccgtctttttctgaggaataatcgactgaaccctagggtcggagtgttaattaagacgactctcatacacaaaatttgtgttaaatttgctctgcagatcactgtcaaatttatcccttagataggacaaaatggacgaagaaaatcagcgacaaagtcaatggcaaaacggaggggaaccccgacactgcaccaacaaagaagcggcagaagggggttcaaagggagtcgctgctggtgaacagcaatagccaatcgacggacacggaggaggacaacgccggcgcaactccatggggtgctacaaaaacagcaatgggcgtggagatggacaatcacaggtaagagagagtcgtgaatcggtcttgaccaaacacattcccacaacggctacattcacaaaactgtgagtaccatacattttaccagcgaaaaatttttcggcattcagatcaaaaaccgtgtaaagcatgggcctttttttttttgactacattaatttaaaaaaaaaaaaatatatatatatatatatatatatatatatatatatatatatatatatatatatatatatatatatatatatatatatatatatatatgtatataaatatatatcggaattttcgttttgttaatgctgctatgtttaacaccgatcaaattttcacaccttatctgttccgcggatcaactaaagtgtttttacatttaaacatttattcacaataaataatcgtcgcatttcataattttaaaaaaagttttttatttaattaaaaaaaaaattttttttttttagaaaatgaatttattttttgcaacgcttctaaatatttttatttttattttttcgagtgattataatttttgtctaaaatatctttattcccataaaaacgattttggggtgccttgttatagcaatgggaacgccggatgttcgtttgtgttaaccccccttggctaaacaaagatttgccaccggcccgaatttggttttgtccaacgctgttggcggtttcgacaccagcaccaacttctgtgactaagaagcctgaaacattgccaattgggtcgggactgcctggggaaggctggtacaagcatggcgttttttttcatgaaatttaaatatctagggggacaaatttaaaataaaaatttctttattaaaatagctt

SEQ ID NO: 8846 - DNA, 1996 bp, Heterodera glycines
gggaaagggcgcaacttttcgtggcaaaattggtggaggaggtgaagcagttcgccagaatccggaagggatatggcaacgtgcagaaggagcgagaaaagaagacggcggaacaaacgacagcgtttgaattggtggcaaaattgctaagcgcggagcgcggcgtggtagtgctgtctgcagtggagcgtgccgaggttgcgaagcagttcagggcgcttggcttgcaggaaatcgtgttgaaagttgtgcttgatcgcatgcaacgtattgcaggagcgcccgaggcaaatgtggccctgaaagctttggagagactggaggaacgacttaaggcagctcaaatggaagaggaggccaagctgcaggccattttcaaaaccggagcgcccaagtcggagacaagccagaccctgaaaatggcacgagaagaagtggccaaactgcggaccgaagcgaccagggaagagttgctgaccttcttggccaccctgatggctcccgaagagtttgaagcggccaagactctgcagaaaatggcctccaaaagcacagccagcacagtggccaaggctccaacagagttggaagcagagtcaaaggcagaattggctcggccggaagaggcgctcggagtcagcgttgagaagccggaaagaagggaagcgaaggaagagcgccggatgagattggagcggcaagaaatggccttccagctggttcagcagctgttgagtgcaggacgaagtgaagcatcgctttcggaaaagcaacgggcaatggtttccgagcagttcaagcagttcggcctggaggagatgagcaccagcattgtgctggagcagctcgaagaagtggcgggcagacccgaggcaaaagtggcgctcaaagcgtggaagagcctggaagaaggactgagagtgctggctgttatggaagaacgggtcgggtttgaagcaacctggacgaccggagagacggagtcgggtgctgagaagacagtgcagttggcacgtgttgaagctgctcagaagcgagttgaagaagcgcaggagcagctaaggaccttcctgacagtgttggtcgggccggaacagttcgaagaagccaaactgctccagaaaattccatggcacacgtcagccgaataccgaggcccggaatcgcgcgaagaatggacgaaaattggccaacaattggccaaaatggaagcgattggccttgttggtgtggtgaagccactgccggtggtgggcaaggcggaagcgagccgaagaattgaaggacgagaacaggcgtttgacctggtcagaaaggtgctaagtgaagagaagggccagcagacactgtccgaagcacagaagttgtccgttttcgagcagttcagagaattgggcatggaagagacggctgccaccgttgcacttcaacaaatacagcaaattggcggaatgcctgaggcaaaagttgctctgagagattggacaaagctggaagagcatctgaaggccaaagaagcgtttgaggaagaagcgaagcttcaagcagcactgaaaacaggagctccagacgccgaaacgagtcgaacactgcagattgcgcaggaacaagcggctcagctgcgagtgtgccaattgaaagaggagctgctcacattcttggccaccctgatggcacccgaggaatgggaagcagcaatgactttgcaaaaatttgatgtggcgccaaaagccgaagagacgttgcggctgaagattgaggaacagcaacaaatcactgaacttgtggcagccgcacttaagcgtgaaggtgcgcagattgttgtgggagagaaggagttggcagtggtagccgagaagttcaagcagttcgggatggaggagagaactgtgtgcttggtgctggaacagctccaaccattggccactgggaaggccctgctgagcgaagagcaaagggaaagggcgcaacttttcgtggcaaaattggtggagga

SEQ ID NO: 8847 - DNA, 1024 bp, Heterodera glycines
ctcaagattttaataatttttgaaaattggaatccgaaatggcaaattgttcattttttggcgaaaaattcacaaaaatttactccccggcgctgtttttgagggaaaatgccaccaattttactttttaatttttacggtttcacgtttcacccaccattggggtcggggcattcaatcaatccaaccaaaaaaaaaacagtcaccacaaacctcaatgtgctcaaagtggccgaccgcaaatgccaccaaatggtggacatgcgtggagtgcgcgcaaaagagaccagttttttggttcgacggccaccgaccgccgcctcctcctccgccacaacgttcatgttggacagggcggtcatgtgcttgtccacctccaatttgatgtcgaattgagccttgtacgtgggctcgtcccagcaggggaaggcagaccgggcgtaagtgctctgaaaatggtgtccattgtttgaccaattggaaaacaaaaattttttttttgattttgcttaaatttcccaaaattcctccccatgatgcgaaatgcaaaaaatttctattcaaattagctcaaaaatgcaaaaactatatgaaaaagtgttgccaatcactttccggatgaaaaattaatgctgccaaaatttgggccaattttttaagcaacaatatttctccattacgcaaattatgtgtacaattttttttattattggcatttttaacgctttgacaacaacctcaaattgagtggacgccaaaatcttttcgttgcccgcactgtctttgtacgtcgacctgtgaaatgggaaggaaaaaaaattacaaaacattaaaaatgattgttttgtgtcagaaaattacattaaaaaattgcgcagcatttttacataaattttgaggaaaaaatgatccaaatgcaaaccaatgtccagaaaaaatccaataaaaaaaaaaatttaaaaaaattttttcacgattttttttccaaaaaatttcccaaaaatcatgaaaaactttccagcct

SEQ ID NO: 8848 - DNA, 2590 bp, Heterodera glycines
ctgaagggtgagcagcgtccatttggtgtccaactcgcgcttcaaatccgacagaactgtgcaagaaaataataataaaataatgcaaaatttgaaaaaaaaaattttttttccccggcagcgtttgggtttaacagcccgaatttttttttccataaattgcgttgagaatgcaaccaaagttttatatgaaaataaattgttgtttaaatcaatttttacagtttttgcattttttgggaaaaattttagctttcgtttgtttccatggtcgtgcaaatcccatgagttcgctgactcgaaaactgtcataaatttatgaatttttcagggcctgcaatttttttttgttgtaggcaaaattttgtgcaagaaaaagaaaatggcgtaaaaaagcaccgccaccactcgggattttctcccgtcgtttcccccgggtcgtcccccccccccgccgaaaaatttgaaaataaaattttttttttcgccaccactcacccgtcccatcctccaacttcagcgacgccttttccacctccaatgcacccgcgtggagtgtcaggaaatttgttggctttgtaatctgaaaatggagagagggaaaaattaggttggtgaggggggaggaaagtgaaatttgccccaaaattggtggggtaggtaaatccttcggaattggtgcccaaaaaaagagataaaaattttctttaattttttaaggtaagaaaatgtgctaatcatttctacactattcagaacgtacgttttaacgccaataaattttacaaaattaatttttttttttttgaaaaaatcatttgcttgatgcaaaatcatagatggaatcaatgtttatgtaaatacgagcaggtcaaggccattatcggtaaacttgggtttttctggacccgaattcgtgtccaggaaatccaggtccaggcttttttcaaaattcgggtctcaattttttttaccgccgggggacactaattccgaaggattgccccaaaattttagtgccaactaacctcaagatggatgatctcgttgcccttgaatttgcacgtctccatgtcgacactgagcataatttggtacagcgacgggctggccaactgcggcaatttgctgaatttgtccgaaccgtttgccatcgacgaaaaaagccttcggattattgcagacgaaattttgaggtatttaaaaaaggaaaattgaattgcttctaaaaggaaaatgagtaccaaatgttcagttttttgcacaggtaattaattttaaatgttggtaaattcggcacttttacgcttggggccaccgaaaaattctttgatcatacgtatgtaaataggaagaattcgatttcctttactctattgagttacagtaccaatcaatgcatcagcaatatttgcaaaaattgaaaatttgaattttttcaaatgttcgaatccgggttcggggttcgaaattaagtcaaaagaaggtcaaattcgtgctcagcgcatcaaataacccctaaaaaagtgttttttgaatttttattccttttttttgtgggaccaataatcttcatgattgccgaaaagagtgagaaagagaaaaaagtcagcgaaaatgtcgatcgtaactatgaaaaaagaaattttataaagaaaaattgccttattttttaacaaacttcattaaaaattccaaattttctacgatcgactaaactctatttgtgaaaaacttatcgatcgtaagaggaaagtgtgtaaaaaaccccaaattttgccggcttttaaaaaattccaaatttttacgatcgactaaaatcaacattttccctttcgtctataattgtctttaaaatttggcttaaaagcataaaattggtcatttttaggtgcaaaaaaaaaatttttttttttttggaaaaagtagcgtaaaaaaagtggtatgaaagttttcctaggcgttcaaaatttttaaataagactggcagaaaatttttattgatctactaatattttggttggacaaattatgattttgctttgtttgtttgttaacattagagctcggggaatttgtgccgaaggtaccccctccactttttgaaaaaaaaattttctcgagaagtcattttagggatttcagggtcgaagaacacggacaaaaatccaaggctgccaaaaatggcctagatttattaaaacggagcgggaatttttttttaattgatacagtactacttttgtccatttacagtaatcgagttattacaagaaggtggctggccaaaataatgatgacaaaactgtgcacacctctccgtggaattacaattccaacaaaatattaaatacattgaaaatgaattaataaattttaataatttctagttttttttcttcaaaagtttatgataaaaaatctaattaaggtaacttggcaacaattttaaagaaaaaaaaattaattaactaaaaagaagaaaataatttaaaattataaatatttttttcattttccaaaaatcgctgaaattttttccgtgagaactgtcagaaaggatgtcactagatgatagacaactgatgag

SEQ ID NO: 8849 - DNA, 1722 bp, Heterodera glycines
aaagtgattagaaaatatcatgccaattacgaacagatgatgaataactggaatatgaaaaataattgagcaaattaatataaagtgatcggtaatgattaaagggtaggtgtaatcaatagcatttaaaatggagcaattaaaatttatttactataaaaaagttggcatcgttgagcagaccggcaaaaagtcgccatcgtttgcaatctgattaatttaaaatttggagaaactcgagagtcttgagtgtgtacaattaatatgacatttttccgacgtcatttcattttttcgtttgttaaatgatgtcagtttttgcgcttttcagtgtcacaatttttggcactttttggtgtccaatttcacgccctttttgaggagaatgaaagtatcaaacaaaatgagcacaaacaaagacaataaataacaaaaaatgaaatcattttgatgaaatattagtatgtagagaacggattttgcagcatttgctgaaattttttgctaacttggggcgtgctaataagcatgaaaaacgcatttctaacttagtttgaggcttctaagtccatctttttcatgctgatttttgcttaaattggtattttcgtgcttaatgctgagcaggtaattttggtgctgaatttagcattttcattcttatttttgtgcttaattggcatttttttgtaaaattttcactaaaacaccgcctcctagcaataaaaacgaaaaatccacccctaagaatcgacctaaatttttttttttaaatacacccctaaaaatggaaaattttctcaaaaatccaatcctcaaaaaattttttttcttgaaaaattgctttaaaatgtacaaatttttgctaagaaaatattaaattcagtgtgaaaagaaaaaaaatgagaatttattgttaactgataaaaatttttgcctaaaaatcataaaatttttatgcttttttcgatttttttgtgctgattttaccattttcatgctgatttcgtgctgaatttagcattttttgatgctgaattaagtgcttaatcatcattttttggtgatgaaaaatccggtctttaaatattagtaaaaaatattttatttgaatttttgcttaaaattttgaatttaaataattaagtgattaaaaataatcattttaaattagttttaatgagcatacatacaatttttgcgaaacttgagaccttttttatttaaaatttttaaaggacggcggtgccgatgggcgtcgtcgggaaaaagttagtaagttttaactaagaaaaatttcaatttcaaaattttcgtcggcgaccctccccccccccctgccctacctcttttacaccggctttttctcattttccaaaaatttttttcgttttgcattcatttttgttacaacaaaatgatagatttattttttaaaccatccaatttttatctcttttttcaaaccacaaaactctttctctctctctctctctacgctgtagggattaaaatgtgtgccaattgttgtacaacaaaatgtgcacttttctgaacaaagagtgccgtgccggcacggcacacgacacccctcggggggagggaggggcttttttgtcggcactcaataaaaaatgatgatgagatttttgagtttagaggggaaaacggggaggaaaaaatagttgtcctgctaatggatgatgatgatgtgaagaatgg

SEQ ID NO: 8850 - DNA, 725 bp, Heterodera glycines
tgcatgatctgatccaggcaatgtgccaggatctgatcgaccggctcgatctgatgtatcgggcccggttcaagaagaaaatattgaacaaaactgatgtgaaaaagttcgcgcaaaacattgtgggagggcctcaatttcgtgatcagttgaatgatgagtgggagaagggcgaacagcagcaacaacggcgccgacaaaatgccaatggagaggacgaggacattaagccggtagaattggaaattgtataaattcaaacactctatgaattactgtaaaaatccaataaatttggaaaaaaatccatttcaatgttccaaaattgtttgtgccttagaattccggctttcgcgtttatataatttttgagattctgaaattacggtgctgtgcagaagttacaaaagtatcaatgttagtaatattaaaatttatttattattttatttttatttgcgaaataataaatcataatttagctcgaacttagtcaaattaatgatatggggatattgaagcgatagctcgacgtatccactattattttatgtaattttaatgtcgaaaaatttagactcaataattttgtccataacttttttgaaactcaagaaaattttttgaaattttatagaataatagagcaatcttagtaaattaaaattgcttatttatgaaataagatgatagaaattcgacgtgtcataattatatggttatac

SEQ ID NO: 8851 - DNA, 2790 bp, Heterodera glycines
taaaataataattaaattaaatattactaacattgatactttacgtgaaattacatctctgtaaatatatctatgcattattttctaaattacactcaaaatgcgacctcttatgtcctattcttttttcgaattttttatttttaaaattccaaataatatttttttacttcatttttcaatggtcaccttttcaaagcccttaccttcaaagttattttttcatatttatcataataatgtgttcttttgtcacaggagtggacattttggggcgaaacaagagaagaagacatgcgaaggaaggtgaccgttgcactgtacgaagaccacgtcaaggtgttcaagttgttgttctgggcacgcttttatgcgcttgccatcgctttgcaacgaattccagtggaagtgaaagaagtcagtggacggggggggggcaagcagtagttgctgaggatatgtacagcaacagggaccggattaaatgcccaaaaaatcttagaaattcggatttgtggggatttgcgcaaaacccggaaaaactaaaatttggatccttgtaaattggaatttcgaatttgatgacaaaattttttgaccggttttggcatcaaaataagtcggggtttctgtcccccccccaaatttggtgtttaactcttttgtcaggcaaaacccggccaaagaaaagaattatttttgcaaattccatttcatattctgttctttaatttaaactttcatggctttatcgagaaaacgtgcccttctgacatgcttaaaaatagcggcttatctattaaggatgccgtgccgcaaaagatcacaaaagatgagggcgctaaactgttcggctacaatgactatgccgatgtacaaaaggaagaagaaaatgccaacgccacaaccaaagaattggctgctacttttcgtatcgatgtgccgcgcaatgcgtggcctgatgaaacgcgccgacgtacggaggaattgcgcaaaaagtttgaacaggacatggacattttggaggagtacctcctggccaatttcaaccatcaaatgctctacaatggacaatcacgcttttaccaggtaaaacaaaaaacacagaattactttatagcaatttagctttcattaaaatccaaaaaagaccccaacggattgtaccaaattttcgaaaaaattttgccgatgaattggcgccgctggcctccagtaaggtcaccagacaggtgtccatggagtttcggtatgaaatttatgtgcggatatagcagatagcaccactgggttcttaagaaaagggtttccttttttgcaggatgagcctgagtgtcaagaccaaaaatgccataattgttagttcattttacttttctttcctctgtttacgtcttttgcatgtctccaataattatttctttaaaggaataatttaaattaattacaaattaaatgctttgattctcaaattcaggtgggctacgaaacgctgcaaaagttgggctacgatgatgtgctgcaaggggccaaattgcgcacattgttggttcatgagatggaggaaatgttggaggaggcggacaccggaggcaagagagaaaaaaaattaaatttaaattttataaataaatttttaaataaaatttaaatagtaattaaaacattaataattagggttaagaattgtatgcttttgcatatttttctgcgcatattctatgaagaaagaaatgggctcaaaaaaagcatttctacattaaaattttttgatttggtgaagttttttttagtgatataaatgtatattttggggttttctagaataaatgcatattttgccatctttggatttttgagcatatttcggctatttttggcaaaatttcactaagctttttgggaattaaaaaaaacactcttaaaatcgaaaaattttttggaaaaaatttgtttatataaaaaatagaattttataataaaaatttaaaaaattcaaaaatatatataaattaagaaaattaaatatttttttgcaaactctaaaaaacctccttagccattttgtttagtgtttttaagtcaattctgagttttttacgcaatttttggcattttttgagggttaaaactttttaaaggcatttttgtgcataattgggtatttttcgggtttttaggtcatatcaaaatttaacttatattttcgataaagtataatgcgatttatttaaatagttttttactgttcattttgcaaattgtctttaggcataaattaatttgattaatttacatataaaaatttaaataattttatggaaaatgaaaaacatattccaaatatattttttaaattcttattaaataaaatgaattttaaattttttgcacttttaagtgaataaagaagacgaagattattcactgaaaactgttcacttcacaaaagcaaatgtgcaattgttcaagaaaggcaataatggaacagaaaagctaaagggcatagaaaaatggcttcaaaaaattttcaattggttggacggactcgtggacaaatgccataaaaaatcgttgacaaaacgaaatcggatgcaacgatttttattcgagtgaatttttatccaaaattaaataatcaaaaaatttcaatttaaaaataaataatggacttaatatggtggatagaggactatgaactcgcagaaaaaaattccagttcggtgattccgttcccgtcaagcacaagcttttatttcagaattaccatatttctcgaaattatacacc

SEQ ID NO: 8852 - DNA, 2524 bp, Heterodera glycines
taaatttatatttttaaatatttaacgattatgattccgatattcctgactattgggcaaaaattccaaaaaactggacgaattacacggaaatatgtagtatttttaaatgaaattttggtaactattcattaagattcttaaaataaattcaaacaaatattaaaagattatggagaattttatcgcctacggttacgtcctaattagtttataaaattaatatgaaaaggtcaaataattatgcccaagaaaataaaattaaaaataataatataaattaataattgaagagatatttttaatgttaagagctccaaggaaaagactggttacaagcacaaaaagcaccgattggagtcaaaaaaggcaatgttcggcttattaatggaagttgacagtgcggttgaggacaacaaaaacatcagagaaaagtggcgtagaaaaggggaccaaatttgggaagaaaacagggaaaatgaaatggaaagtcagtgaaaaatgaaaaaaaaattattaaaattattattttatttaaattttcaataattattaatatatttaaattttcatgtttcaattttgggttttgttatgcgtgaaacgctcattagaaggtgccagccttacgaaatcttgaatattttaaagctttcatattggacagtttaataattaaaaaaaaaattcaatttccctgaaaaaatatcaaaattttgagaaatttttgatttcactcaaattttggtgaaccgggggattttattggacttgcgccataataagcacgcaaaacatcaattttacttcagaagtttaaaaaaataaattttaatccaacataatttttgttggattttagaaatttgggcagaacagatcgaagcagtgaagatggacaagacaaatgaattgtcaaacgatgcgtttaagcaagttaccagcatgctgaaagaaggcaccgatatgccaaagtggatgatcaatacgccaaaagattcaaaggtggaccaaattttaaaattgaccattcatcaaattttaaaataatccaaaaatttatttaaactaaaatctgtcttcattatttttgttttggcatgaatttgcctttgctgctgatgcacgtattgacaaaaaaatcaaaaaagttagatgtctatcgttgtgcatattttttttttgcatttcttttaattgcttttaagttgttgttaattagtctaacaaataagtcaaattcgttgtaaacttttaaaaatattttaaatatgctttgactgagcggcgcaagtgtcaaggcgcaaatttagcggcacaaaagtcgcaacacgtataagtataggtgcacatccgtaaactttatccttatctctaaaatttaatttcggttcttgtttttaggcaaaggctaatttttgttatgccaaattctcatgttccttaactcgagttacattttcactaacaatcaatttggttcaatgaatgactaatgagattatgacataatcttaggaaaccgaaaatttaatgacggaatgtcaaattaaaaaaatttttagagttcatcaaacaaaaatgcggggacatcctcgagagtggaaagcagcaacacgagaagacgtggaaaacgacgcgtaattcgcaacgcgacgacaccagcggacaaatcggtaaaatagaataaaaatttaattaaaaatatacaaaaaaagtatttggatgttagggtgaaaaatcatcttctgtataccgtaaccatttggaaaatgtccttattaatttttagtcattttttcgaaaaatcaagacttatggaaaatcaaaccgaagccttttaaaatacctgagctcactattcattttttaaaattaacaggaaccgtttgagtaataccgtacaattaatttgaaattaggtagaaagtttggataatacaccgtcattttttttttaattttaggaaattcgcacaccgtttaccgaagaaacgctcgtacgtaaaaagcgaaaaggcgggtttggcgcagggcatgctgccggccatgcaatgtctcgttccttttctcatgcgcattattcggccccatactatccgcacggcggatcatactgtatgggctaccattaccattcatcaacttattactactactcgccttatcacatgtcacacaaacaagtaaaggaattataaaaaaaaataattatttaattaatggcctaaccgattattgtcaatgttattgcactatgaagtcgaggcaaaagtcacaacttgtgaaaagtttcgagttcatactgcattggtctcgagttcaagacttggacactcggagtaaagactcgttatcgagcatccattaatagtttaaattattcttatgccaacccaaatttatgctggagtttatatgtaaaaacactagaaaaaatgtattcataacggaattttgaagaaattgtaaaattaaaatttagttgtacattttcgattttataaaaaacggatgttcccga

SEQ ID NO: 8853 - DNA, 1284 bp, Heterodera glycines
  unsure (1)..(1284): unsure at all n locations
atatttgttttaagcttaaaaatttttttcaaattgctaattttaaacttttttttcactttttaggtgctggctgaaatttggacattcgttaacattctactgatcttcattatcccgccaatttcgtttgccttttgtgagttggattgcagcattccgagttcgtcttcccattcttcccactcctatggcggccgttattcctataactatacggcggcacaaaaattgcgcggtgagttccctaaactaatcaataaaagtgaattgtgccaaagttccgtttctnnatgccttttgttgccgtntttttgggncctttttgnnnagttttccgncttgccntntttgnnnttttcnttccttccgngngttttggtggnntttttcnnnnnngtcnccnncttttntctntttgtnnntttngccttttcccnccggcttnnttgncnnncgctnncctttgnnncccttttntccttcnnnnntttncgcnnnnnttctttttngnntgngctgttncnnngtnnntnnntnnttgctttggtnnntntnnnttctttcattactccgaattacttttaagcatagttttcctcatcattccgccccttctcccctttggcttttgcatttcgcacgataaatgggtaattttttgttgttgtttttttgcgtaaaaagagtttatttaatgttcaaatgggttttttttttgcaaattttattattacttcctttgttgttacttaatcatcattttcgtgtatttacttaaaattcagtacagtacctttcataggtcctttaaatgtattaaaatggtaaacaaaaagccgtaatttagaaagggaagaaaaacagagaaaaaaaagagcagaaaaagaagcagcgcgaagaaggcaaaaggaaaaggaggacgaattggactatgaaattgcacaatgggatgaagagataaaatttggcagcaaaagtaaaaaaaataataattttaattaattaattaaataattatttaattgaaatcaaaaaggtaatcgacgaacaaaacgcggcgccctttctgcggactccgacggaatgatgaacagcggcaacggtaacactgtggaatggtaccaggaggaggcatttggcattagcaaaaactttggtaaattaaaaaattcgcacttttgaaattaattttataggtgtggttatcctgcaaatcttttatgcctaccaaatgtgtgaataaagaacgtttttgccctgctttaattccacacacaaaat

SEQ ID NO: 8854 - DNA, 2294 bp, Heterodera glycines
atgagcaataattaagctctagaattactctgattgttgaaaattggtctttttaatttttttttttttaaatgcaaaaaatgtgaacacaattactatcaaatcttccccaggatttaatccgggatggcaccatcggaaaattgtttttttgattttccctcatttttaacagattttcaccaaaataggtaattttggtggattttggaaaatttccgcgtaatattttgggaaatttttggtgaggtagaggtaggtcttggaggtgcaccaatagtaaacagttacaatgaaaaatttcttgtttttttacaaaattaaacaaaattaaatttactacaattagagccatggttaaatattaaaaaaataatttctttttcaattattcagatggttgcattgattggcgacaatgtgccgttttttacccggaagcgacatgttctggtgaaggaaagtgccattgtccggccggcatgcatccccagcatggcacgtgcgtcgagggcgaaattattggtgaaaaattaaaataaaaaatattttttttattaattttaaacaaaaaatatttgaaaaaattatggttaaattaaaaaatttattttttatttaattgtaaatatacaagaacttttttaaagaggaaaaaatcaaaatattttaacaattatttgagattgatgacaaataataaaaatttaataattaaataaattaaagtatttttttacatgaataataaatatttaaaaatttattttatatgaaataaattattgaaaacaatcttaaaaacttatttattggtatcacatttttataagtaacacacatatttagtattagtttaatttaattaaaaaatatatttcaaaaatttcatttattataaacattgcaaattagatttttacaatttataacaataaaaaaggtgtccaacatgaccaacccccacaattgtcgggccgcgtgccgttgctgccaccaagccaaattgaccccggaggcgacacctcacccattgttgttggcattgccccaggcaaaaaaaatcaaatttttatttttaattaccattttttattaaattttagatggcaaaaggcaaaaaataaaaatgctttttgaacaggttgaaaatgtgggtggaaaaatgaacaattggaagactcctaaccttttaaaacggtcaaacccgcataaattttcattcgaaagctctgggattttcccaagaccctagtcggggtactgtaatttttttgtttggaaaatgcaaaagggacatggcgaaatactttatttcttcctaaaatagaactcccggggcgctttattctccaaccctcttcaaagagtgggctcgaatttaggaaggggagggactgtattttataggaaatacggtaatataattttttaatgcattttttaaatgtaatattattatttaataaggcatcaatcaccgaccgactgagctgggcaagtgccggatttggttctcgcacagcaccagctcggccaggttttgcaggtcgccaatgttcagcggcagttccgtcaattggttcccactgatgtccaacgtgcgcagcgcgcggcaccgcaacagttcgtccggcaaccgggcgaccatgttgcagtgcaagtcgagcagctccaggctgacgagacagtccattttgggcggctgcaaaaaaataaacgcttttttcaatagaaaattcgggaaaaaatctaaattaaattcggacaatggaacattcgagggattgaaaaccaaaaatatggaaataaataaacaatttttgggcataaaaatgaatttgagggactgaaaaatggaagcaaatttaggcaatggtccatttttgggggctgtaaatgcggtggaaaataatttgaaaaataaattaaattatattcggacagtggaacaatatttgagggactgaagcgactgaaaccccccccccccccccaacaaaaaaatgggaaaattggtgagaaaaaaatggacgccgcctacccgatgacaatgtttatgcttgaaagcatttgacaaacctcaaaaatttagaaaagaaattttttgtccatgtacaaaaaagggccaaaaatgtccgaattagcttttttgaattcttgtgacaattcgatagaatgcagttgcttgttgttgtttttaaattcgtggttcaagtgatgtgaattcttgtttttgccaacaaatcttacgccaaattgtcaaaacttgtctattttctgatgctggaaaa

SEQ ID NO: 8855 - DNA, 2589 bp, Heterodera glycines
aacacttttatccttcccaatgttgattttaaaaaaagtataaccataattaaaaatacgtatatctggtttcgaatttgcacaaataattaaataacgtttgaaaaagggcacattttaattcgtactttaaaatggtgaaagtaaacatttaaaggtaaacatatgctttggaattgcagcaaatattaatgaaaaaataataattgacatttgattaaaagtgattggagaagaataggaataatgattgggggggggaaggagagaaattacaacataataagtgaatgaatgcatgcataattagtaggtaattaattaattgctttatgaatgtgacgatgatttaaaataagtacaagaaaatgcgatggaaaaatttttaaaaaatttgccgtgcgtccgagcgtactcgaacttccatgtatttaatcggtggggttcagcgctaccgactgcgctatatgcacgacaacacaagttaatttaatatcccttttcaatgatatttaatagtgtaacgaaaacaaaaataattgtatttaattaattgtttcttgtacaatttttcttgttaaaattttaagggtcaaaattttattatttaggttttttgttttaatttcaatattttgaggaagacaatcaaaaaaaaagagttgaaaatgcaaaaagaaattaatatttttttacgagaaaaacaaattggtaaaaactagaaaaaaaaactaaaaaaagattttaatttaaaattcgttggaggggaaatgaaccgttcccaaaaagacaaacaaaattgtttaaatttacccactgaacagcattggctacgacatctgcacgcaatttcatttcgtctgaccaccaaaggaattgataattggattgaataaacaaacaatcatattaatctcccgttagcccttgggaaaggcaattttataaatatttttttttgttcataattggggcgcaaatgtgcggggcgcaaatgtaggggcgcaaatgtgtggggcgcaaatgtaggggcgcaaatgtaggggcgcaaatgtgcggggcgcaaatgtaggggcgcaaatgtgcggggcgcaaatgtaggggcgcaaatgttcagtcaccatttcgataactaaaaaaagagtttttggtgaaaatcagtttaaaattgtcaaagagacatttaagacacaattgaaaaattgactaataaattgcaaaaatgcatatcaatggggcgacataaatcgatacataaaggacgaagactacataatcgaggcttagctaaaaataaataaaaataagtcaaagcgaatcagctcaccgggatcaaaggttatttatctaaagtaagacacttaatacgtcttttaaactaattaataaaccaagaattcataatgatgaaagaaataaattaagaatcggcgccgccgtttcggcgccagcccatgtttttttgggtattacttttttctttgtaatccaaatctaacaatctttgtatcattcgaaagcccttcacatgctctacaagccttacaaaaaaacgaaaaaaaatttctagcctttaaaaaatgattaagaaaaacttcaaaaattttgacttttgaaattttcatgtataacttttttgttaattgtctaatcctgaagcaaaagcttagaaaaagcttctaaacatgttaagctttcgaatggtacccaactatgttggatttggtttacaacaaaaaaagttatttttcgaaaacttgggctggcacagaaacgatacatacccggtaaaacattcatctcggcaataaagaattgaaaaaaggatcgatggcatactaatcaatatttttctcttttttaaaagtattggaaaaataaaatcattcaaaatgggaaatatgtaaatgtgatgtttattaaatccgcatgagacacaaagagaaaatattttctataaagaataaacgtaaaataaattaaataatataaatttacaaaaagcttgactgcatgggcacattacatttttataaattttttttgatttattgaaggttttagtgcatataaaagcatattttagggttttcgaaaataaatgcatattttgccattttcgcatttttagagcgtattttggtaattttttggaaaatattataagaaaaatgcgaaagcgaaaaatacacccctaaggatcgactttttaaaaaatacacccttataaatggaaaaatttttaactttttttaagaacttttggaaaaaaatttatttttataaaaatgtaagttgaaaaataaaatctaataaaaaatcttatcatgcacctataattcataaatttgcattttttaaataaaaatggcagttgattataaatagggcaacgatttctagtgaaaaacttttttttgctcaattgatttgaagaagcttaaaaaacgcatttctgcgttaaaattttttcatttggacgtcatttttcgtcactagaaatcactattttggcgttttgtcacttaaaatagtgaaaattcacttttttggctttttgtcactatttttcactatttagagattttt

SEQ ID NO: 8856 - DNA, 888 bp, Heterodera glycines
ccgatgaaatcgtcgccgccactggtcgagtcggtgccccccaattgcggcgcccgcctcctgcgcattcagcaccttttccacgaaaggacaaccgctggaaattaaaaaaaaaattttttttttttttggtttttacttttaaataatttgtacgactgtgactgacccgggaatattcgtacccccccccaaccccggcatttcgctcttgaaaattgaaaaaaaaaattcggaggttagaaatttttcataattttttcaggggggagggagaatgttgttcacccaactgacccccgttcgagcagtacagcttcgccttcaatgaatttgttgctcaacttttgacagccttcgggcggctctgcgtacaccagcgaaatgtccttagaaaaaaagaaggacaatggctcattatttaaaaaaaaaaatttttttttcgtccgatttttcaatccaatcccaccatattgtccccattattttgttaaaaattacatttaattcgatttatttccattgtttttcgacaaaaaatacaaatgggaacccccttttgatttagaaaaattttttttttttgattttttgacaaaataatggcctgggttttacctggttccagaccatttcggcataaccctattcaaaatttgcaaaccaaaagtgtcttcctccctttggattttcgacccataatcagattttttgctatcccttactctaaaaaatgtgaaatacacatctatttttgaaaattttcgtttttttcggccaaaaaccgaaaaatttaatttgttactcaaaaattcggtcgacctattaggaacataatccccttttttgcgagaaatacctgaattgtgtaggtagggaaacgggcac

SEQ ID NO: 8857 - DNA, 3205 bp, Heterodera glycines
ccaataattcatattctcttttcgataaacgacccccgaaacctcccaatacatatatttatgaaaatcaattttttgaaaattttttggaaaaattggaagatcaacttcactattaacagcggaaaggtggacaacagataagaaataaacaaaatcaggacagaaaggaataaaagagcgaaaaataaaattaacagaataaacaaaatgccaatattaaaattcaatgccatttttgaatttttaagtaacaaaaaaaagttttcaaaaagttttcgctgccaaattgtttgcttccaaattgtcgctcccaattttcgcttccaaattttgtcgctgccatggtagttgtttttcaaatatttaaaaaatattcaaaaaaaaactcaaaaattcaggatcagagggtgctcaaaccgaactacagaatgaaaaagaggcaagtttttgtgcccatgttggtgttcagcgtgttcatctattataactacggggagtacatttacgcttattatgaggggaagcgcaaccgtttgctgcgttggtacaatggcaaatagaccgatacaatgatgatgatgatagtgatgatgttcagttgacattgttttttgttttttttttgtaaaaattaggcgaatacaaataaatggaaatgccctattttttcaattatttgatgtactgcttgaacttgacgccgccgcattgggtggtgcaatttacctttcatttgccatgtgtttttgtcgccgcttttcgatctattgtgtgcattggccgtgccgtctgtgcattggcaatatttttttgaaaattattgggcgctcccctcccgatattccaacgtctaacagcgcgcaattttaccgttcgacgccggaaaaccccgagatttcaccgattcataaaaactgcccatcaaaatccacaattttgacgaccagccaaggaaaaacaacgacaatttaccgattacaaccttccgaattcgattatttagtgtccatttaggtttttccgacattttatggtagtaattttttgcaattagcccgataggaagtaaaagacggcggattgttcaaaactaatcggtgaaatggtcgaatttcggcttacgaattttaccaattctttaaaatttgctagactaaaatgatttacttcgtgtacttctcattgtctctgacaatcttccagttttttcatgacgtttttgtgccaaaattttgcatttttacgcctcatcccgtcattaataaatggatttttaggttttttttttcaattaacttcgaatttgtctaaaacattcccaaaacaacaacggcaccgaaaaaatgccatatgccaaccagccacaggtgaccattttgcagctgagcaacgagtttgtgcagtttgtgctcgaggacactgacctgagcgtggcgaatgcgctccgtcgtgtgttcatcgccgaagtgccaacattgggtgagcgtcggcatttgcatttgatggcacggcatttgggtttatcctggccagaaacataagaaatgcccgaatttgggtaattttaatgcccgatttgtggatccgaccgggaaaatggacaaaaaaagcaatcggtctcaggtaaacctgacaccagaaaagaagagaatgcccgaatttgggtaatttttaatgctctattggatctgaacctgcacgaaatctgtgttgggtccctatcgaacacttggcgaattttattgcaaaaaaaaaaaaatcgaattcgaattttctgggcctgatcttggcaaacccaaaaaatttcattttatgccctcaatttccaccattttgaatttttggcatttggcattaaaaggcattaaaaaaaaacattttttcagcgattgattgggtacaaattgagcagaacacgtctgtgttgcatgacgaatttgttgcccatcggatgggcatgattccattgtccagtgacaacattgtggaccgcatgcaatacgctcgggtcagcgaaacaattttttcctccaattaatgagtttgtctaaaatccggcattttgggtctaattttcgagttctcggggattatactcgaaaatgaagcaaaaaaagccttaaactaatggccattgttaaattgcaaggtaggctggcctcgtaaaaaaaaaaattcggaacggagtcaaccgactttttttttcctcgaccagaaaattttttccggtttttcgaattatcgtcgtcatgggcgaaaataatacccctttttagaagtttcccctccattttaaggaattttaagaatataggtaataaaaattccaaaaaaacacctgtttttcttaaaagactccgtttttcattttagggggcgtgggattcccaaaaaaaattttttttttttggtttttaccgttttctgtgccccctcttcctctccactaggatttcattttatacgaaaaaagcccccccccccccctttttttttgctcttccgttgactttgctgtctgtattcccaggattgcacatgcaccgaattctgtgacaaatgtgcagtgctctttctgctgaacgtacgctgtgaagaggaggcgaccaaagcggtcacatcggacgacttggagtccaacaatgtcgaggttttttcaaaaaaaaattgttttttttctaaaattttttatctgccacgcttggttaggtggtgcccgcctgtggagcgcacttgcgggacaacattgatttggagggtgacaccggtgcaattctgctcgtcaaactgcgcaaaggtatcgaaaagcaaatttgtgggcctaaaaaatcaaaaaaaaaaaatttttttttttaatttttccctaatgtatgccccattttctcatatattttaattattgtacaactaaccacgaaaaatttgggttttttaaaataatttttagttataaatatttgactttgacggtttttctttaatttcccaaaattttttgggtttatttgcttgggtttttgaaatggaaattttcggatttttttttacaattaacttttttttcagtaatgattgactttcatcatattttaaggccaagaaattcggatgcgctgttatggcaaaaaggtacattacgtctatttgtttaacttggaaatttaaggtgattaaagataagaaaggggataattttaagaaa

SEQ ID NO: 8858 - DNA, 1213 bp, Heterodera glycines
  unsure (1)..(1213): unsure at all n locations
aaaaaaaaattttataaaaaaaaaattcatggcattcatattggttcgatctgtcatgaaaatgaaatgaaaacatgaacttgcttgtatccaagcaaacattnttcttcaattttccacccattttcaacaattttgggtctcaggcctcccttcaaaaaaaaaaaatttttttttacccttgtccctcttcccccaaaaatttgtttcccgtccctcgtccagggcttttggcaaggagtgcgccaagtggaacccgtgctccgccgtcgcatttgagtacgacccggacaacgcgttgcgccacacggtgttggccaagccggaggagtggccccggtccgccttctccgacccggccgagtatgaaggggacaaaatgcgcgaggcgccctacaaggcggacgccaagccgcgcaagttttggctgggcgtcgagtcgaccggcgcattgcgtgcggaaaacattgtgctcaggtgggcaaatttatgatgaattataatttttcaaaaaaaaaatgctagaaaatttttaaaaagtttttttgaaatttaaaaaaaatcaattttttttttggtaaattttctgtttgagaattttttttgaaacttttttttcaggggcggggaaccgacgcggggggggggaggcatagttcacccagtcaatttacaaaaatgggtaccaatacggcaatttttggggctttttcggctttcccccaaccactcccatcgactctttaaaaattagttcatgataaatcgtgaaaaaaacaggaaaagaaaacattagaaagacagaattttttggagctgggctcggaattccatccctattatataccaaaaatttcttaagaaaattagtaaaaacaattttctttttggcatacccaatgaaatttacttaaattttttttttaattcaaattaaaatgcggtaaaaaattgtttgtttttttttgcagtggtatccaagtgctgaagaagaagctgatcgacatgcaggaacagttgaccattgaacgcagtgccatggagcagcagccgaccacatattattaatgaaacaaaaacaatacaaaaaaataccaaacaatttttcgatttattatttttattgtttctttgtttgatctcctctgttttataaaattgataaaaattgcatttttaatacagttttttacataaattttgaaatttgatt

SEQ ID NO: 8859 - DNA, 2582 bp, Heterodera glycines
ctatgcattttccttcccaggttctattccccattatgcaaataagaaaatgattaataattatattttttacatttagaaatgcgacactttttaaacaagaaaaaaaatgaaacaaggaaatgaaggtgaagaaaagacaacattgacatatgtaccatgaaaaatgtcctattttttgttacccatatctaaattaaacagcaattcatttgcatgaaaaaagacagatattttgggatttataacagcaggaaaatcaagaaaattttccaaaataaagatatcgcaagttaaaataagattatggtgtcaaaaataagcacatttttgtaaacttggcaaaaacccggcctttccttgaattataatcattatgcttttcatatgatccagtttctcaaatagtgtaaatgttattgaatgactaattaattaatttcctgtttaaagtgtatgaaaattaattaagaaataattaaattaaattctgcatatatatggttagtttttcaaatgtccttgacaaaaaattcctgttagatacttgaaatccatatcagtccttggacatggtaatcggatgatgttgattaatttttaagttttttttgttgagaaaataatattattttaataattttttagatttggaagtcatgctttacggtatgacataccgataataaaacagcgtaacaaacggtacatttaattaataagtgcaaataaaaatgtagctttggaatctttaaatttgttcagcacaggaatttctttgtgcacttttcgtccaccacattcacaaaaaacaatcgcagaaacatatgcagtggggcagaagctgtgtacatatccgtgttcattagggcaaatcggcccgatcggatcaaagtgtcaaatgattggaagaattgctggtgggtgtaattggcgatcagagtgttcgggtcgtggacctaaaacagggacaattaagctaaattagtcgcaattagcacttaattgccaaaaacctcaatatttatctgacaaattgagccggtgaaacgctcaaagtgatctggaatatttattgcgttaaaatacagtttagaaaaaaactcaaaaatttatcactttttgtttattggaacataaatatttttacaattattttttaatttaaaatagttacaagcaagcagttcaataatgccaaactctgctccctcaatgtccattagcagcaaatcaacgggctcctgttcccattttgtgtgattattcataaagtcaatgatgccaatttgtgtgactaatttccgctcaatggcatgttcttaataaaaacataaaatttaaaaaacaaatcaaaaaatgttaaaatttatgctgccgccttactgtcagcaattttagctagggttacgccccgaccccgagtcccccgacatttttgggcctattccccgacatgtgccccccgaccagggctgggcgcaactcgatttttaattacggaaatccgcaatccgcaattgcggcgattttctcagttgcggaaatccgcaatccgcaattgcgggggtcaaaaaaccccgcaatttcccgtaatccgcaatccgtaattttcctaaactttttttttgttttaaatccaatctaaaaattggttaagagtaattaatgatcagaataaaagctttgcatgttttttgaggcgaaaaatcccaaaatatgggccgcgggagaaaaattgcaaaaatagggcaaaaatggcagattcagagctgtggtcgaaaattttcaaaatttttaaattaaatttcaataatctcacccttttagaagcccttttaaaacaaaattaaaaagattgtcttggtttggcggttccgaaaggcaaataaattataatttgggacgtaaaaatccattctttttaaatttttaaggttcattttgggaatgatttatgaaggagtcccggttatgtaaattgccgacttttttttatttttaaaacagcttttttcgcggcgtgctttttccaaaaaaatatggaacatgggggggggggggggtcaaggcggtgccgaaagacgccgccgggaaaaaatttgaaaattattatgcaatttgttaaaagattttgtctaaaaatgactaagatttggagctaatatttaaaaataattaggagtttttggggtgggcggtgccgataagcgccgtcgaggaaaaattttcagaatttttaacgaattttgttaaaaaatagccaaattttttaagcacttcctcttttcccctttgctagcctccagtccctcttttatgtatgttcataatactacaaataaccaagaataagtcagatgaaattgaaatatgggtagccttttaataaaaatatttaaaaaattcattttataaaaaataatcttgcaagaaatcgtctcgaaaaataatccaaaattcaaatttcggatcaaaattgcggacaaatcccaaaagtccgcaaccgcaatccgcaatccataactccaaaaaccccgcaatttccgtaatccgcaatccgcaatagcgcccagccctgc

SEQ ID NO: 8860 - DNA, 1427 bp, Heterodera glycines
  unsure (1)..(1427): unsure at all n locations
aatccgcaatccataactccaaaaaccccgcaatttccgtaatccgcaatccgtaactccaaaaaccccgcaatttccgtaatccgcaatccgcaatagcgcccagccctgccccgacggtccccgccccaggccccccgtcaattagtcggggaatcggggaccccgaacgttgaaaaattaaaaaagacaaaaattggttttttcgttaaaaaatttgttgatcactaccagggttgttccgggtcacccgaatcgcgaaacccggaatttttctcgtccgaaacaaccatgatcactactcgatcggggtccccgacccccgacaatttagcttcccccgacccgacatgtgccccccgatggccctcggcccccgacattttgccccccgaggggtcgggagtcaaccctaattttagccatcgcctaggtcgacaagaaacgaaggaatgactgaccccatggaatgcgtaccttcccatgaaatcactggttgttgattagccgtctcggcaccaattgggccctgaacaaaagtgccacctacagattgtgtcaaatttgcattaatctcagccgacggatcagcagcgatcaaatggcactcagggtaaattttgatcagttcccgttcagctctaaccgtatgtccaacacctgcaaaaatttcaaaatttagactaatttttattttcttttttaggtttgtaccgaatgtgacaactgtgcaagttcgcttttgaagattgacattgggacaaaagcgcataaaatatttaaactcatcacttgaattcaattttagaatgttcgctttgttcatttgctctttccaaatttgctaaaaagcaaaaaattaaatcaaaaatattattaaatatatttaacatgagtaagtataataggtaattaattagttaattatcccgaacattgaaatgcggttgaatttgtgtccacgtgccgttcacatctatggaaccgtccttaagccgaacatcgactaaaccacgctgctgtttggcaagtgccgcaagaaaatttgtatcattaacctttggacattctaactaaaaagtgacaaaaaataaaataatttaatttctctataaaattaaaaaactaagctgaaaaaaattatattttaatttttctaataaatttttacttttttaacattaatttttgacataatcaaattataattatgtacaaaatgaattcaaaaaaactgctaaatttcattgctattctcttcttacttttggaaaaaaatagtaatgggtccataaaatattaaattanattaattttgaccttttttgaaatattttttgatgagtcaaccgttcggatcaaagcatatacaanagcagcaataacatcattanatgcantcatgacagtccaagcattgctgcttt

SEQ ID NO: 8861 - DNA, 1363 bp, Heterodera glycines
aatggtaatatttgtcggacatgtaattgcgctaaattaaaagttatttttgtttaaagattcaattatttcgaattaaaaatatcttaaaattcaaaaaaataggtggagatttgtcaaggctaaaatttggaagatttttgaaaacatttaaaatttcgtagaaatattgtaacagattttgtccatatgaccattgttagaggtgattgttgaaaaaaaattaagaaagctgaattttcaaaaaacttatcaaacatttaaaataaaaaagaatttgtatttgaaattattttcaaaaaattatcaaataataaaaaaataaaaaaaaagaatttgaattagaaattaaaattaaagacaaaatgtaccaatgaatataatgggttcacacggtagatatccgatttgacggcagaaaaaccagtgaatggcatctgcataagaaaaaagcgattaaaatacaataatttaattttaaaatttttattctcacataattggcaccggcacatccaaaggccggtatgtcgatgttagagcgagaacggggcaactaatgaaattttaaatttaattaggcaattaaaattgcaaaagtcaaaatatatgatgaattttttacgaggaacagatttttaagttttagactttattttttttgcggatagttcttgatgagagaagtacgaaatcaatctaacattttttttcagaaatacaatcgactttttaaaaagcaaaaatcctggcgccatgatttggcggacaaccgaaataaaatcttaaaatgtgtttgatttacaattgtgcaaccgaaatggacaaagaatgaggcaattttggaaaattcacacatttattgacaggtttttccaattttttagcaattattttggcatttttcagttttttagcaactatttatgtacttatttcgctatttttagcaactaaaaatccgttctctgactattactatgtatttatggaatttaacacatttaaaaacgaataacaaatgatacggaagcgctacgtgcagccgcaaattcagtcccgcgcgattcgcttggcattcgcgcagtggacgccgaacggtaaatgccatacacgcgacgtggcattatttgatctaaaaataatcttagaagggaagaattggttgttaaataaccaaaataagatttaattattaatttaaatgattgctggcgaatgtttaaaaaagaaattaaaattaagcaaaaaattttcaacaaaaaatagaccattcaattttttcagactataaaaagaattatttaaaaaaaaaatttaaattaatataaaaatgggtaaaaatccattcaaaggaaataaa

SEQ ID NO: 8862 - DNA, 1309 bp, Heterodera glycines
cgattgtctgctgatgtgttcccagccgaacaaagcggtggaaattgtgcgaagaatttcattgacacattcgaggagaaataccagcgcgaatttgggttcacagtgcgcggaagagcagtgatcgcggatgatattaggtgatcagcagagaagaaaagaggccggggattttggggatttatctgacaaaagcggaagagtggctgatcagatcagaaggggagaaggtgatctgatcagtggaatacagtgagctgatcagagaagtaggggttgatctgatcagaagacgagacggtaatctgatcagaatacgagacattattctgatagaggaggtcagagaaggagagatcgaagtattgagggcgatttagcgatggaaagcttttaaccaataagtcattccaccatttccgcatgttccctcgctcaaaattcattagttcagagtccgcgcggttgggcgaaggtttctgttccgcgagagaaatgatcagatgcaaaagactgaagaaccgaccccagcaaaattaaccaccaaatgcatttttgtagtgagttttcacggcttatggctgctaagtttcccttattttactgtttcgacaggaaggcgaattggacaccgacgttttcgattttttcgaattgcgtttcggacaccaaatattcggccccgccattgtgatcgataagaattggtcggtcgtcctccctcgtttcctttgaaaacttgagatttcaatgcgtactgtaccgattaacgtttgcaattcttcgcgccgttaggctttaaattcaaaacttgaccgcataatataaagagccggaatggaaaatctatacatcgataatatgtcagatgatacacgttaattgatacgggattagtggtaataatgctataatgtgttttcccgatctcaagttcagtacgtgcaactggacgacttgttcatgggcacgccaacggtgaaggagcatctgatggcgccggctcagctttgcatggtcggacacacccagacggacgatgcgtagacgcgtcaatgaggagggattttggatcagtacaaaatggaaatcactaatttgctaatggattaggtaggttgctaaagtagcgccgagcgggtattggaattggcgaactgagctttttaagaatggatttgtccttttcagctggaagaagtcatttcggatggagaggcgcgccgttcgcagttcgccttcgaactgtgggacttcctgttagtcttttttgccctccatccgtgtaaggatgcaatttgtttttgaa

SEQ ID NO: 8863 - DNA, 982 bp, Heterodera glycines
  unsure (1)..(982): unsure at all n locations
ttccggtccatctcggcggaatgcaggcggcgtcnaaatttcagatcgatcatatnggaaagtccaacttccgacgaggcgatgtgattttgtcgaacagcccgcgggcgggcggttctcacctccccgaccttacgctgatcacgcccgtcttcttctccgatcagagtggagcccccgactttttcgttgctaaccgtggccatcattcggacattggtggccttgtccccggctcaatgcccccacattccacaacattggcccaggagggggccgtctttcacagtttcaaaattatcgacggtggtgtgttcaaggagtctgagctggtggaacaattgatggcaccacaaagagtggccggctgttcaggcactcggaatctgcgcgacaatttggccgatttaaatgcgcaaattgcggccaatcaaaagggcattggccttctgcatgaactcgtccgtgaatattcgctgcccatagtcaaagcgtatatgaaacatatccaacggaacgcagtcgaagcagtgagacaattgttgaaaaatgtggcggaagagagtcagcagaagggacaaaaggttttgagagcgaaggattggatggacgacggaacggagataaaattggaggtggaaattgacagagactcagtgagtgacgggagggggcggaggggtagcgattctcgaccatccatcagacccctccctctgccaaagggcgatgctttgttcgacttcaccggcaccggtctgcaagtccactccagctgcaacgcgcctccggccgttctgatggccgccctcatttactgtctccgctgtttggtcggccgtgacattccgctcaaccagggctgtctcgaaccggtcaaagtccgcgtcccccccggcaccattctcagcccttcggaaaatgccgccgtagtcgggggcaatgtgctcacttcacaacgcctttttgtgacgtcattttg

SEQ ID NO: 8864 - DNA, 3447 bp, Heterodera glycines
agccaaaaacagcgccgaagtggaagccggggcaagcgaattaggggtggaatatccactgatcgaattgaatatttaggatattttggaattggaaacgcctgggggcggtggatgggggcaaaacggacaaaaatgcacgcaacaaaagccaaatgattttgtgatttagatttgataaaattctattttcaaccgcatttttgctttgaatcaccaataggatatttccgttaaaaatgaatggttaattcattagtcaatctctgctggaccattttagttaacttgaccaaaaaacaaaccgattttaaaaatacaccatattttttgttatctcaattttctaaattttttttgtacaactttttttatattatctgtcattggttctctaaaactttggcgttcgttttgctgtgagaaagtaattctttatcgcaaaataacaacaaaaagtgtctcttctttctttttttctcttttcgctctctaatagtcttcgatgtcttccccctcctccgactcgtcaaagtcttccacgaactgtcgctgcttctcccgcgttgtctccgtctcatattccacttcttcctcctcactttgctccgactcgtccaccctttccatcgctttgtcaattgtcttgtcactgaatttgtacatgctcccgtatgtgcccttcttcagcctctgcagcagttccctttcgatggcattgtccaattttgccgcggccaatgctttttcctccctgcggcgttccctccgttcgattttcctctgaatttccaatttttccgccgtttttcgcttccctttccttttgttttgtcacctgcaatgggatgactttcgcagtgcgtcccctcagctccatcttccgcattctgttcagacattggtggtggcgcataagccgcgctttgcactttttgcggacgtattcactccaatgcagcaaatgcgtgctgatctgttcaacggccttggccaaattcctgtgcagcttcaccttctcccaaagtttgcccgggaaatgactccgttcggccactttcataaaaaggaaacacacgccttaatcaaccaacaaatcactttctctcatttcgtcaattcgcttttgatggcccaccgttctcttctcggactgttgcgtattggctgttggccagcggacatgaagcacgattgcacagtccggtcaagttgaactcattgcggcagaacttcttggccttggtcctgaaacgaatcaatcccaaagaaaagcctttggaccattccctttgtttacttacaaaattttgtaggagcaatggcctttgttcaactgattccacacaatgtcatccgattgcattttcagcaatttattagccaaataagaaagggatgaggcacggatagcaatgaaaagaaggaaccgaaatctcaaaatgtgccgattttgtgacaattccctcgaaagaacaaacaatagcaaaagataaaaaggtgaaaaccgtaaaaatgaatacaacggacaatttgaccatttttattattcaaaaatctaacgaacaaagaaagggttttatcatcgcttccattgagacacatatttgtgaaagtcgaaggagtcgtccaatgtatcctaaacagaaaggagcgttcattccgtgacttttgattactggcatttttggcgaattttttaaaatagattttgatccaaaaatggagccttttgtagtaaatgaattggaagaggcgagccaaaaatactaatttaatttcaatgcatttccggcaaggagaaaaaatatatgtaaatttggcaaactttaacgcaaatttcgttaaaagggttttggaaaaatttcgcgaattttttgggattatttgtgaggtgggtcttggagagtccaacagaaaaaaagggattgtttttttttgtccgaaaaaccaatataaaagtctttttacaaccgggtctaaaatttcttggatccgacaataattacaaagttgaatatttttttagtttttgctaggattttgttagcaattgtgtgccaaaatgtgacatcacttacaattagtttttttagtttttttggtttatttttaaatttccccatttgttccttccccgtcctctcacctcaaccactttcttggcaattggctttcgctcggctattcgcatccttcgctcgtcgtcactgagtgtccgaaggtccaccggaagttgaatgatttccctcggttcgtcgcaacgtccgaaaatgacggaaccatcagaacgcataattctaaagaaacttttaacaaattagtgaaaatcctaaaaagcgactgacttcactttgtacaatctgaccatctcttttcgtctgatctttcctaaacacaatcgccacgaagtcatcggaaagagaactctgagaaccagcaacagattagcaaaaatgacagacaatttgtaggataataatgctcattgtcagaggacataaaaaatcaaaatagaaaaagcacttttcaatttacgctttttcaatgaatggaggaaataaatgtttttcgcatgcaacaattactaaaagcaacaatattctaacaaaacaataaacgtttcccgtttttggatctgatcaaaaatcaaatgttacactagcaaaaagatcagattggtggtgctgcactggatcatcatcgaaatcatcttctggggattgccctgataaactccgctcactcaaacactcatcagctgctgtagccgatctttttggcaatctgaaaatcgtgggcattacaattacaaattggcaattttgtataataattaccccctccgtcagttcttcgacggctctcagcctctgttccaacgcattgagcaaattggccaaatccgcgcatttcgaattgatttccgccacttcttgacgaaggtcaatcgaattttggtgactctctgtgaaaatattcaaaaatgtttttttgtattttctcacccaacgatccgtgcgaagaaccgagcgcattttcaacagtttttttggcttggccgatcatttcttgcaatttactgcgtttgctctccccgtttttcgcctgttggacattgttttgtttcagattttcagcagcctttttcccagaattatctaaattccgtaacttgattacctaattgcctttacttctttgagaaactcttcctaaatcatttgaattgttttgtcctaccgtccgccgttttcttcccacttttctgtatttgctggtgcttttcagcgtcttttggtcggttcgtgtcgcttcggattaattcgggtttaatggctgtatacaaagttttgtccttgtaataaagctggtcagctgcttttattacctgaatttaattgtttctagaaacaatcgttcattaattacctgaagaattacaaa

SEQ ID NO: 8865 - DNA, 985 bp, Heterodera glycines
ttgaaattgaaccgtgaaaatctaggccaactcgacagaattttagagactttttaatctattccaatttagaaatgcttttcaagtggtttatctatcacattcgcgatcagcgcccctaaaaagagccggataaatgatatgtcttaaacatttaacccaaatgactttgcaatcaaatcacaaagccggacgacattcaactcgtttttcgctaactcttttttgctgggtttaataattgaaaaaaaaaatttagaaaattcttattttctaaattcaaaaatcttaaactatcaaaataaaaataaattcctgaattgaaacagaccaaaaatctcaaaaatttcgccgatttgactcagattttcatgtttcgaccaaaaaaagaggggaatagtaaaatgagtcgatataaaatgaattggtggcaaaaatgaggtgaagttttaccgtctttgttgaagaatcggagagattggccaaattttcggcgaatgatgaagtggcctgaaacacgcggaaaattttctcttctcccccggaaacgaacaaattgctgaaaaatgggcggttcatcgactgcgatattttggattttcttttcttaccggtcaaccgaagtcagacaattaattggatgaccatgcgtttggggcctggcaatctcgaagaaaaagtccaactaaaaaaataaaaataaatgaaaaatgctaaaagaaacggaagggtacaccccaaaatatcgcagccgaaacgtcgccgggaaaaaatttttttttttttttagctaggtaaccaaaaaattttgcggcaacccgaaacggacagacagacctgtttgtgcttggcaaaaattcgtgtcgtcatgtcggcagagcaactgagcaaaaaagacccatccggtgaccagcagaggtcggtcacttcggcaaagtgtccgctaatggggaaacacttgggcaacaccgcaccctgaaacaaa

SEQ ID NO: 8866 - DNA, 2469 bp, Heterodera glycines
aaaaaaattaaattagaaatccgcgttcttcaggattgccagcattttccctttcgcgcactttcgagtcaatttgccaaaaatggaatccgccgaggaatgaatggcacagtgcgtaccgtccacaaggcgaataagtgatgtcatagcaattgacctcgtcgccaacaatgtcgccaaagcgagaaattggaagccaaatggagtcctggagattccaaaaaaaaattattttgggaacatataagaaatgaaaaagggttaccgaatctgagtaggaccatctgaccaccgtttggttggcgccagacgaaagcaactccaaacgctttggatgccatgctaaaaatggaacacgtttagcgggaacagttcgtttcctgcccccgcccgtcccccccccccccacgaaattcaaacctagaaattttacaagaaaatttttaaagcttttttttataagaaaaccctcatttagcattgtaggggacattaccaagtgcataaattgggccggtctgcgcgtgtaggacggattccaaagtgacagagatcggatgagcgacgccatcttaaaaatagtaaaaaagaaaagcgaaatttaacaaaagaataaaggagatcagtttaagcaaaataggtttaaatagacacaaaaattttcgaagaggcaataaaatttttgagaatttttattttcaattctgaagggtgtatttttaaaattttttttttttattttcaaaagtcatgaaagcatgatttcaaggggttttggatcgcttatcacgaatccgccatccatttcgacaaattacgaacccggacccccaaattcgaacaaaaattgttagaatttgggtccgagggttcgaaatggatacaggattcattgtcagcgacccagaaaacttttggaacaacaacaaaaaagttggcgtcgcccagtcgacacccaccgcagtttaacatctgaagattttaaaaacattgatttgaaaagatttgacggtcacccccccccccaatttaaaaaaaaaaattcataaaagttaaaattttcttgttactttttccaaaaaaaaataaagcaataaaactgttagcacttactttggatgcaaaatgtttgttggttcatcttgagctgttggtgatcatcatcatcatttgcgagtggtgtcacagtgatttggtcaccgccgccgacaaattgccaaattttgattagcccatcggttgctgcggcaagcgacaaattgtggcactgtccatcttcgctaactgaatttgctttaaattttaatttttcattaaaaaatcgagaaaaagattctttttatattatatttcagcgattttttggaaattctttttgaaaaaagtcagtaattaatcgtcaatttttaaaaaaccataaattgttgctgtgaactacgtttttctctcgaaaaaacattttaaaatttttcatgaaataaccttaagaaatttattcagaaaaaaactcaagaaattttttttagttttcagcgatttattggaaaaatttttaaaaaaataattattcagtgtaaatttatgaaaaatcgcgaagaaattttttaattttttttcttgaaattttcttatgaaaaaaaattcctaaatattttcatggaaaattttcaaaattgaatttttaaaatgggacgagtcactccctaaattgttaccattaaacgccaaggcgcgggtccacgatttgttgctaccgcataagtcaagggacaatttcttctggatggagtaagaattctaaatatcgaaaagtaaaaaaataataatttaaaatcaaaatttgcttcaaaaccgaccgtttccgagacaaaaatgtcaatgagtccattcgacaagccaacagccatgacaacggcaccacaaatgtgcgaaagttcaaaagtggatggaatggcactgccaaatttgagggatgaaacggcggcaccaatttgatcatcatcgccatccatgttcagaaattggacatcaatgtggtcaaattgaagaatggcaagcagtacatcgtcagtgtcgcctgcatacgcagccattttggacagttcaatgctcgcctttttgctgactaaaattggaaataaaaaaatgataattggagtcaattttcgaatcctaaaatcattccaaggcaccctcggtgcttccagtttaacctcccacctcccgaaaaacactggaatttaatttaaaaaacaaaagggattttttttttggaaaaattttgaaaaaattagtaattcatcataaactttaaaaaaaacgctaaagtttttaaaaatttttgtagaaacatttactgttgataattatcctgggaaaattgtaagggcaaatgtccccaagcaaaatatttgaaaaagcatttacgtcttttgatgcacattacatgacgacgatcaccatcagcaa

SEQ ID NO: 8867 - DNA, 1771 bp, Heterodera glycines
tttaaaatgattttaattatttttttatggtctgtaaagtacataagtacctttttgtgtttttgcctaatgtttccctgaagttccagtaacttgaaagcatgaaaataaaatttttaagctatttttcgagttattagggcttatttttaggtttttatttttagagctaaaagcttaaaatttttgaaaaatctatttactttggcgttatgcctaaatttaaagcggtgattcaaatgcaataaaaagaatttgggtttaaaaagttttttttcttatctggggacctaacaaatccgcagttaactagattttcaattacggaaatccataatccgtgatttgcggatccaaaaacgccgtatttccgtaatccataattttcaaatttttcattttataataaacaaaaaaatcctttctcaattaatttggaatacctaatcttaaaattttaaaaatcttttatttaaattttttgtgtttaattttttaaaatattattttgatttgcaattaaattatttttatttactttttaagaataacaattaataactttatttaattcaacaataatagtaagaaaattcattacgaaatttttgtcctttcgattttaatttttataaaatatttcattctaaaatattttatttgggtctgtaaaagttaaattaaaattaaaaattgagaaatgaaggagtttgttgggaattggcatgcttccaagcaccaaaaatttgacccaaaaacaaaaatcgtcagcatttgtccagcggcgcctgtttaatttacctaacgggattttgtaaattttaatggacaaattaatacattaaaataaaaattagggtataattaaagagaggaggattctttgagaatattaatcatatgatgcttatgctggtttaatttgaaatgtgcttttaatggtcgtgagtatggtcaattttatttacaaataattaaaatcaacaaaaaatttaatagaatatatttttaaaaatttctactgaaaattagggagcggattttgaagttttttaaattcaatttttttttataaataattttgcttaactctaaatttttgcttaatgcttacaaattagctttcaatttttatttattttttcgctttttcgtgcctaatttagaaattttctatgcttaattaagtgtaaaacgattacattttttcaacaaatttaacttgtaatccattttgtttttcctcaccggatgtaccacacactccaagtttttttaatttgaacttttttgtacccaccccacccgttttttttaacaaatttaaatttaaaatttgaaatccatttgttttactcccggggatccgcccacccttctcgttttaacaaatttcaatttaaaattttgtttttaccaaccattcattcattccattgcctcattgtcacatttggcccatttatttatctcccccctattaaattgttgccactttttttctgttttatccaatcagctgctgctctgtccatcatcatcacaagcagcagtcattagcagaaacatcagcagaagcacaaaagccactcgacgacgcgacacaaaattattattaattatttgttttatacgcacaattcaattattatttttacaaaaattatataaaatccgtcgccgccgatatgaaagttttatccgtcgctgtcgctgctgctgatccatcagagccgccgccaatttgtgactgaatgactccgacgactga

SEQ ID NO: 8868 - DNA, 1738 bp, Heterodera glycines
  unsure (1)..(1738): unsure at all n locations
ggactcaaactcaaaatcgaaaaatgtcattggggaatggcggaaattagatatttaggctttttattaagcgaaaaaggagtgcgcatggatccaaaacaagtcgaagctgttcaaaattttaaaccccctaaaagtctaactgaattaaaatccttattaggagcacttacttatttccgtcggtttataaaaaattttgcacacattgctaggcctctacagactttaactcaggataaatttgagggtaaaataccagaaaattggggaaatgaacaaaacgaagcattacaaacgctaaagaaaatgctcacttccgccccggtcttacaatcaccaagatttgggaaattatttataattgagtgcgacgcatcgcgcagagcaatcggagctgttttactccaagaaacgggtcccgttgcattttcttcacgagcattaaataaacacgaagcaaattatccctcaattgaaagagaggcgttagcattagtctatgctgtaaaggaattttccccttatataattgggtccggtacaacaaagataataaccgactgtagtgccttaacaggaatgatgagggcaaaagaacttaagggcagattagaaaaataccaagtcacgttacagggatatgacttagaaatagtttataggcccggaaaaaagaacaaagccgcagattttctttcacgatataatatcccaggaattgaagatgaaacagaaacaaatttaactgaaaagaaaaacaaaaaagaaaataaagcacaaaaaattctgagtactgagaatagtgaaaataaaatagaaaatcaggacaatagcaataaaataactttaaaagaaataattgaagaacagcggcaagtaaaggaattagcaaaaattttttatattttgaaaactggaaaatatcccaatgaaattttgaaatggaaaaaggttaattcggaatactgcctaataaatggcgcgatttattaccaaaaagggacagagaattctgaaaatccaaaattaatcatacctcactcattaagaaaaagaattttttgtgaaatacacgacaaaggacattttggatttgacaaaacatggacagaaataaaaagcagattttattgggtcggaatgaaagaagacgtaaaacttttgattgatgcatgtgatgggtgtcagagaaggaaagtccaaccaggtcaatcaaatttctcaccaagtgttccgataaaagcaacggaatacccatttcaaagagttcactgtgacttaatgggcccacttaaaaaaacagaccgtggaaatttatacatttttctgactatcgatagtttttctaaatggataacagcaaaagcaatttctgatcaaaaagctgagactgtctccgaagtttttgtagagacagtaattcataaattttccaccccagaaatagtagttacggaccaaggcagacaatttacttcagaaatatttagtaatttatncaaaaatttacggttttgagcatacaatgtcaacggcttatcatcaacagtcaaatggccaagcagaaggctcaatngagaattgtagctaatattatgtcacaaataataaatganaagggaaacaattgngatcaattactgactcatgcattatttgcttataatacagccatacatacagttactanacactcaccattntatacaggtatatttacgacatcctaaattac

SEQ ID NO: 8869 - DNA, 3347 bp, Heterodera glycines
aaaaaagaggtattaaaacataaatttgaccaacgatggtcaggaccatttcaatgtgtaggagtggaaaaagaaaaaaataatgtaattttacaatcgctagataaaaaaggaaaattacggaaagttcaccaagaaaaaataaaaatgtataatggaccggtcgttcttccattgagggaagcggatgaacccttaaattgggaaaaatttgtcaatgacccaaatttagaattggaggaaaaaacggaagaagaaagttctgatgaggaagaaaaaaatactgagattgaaaaattaaataaagagaaaatgcacaaaaagggagctgaatttaaaaaatcactgaccaaatttggatttgaaagcagtgaggaagagcaggaatcacaaatcgcatttgtgagaaatgtgaatgaaaatgaaggagaaaatgaattggaaattttaataaatgaaaatttaatagaggaatgggaagatccctgcacaattacggaaatatttatagatggggaagcaaagtttgcctatacgagttggccagaagcaaatttgatttcgctgacttcactaatgccaatcgatttggttcaggatcattgggaagtgtttacgaatgattttggaaaggattatgtgattggaaatttattggggaccaactttgagctatttataaatgaagaagtggacaaaatagtgctcggaatccaaattcaatttttattaaatgatgaatgggattctaaaatggaaaatgaaaaagaaacatattgggaaaaattgggagaattaaatggacaaattcttgaattgcaacgaattcctgatataaatattgcttacaaagaaaatttacaaaaaaataaaaatcgtgaaaacaatgaacaaataaatggccaaatacaaattaatgtcataaaaaataaaactacaaaagttggggaaaaggaagaaaatttggaaataatactttcaaatgatttaaataataataaaaataatgaaagaaataatttggaaaatttgggcaaaaatgttgactatttagccatgcaatcgccaaatctgcctccggtcaaagtttttgaagatgatttggatgaaaatgaacggaagttaagggaacagatcgataaattgaaagaagaattggaaaaaacggaagagaagaaaaaggagattgagaagagaagaatggagcaaatgaaattggccactgtggacgaagttgtccttgaagatgaagaggaggaagaggaggaggaaccaacctccaaaaagtcccgtcttaatccgacggcgacgaaagaaattgtgcaaaaaataattaatgaaaaatgggttgccaatgatttggtcatgatcgatccaagagggatcaatgatcggaatggaccggaagatgtgatcgaaagtcggagaattgaagatggaataagagcaaaaaataggagtgtaaatgaaaaagcaatgcgagaattcgtgatgacgaaaacatcgctcgatcatgcaaaagaaattaggacgagagcaatgaatgaagtgaaatatgctgaaaagccaactgatccgtcaaggcttttgagaggtgaaattcgtgcggcggaaatggacatttgcgaaaagcaaacgaaggcaattccgcctgaagggaagcgattggcgatcaaccaactcgaaactcccgaagaggaggccaaaagaaagcaattttgtgcgcgaaccccgccaccatttcaaaatctgatggcacagcagtgggctcaaaagagagaaaaagcggaaaatgaagtgataagcccagaaaagttggaaggaattttgcaaaaaatcgaagaaatgaaagggaagatgaatgtgatttgtgaagaagtgaaagcgttggtgaaccaatcgtccgtgagcagtgatggtgaacccggcacttcgaatttcaaccgctgggaagacaatcagtggcgcaatcgcggacacagagggcgatggtcggcaactcctcgttggcgcgggcgagcacgacaacaatttgggaacgattggaatagtcaaggaaatggattcggaacggatggctactcataaataatttggattcttatcgattaaaatgatatagaaattatattttacatattatatatttaattgtcaagtcgtaattaatttttgttgcattttttttaattttcaaaaacaaacaaaaaaataacaataacataactaaaacaaaattaaaataaaatgcaacaaataattagttaaattgtcggggacaattttctctcaggaggggaatgatatctctataattaattgtacattagatatttcttattttctgactctctgattttgttagtgcctctgatcactctgatcaactttaactccgccccttctcgtaatgtggcctatttcctagcgatcacctcaattctttcttataaccgggatcacatttactcccgatccctccccttccgtcctgtacggatcggggtccctttccccttttactcattatattagtatattgtatttctcggatatccgcctacggaataaaggacattattccatgtgtatattagtaatgtacggggaaattagggcccacattagaacgggcattacatagaaatcaaccccaatgttctcacttgtaattggccggaagggttgcgcattaaaaccagataatgtgcgttggctcttgccgttttaatgtcccgaccatagagactctgggttacaaaaattacgcttacgttccaattatgggagcccctggtaaagagtaaatcaagaaaattgttctgcatgttaagcattaaatcgtcaagtatcagtaaaaggggtttttcctgttctttaatcttattcatgtctggaatcccgttaaaagtctcaacaccctccccgattaatcctaaaatactatcattcatctcaccataacaataaagaattttcttaggcggtggttcaattagattcttatgatgttttaaaaaccgtaatagccaacgggtcttaccactcccggtagcccccgagagaattagagtgaacggaccgcgaaacatttttaattcctcttatttatttgacctatttatattttcatagggaacatatttcgcgcatttggggcatagccagaaattatcaaaaaatgatgtaccgaaatgcaaaagactgtgttttttacatctcttacaaatctcgtaatgacagggacagtaatgacaacacttaattttatgcgggcagttcatttttcaatttaattttatttttgatgactatttatagaaggggtatataaagggatgaaagga

SEQ ID NO: 8870 - DNA, 2059 bp, Heterodera glycines
  unsure (1)..(2059): unsure at all n locations
cattaaaatattatgttttctggtttagttatctttccatttggaacattggagacatcaaatagataacaaaggttaaaaaaaagcttattttttcttcacacatatatcaattttcattaaacatagtgaattttttaaataaaaatgacttttcgggtcagtttgaccctgaggcagtttgcttcggcaaaactgtgggttccggcttgttcgtgtgaatgcctaataataataaaacaataattttattctctgtcgaaatcagccactgtcgaaatgttacagcaccaaaccgaacggactaatttacgaattgttaatttgaaatagtgaaagtaaattttgctcatgattaagcatatcttcaaaatatttttttatatctaaaattagaagaaacgttctgtgatgagtccaaattttgcattgcatttaaaaaaaaaaattttataaattttttatatttttcccgaaattgtccgcaaatgtctggacgcgatcaaaagtactctatcacttttagtcgtttcttctaaatggaacttaaaaaatttgtaaacgaaaatttaccgaaaggtgaaaaatgtttaattattttccatttatatatatatatatataatacatatacacacacaaatcacgacaaaatatgagtgaattgaaggacagcaaatgggcctatggaatagagcaatatgtacagacagacagaacatcacattgggaacaattatatacaatacatagggatcgtttaatttgcttctaatccgcggcagcgccccaatactccaggttgtcctgcaacagctccatgatcgtgacggaatcagggcaagccgcctcgggtttcgcctttttttcgttaaaagcgtcttcataagcctgcaaaattccaagcgattgatatttaaaatgtatgtccgtcgtccacctgtgtggccagttggcaagcttcggctggcaagttctgcacttcgaataagagaatggcaaagttcagcgccacagtgagacgagtcgggtgcaatgggctgagtttgtcctttgccatgtcaaatgcttcttggtacgcttgctttgacttctcgacaacatctggaataagaaattgccgtttaaccaatgcctttttccgtttcgatgcgtcgttttaccggcgttctcagctcgggtctcagccaagtagcggaagtggtcggccttcagtttcaagtagaacacttttgcttcgtcattggcagcctctttgagcagaagacggtccaacaaatcctgaaaaccaacgaaaattattaatttggaggaaaattcactggaaaactgctgaaccactgaccacaatttctcggcacttttcctccacgtcgcgctctattttgttcagcaactctttggtcatctccaactgtctctcggtggcatcattccctttttccaagatggatgtgatggctcgccaagcataacgttgtccagcgactgcctttctgtacgcgacggccaacgatttgcgttcgctttcgttcagtttggcgtccaattcgaccaccttaaacaaaaatgaaattggggttcacacttttattgtgttttcctttcacctgcttcatcgactgagccatgtcaccgaaacgcccagtttcctccgcgaatcgagcaaaaagcaaatgcgtgtttcttttacttttgtcagtcatttgacgaacaaggcaattaaggaggtcgaatatacaaaggaaagagaaagcgccaaacgaatgagatgagaaatgtaggaaagcggagtttatatactcaggaaaagttaccaaagacaaaggcaaattgagttttgaggtattgtaatgaccaccaattctttaatttatacagtatataaggatgcattttcatcagccaatcccacagtgttccatcagttgttgccaaaataggtaattaatctttttgtgcttcatcaaccaatcacagctaacagaatcacaaaaccaaanattttcgcggacttttgtcactttacgccacataaaaaaaatatttttatttttct

SEQ ID NO: 8871 - DNA, 2056 bp, Heterodera glycines
aggggggggggggtgcctttcttcccctccggggggcggggggttgcggtgtcccccctctcctttccctccccagggaccgacctgcttcccccccccccttcctcccgtcattcccgtcgtgccccccccccttccattgccctgtgccccgctttgattgcgcattctctcccccgccctttcgtaccaaattaattcgctttggcgcactttcctaaattgaatcacccaaataaaaataaacaaattaaagcaaagcgttcgtcgccatctgagttcgaacagaatgcttaattgaaattggcttaccaaagtgccgggtttttcttcatttgtcggttcgtttgtcttttccctccctttctttctttgtttctttctccaaatggctgctcatgcgttccttttgtcccctttttgcccttcttccaaatgcccttttgttttgtaatgctcgtcaccgtccctttcggcaaaagttcattaagtttttggtctataaaagcgattgccattcctcgccggactgtccatttgcttaataaatttggtttttgcgttcgttgtccctttcactgagtgactccttccttctccgattcgtccctttcgcttttgcttccgttcattggcccttcttttcccttccctttcagtgtcccctcctcgtccgtttcggtttgatccccgtccttctccgctttctccgttttctccgcccaattcaatggacattcattcattggctgatcagccaaccaaagtccgtcctcactttctttctctcttcaattagccttcccctcttctcagagttatgtgcacggctgctccgttcagccccttctttttgagacaatcgccgaaagactgagaacggcggcgagcaaatggccaaaccgcgaatttgtcattttcaaaagggagggaatccgcaaaagctacgcggaagtcttggcggatgtgagccaaagggtcggcttcgttgtccgaatttgaagagtttgtttagagcgaacggttggccgccggattgattcatttgggcatggaaaagggcgaccgattgggcatttggtcgcccaacaaatacgaatggatcaccgcccaattcgccagtgcactcgccggctttgtcctggtcggccatttagttcgaccaattggccaattgtcccgattaggtcaatgtcaatccgatgtaccattctgaggatctctgttacgctgttgaaaaagtcggcattaaaacagtaattgcctttgtcttattattatcccaaaagtacctttgacatcagtgaattttgcagttgattgctccgcccacattcaaacgaacggattattatggcattttgagggaattaatccccgaattggaagaggcgccccggggggacgggcgcctgtgcaccgacactttcccgaaattgcgcaatttgatcattttcgatgcggaaaagagaacatttaagtgagtgggaatgggagagttataaaagaccgacacataaatggacaattaattaattagtcaattaattaattggaatttcagcggcgcatgggcatacgacacggtgatgggaatggggacggcggagagccgaaggaaattggcacagtacgaagcgagcacacagcctgacggtggctatttgttttccctttggtccacccaaattaatccgtcccccattagtccctccctcttattagcccccccccccctttagacccctgcaacatccaatacacaagcggaacaaccggcaaaccgaagggggccacgctgactcaccacaacattttgaacaatgcctttttcgtggggcttcgcgccggttacgccaaccatcggacggtgatttgcatcccaaatccgctttaccactgcttcggctgtgtgatgggctctctcgccgcgctcgtccattttcagacgtgcgttttccccgccccttcttttgagcctctcgccgcgttgcaggccatccacgaggaaaggtcagcattcagtggtcggtcttagtcattcgtcatgggaaat

SEQ ID NO: 8872 - DNA, 2801 bp, Heterodera glycines
tgcttaggaatcactgcgcgaattgggactggagaaagtgaagtcgcacttcagcgaatgaattggacggcggaaggaagcagtaaaacccaacaaccgaaggagagacgaatgacggccattccctccccccgtcggtgttcgggttttttatttattccgaaagagtaaaagtaaaatgatggccaaacaacagcggagggaccaaaccaacttaataaaattgtaccgatagtttatgcgtattggaaaaaacacacaaaaatattattgtaaaaagaagaaagcatcatccaataattttgaatgtaaacaaatcgaaagggagggaatggaaggaaatgcaaacaatgcgaaggatacaaacaaatttatcgcaaaagttaatacaacccaacgaatcagcggcacctccaaactcaccaccgtttgtttatttggtcacagtgatccgatccaaaattgaagtcctttttcccagcgtcggttgtcccaatcgcccggaattgcctccaactgccaccatttttatgccccgcgttgtgctgatcaccggacgacttcttcggcttcgtccaacaatttgaatacgttcggtgattggagcacggaacgccggcggttgaaatgttacgctgttattcttgcgcacttttctgaccatttctgttgtaagttcgctgaatggctcggcggttgtggagaagtcgtcaatgtcactgctgtatcggacgagggggcgacgcgatgggatgagttgtacggagggactgacgactttccccaattgaaagcgaatgtttggcgcagcaccggagagagaggcaaaacgatttgccaaactcacactaaaacaaacgaattgcgcaattggattaacaaaacccacggtctcgagttgccagtgttgtcggccacaacggtcgttttcgtagagatcgaatcgcttcgcattgaccccaaagggacaaatgccgtcgaggaagtgatgtcggtgtcctttaaaaacattggaacaaagtccatcacaaaatgttctgacttgaagcgtgattgccttccgaccgatgactttggaccgagtcgaaattgtgttcagaggtttgttcagttcaatgccggaccgtcgaaccccagaaacgccacgcttaagcacacctacaaataagctgccataattggggacgaattcagagacaaatcctccagtaaaaacaacgcacctctgtcgcgaagagagcgattcttttccaaaattttacgcgttttcggcaatgttccaattggcatttttatgtggtaaatgtcttctcggtcgggggccttgaaactgctcgatgagtttgagtcgaccagcatcggttcatctgaagatgtgtgtcctttcgcctttttttgagttcgttcgtccaccttcgtcactttcaaaatcggcagtttcccttccgcgcgactccgactttcgctttgattgttcgaccgaattaaactccggcggattcccttcgcattgctttatgtagcgcattatcgccaacttaagtataacccaaattccgattgtctctgattagttggcccacttggtcacccaacgctgtgacgcccaactcacgcaaatcgtctttgccttaaaggatgcaaacaaaaagttaagacactaattgcaaggcgtctcattgagcatccccccctcgcaccgaggtctttcatcagtgcgggatgaatgcgttccttgacgaatcgactcgcatatttgggcaccattgtggcaggaatatcacacgcgacaaagaaacgttcaaaggcggctaaaaaatcaaattggaaaaagaaaaatgagaagaaaacggaccggacatcgcagacactttcaatgggccaaagagaacgaacgaacggacagcttagagataattagacaaaaatggcaccaatttgaaggaaaaaataatattgcaaaaaccgaaacaaatggcgagaatggacagatcatcaaacactaatctttttactattatgtttttgggaatttacaaatggagatcacggcgatactaaaaacggaggaaagccgaaatgctcaattgatcaattttcaaaaatattagtagcgccatggattgggtatttgtcaccgattttaaaggaacaatctgatcactggggaatgtcttgaagagcgattcacagcggtcagtcagtggatgcctatttaagctcatcgttgtgttgcagttaagtccatctgaacagcaaaaagaatttcgaaacaaataaaatttgttgaaaaaacagacgacgtcagagaattgtcgcgatatgccttcataaatgccgagatcacatagtaaatgaaacggtattgggcctccgtctgaaccatcgtcgccctctgttcccgcaacattcgcaccgttttctaaactcaaaacactgaaaaaggagcagcagaaatgcacaaaacacctgcacatcgcaaacacattgtggacctgaaaatgaaaaaatagaaaagtaaagggggaaagaaacctttgagaagaatgcaattggtcaaaatgtccaaagcgatgtaagtgcctgggcaaacagtcagagaatattcgagtggaaaacaaccgaaaaaacggaacctgttctgccaatcccagcactaaaacatggagtaacagcgactttaagaaaatgaaatccgaaaaatcgagggggaggaccaggagagataatacaaaatggccaaatcacctgcaatggacgacagtcgggccatccgtgtcgatttgttccctcttaacaca

SEQ ID NO: 8873 - DNA, 2055 bp, Heterodera glycines
  unsure (1)..(2055): unsure at all n locations
gatagaatggttcagtttcaaataaattcaccttcgacacctccaagaaaacaaacgatggacgtaatcatccagtgtattctcctaaagaatgggtaagcatataaaaatcgattgtattacatctcttaaagttgcaataattttgttacccttgttaatttgcgctttgaaattgccaaaaatgaacaaatcttgttattttgagccaaattttaaaagaattaagggcttttaggggtcggcattaccaatatgctcattgtcagccggggaatttttaataatttggttaaaaattgtacgattttgaaaatttttcctctttcccccccccccctatcgctgcgtgcgaaggggtcccccattttgagagcttttaaactgaaattataaatggtatggtattgaaaattcaaatttcagagaatttatactacctgcaaggctttgacggtcaaatttgtcgtcccataattttttcgttcgtccaaatccggccagtaacgaaaacatttaacctgacaatgagaaagaaactgtcaaataaaagctgctttaattgctttacccttccccgctcgacttcttttgtcaccataacaatgagccgagtttcttcttgccatatcatttgcctggtaaaaaaagtacgacagattgggttcaaatcggacgaaagaaacatttaccaaaagtcggtcacctgtaaaattacggattcatttgcaaaagtgatttaaatggggagaaatgggcctatagacgaacactgaccgtttcctccaaacatccttgcgttgaaatgtaactccgtctgaattccccaaattccgggtatctcctcgcatccaatggaacctgaaaaagtcaattttaatttgaagcattggacaatcaaaagtacctttatgtaattcgcgttgatgtagtcattctcgcggactgacttcagttttattctcgtgtgatcaaagggcaccacatttctgtaccgattcttgcgaatgttttcggttttaccgccctctttacagctaatgaacatttgtgcgtcctcctcacggtgtaaaccctaacagaaaatgtagtgagaataataaggtgctatgcaatgatttatttttcaaataattcgcaaaaaatgaccccactgatttcaaagcaattttatttgttttcaaaacctcaaattcctctacaaaaccgtcctttgcgccggtttttctttgcgattgtaacaaacaatcgatccgatcatcgatcgtcgcggctgtgaatcgcgtcgttgggagggcggcgacgagtttcacagcacttccatcattctgcaaatactaattacaatgggaaaaaataccaccagaaaagcattggacctgaaccattggcattcggacgtaattgtctaacagatcggcaaaacccctgaaattgtccttcggaacaatgccaaagcgtccatgcttaagcaaaaatgggaagtaactgaagggagggacagaacgcgcaccgtacgatggacccgcacgtgaatgaccgcgtcggtgctcttcacactcaacgcaaattcgccctcactgctcgtactctcccgcaacagaaaagtcccttcgtgtttcagtctcagcaaagcctccgcctcctgaccactggtcgaaatgtgaaagaaacctcaacagaaaagaaattagagatgttcgagaatgaaaattgaaactcgagactaaaaactttgaaattaaaatatgaaaatttttaaacatcgcaaaatgaacgacttacgatctcttccgacattaaccaccgtttcacagaagggtatcttcagaggcgaactcaaactggtgaatacttcacaatcggtcaatatgtccggtccgttgcttaacgctttgccaatttcttcgagtgatcgaaattcctgtccgctgggaaatctgtagacatttgatgcgttgtncaagggtattttgacgtgagtcacacggctcccctggtggatgggaatggtgtaatcttcgggattcgattcgcttggtcgaactaagtaat

SEQ ID NO: 8874 - DNA, 4565 bp, Heterodera glycines
gctttattttgttgaataaaaattccatttaaagttttggaagcgtgttataaaaaatgtccttatttttgaccctaaaatcttatttttgaccagcgatgtccttatttcgggaaattttcaagggtaaccctgtttttaggtcattatttgcctcaaattaattatgcccttccacaaaaaactgcccaaatgtgcaaatactggcaatagtgtcagaagagtgcaatgttttgttgttcctctttcttcacaccatcccaaaaaacgagatgtgtaccaataaatagagaatgccagagaaaaacattatctttttttctctaattttttgtctccttttggcgtactatctaatattttcattattagcaaaaacaacatttatttcgccacatataactttttttctactcatacaatttacaccaaattttgaatatcgatagagaaaaaaattctgcatcgatttctatgtttatttttatagcttaaatgttgttttaaaaagttataagataaaaaagataaattattactgtttttaaagattttatggctaaaagaattttattacggaagcgacagaccaaaaatgcacgccaaactcgtgagaacaagcgagaggagcgacgaaccaaaatggcaaagacgacgcaagcccatttggccaagaaaagtgagttttttcaacaatttttactcaaaatcattttttaaaatttcagccgctccacagccgaatcccaatgccgaaacgccacagcaagacgaagtagggccgtcaacatctgctgcaccggccgaagaagcgatggagccgccgccaccaactccaggaccagtgccaacgccagaaatggacgaggaaattttggaatttggcttttcgctgccatcggcatctgtcacaccaatcggcgatttggtgccgttttcgacaacaccaactgcgccaatggacaccggagagacgaccccgccaccgctggccattgacgagcgatcagagcgcatcgaacaactggagaagcagctcaaggaccgggacgacaccatcaaatttctccacgagcaggtgcgcaatcgagaagcgctgatcagtgatctccgtcggcagctggatcaacacatggcaccaccgatggcaccaccaacgaccagcaaaagtgagtgaaatttttccttttttaatttcataaaatctgatcattttttcaattttagcaccaccaaacagaggaagaccgaagaaaagactggaagaactgcagcgcagcgccaggcgcggcatcgtcgaccaaattgtgggcgtcatcgatcgtgatcgctcgcgttccgcgagccacgcatcgctggatcggatccatcgggatatccggcacaaattcgcgcactacacgccaaagaagggccaggagcggaaggagtggatggaagctgaggatgggctcctgctgcttgcccagcttgggacacagatggcttacaaacggatgaaggcgactctgaggctgatcaacaggcgctttgacactttcccaccattgataaaggtacagtttttcagaattttttcatccgaccaatttttttttgggtgatcaaaatcaaacgaagaatttgctcagctttaaaatatgatgtcatttcaacgccaggcgggcctggatatgtttgctctgacattgccggggcactgcgtttcagattgtccacggcaaaggacaatctgatcagcctgatccctgcccatggtctgccactgaaggtcagtggcgatcacgggcagggattcacaaaaattaccatttcattggcccatgcattgcgcccaaattccccttccaacaattttgttgcggctgtttttcccgcaaaagattcacgaacgaatttgaagaatttctgcggatcgttgtgggaacaaattgagcatctcaatgaaattgacgggcgcgaagtgaaatggtgaaaataaattttgttttttgattttttgaaaattttccaggtttcttggcggtgatctgtgttttctgtgggccatcattggccattgcggttcggcaatgacagcattcccatccccagtgtgtaactgccgaagagaccatctgatcagttcagcaaaatgccaaattcgaactgtgcaagaattggagagacaagccgatcagttccagcagctgacccatggaggagacaaagcaacggcagaggctcgggctctgacgaaaggcattgtttgtgcatctctgctgccgtcgatcagttttgagcagatgctgttggccccattccacgtcttccaaggcctcggaaatgctctgatcaaggagttggaagcgggagaaaatgccgaaattgctcagcaattcttcagacgaataggggcaagaagggaagcgttcagaaagcgcgacttgacggggaacagcatccgcaaaatcctcgtccatgccgatcaaatggaggcccttttcgaaacggaatgggccaaaacaatttgcaaaacaatggcacatttggggaaaatccaaattttcaccaaagtaattggttttcatttttgtggaaataattttttttaatttaaggcccagccattgtctccaggtgatttggatggactggagacggcagtttaccagttcaaggcatttctcgacgaacaaccaatggtgcgaacgcttctttcaaaaaagacaaaagcccatttgctgcttcaccactttgttccgtttgcgcgccaacacggatttttgggccttttggatgagcagggtgggaccatatcatttttgggggttcaattttaaaagttgtgattttttaggagatgaggcactgcattccgtgtggcggcgacttgagcaactttggaagacgatgccggactctgaacaaatgcgacaacagctggagcatcatttcgtctcgaattggctgctggacaccggcagactcgacgaattgaagctggtgagttgatggaaggggatttaaaattttaatccaactaattaagcgggaggaggaacaacgggagcaagcggaggaagacaaaacgaatgaagaaagtgatcaagatgccgacgtcgatatcgttgactgatcgaggattgatggttatttttcattacacatgacaaataaaaatgtttaaaaatttgtaaacaattttaaaatcattttggtcacttttcattttatttattcattaaaatcatagaaatacatcaatagcatgcactgggaatcgaacctgggacccaaccctttggtgaccttctcacagaccactgagacaagtattttaatcttttttggtattggagctcatttctgggatggtgtgttaaggaaggaaagaaagagatttaagattttttttcgcgtaaatttgaaaatttttttggctgctcaaaagttcaatttttaggggtgtattttcaactctcgcctctcgtcccaaaaaacgagagacgagaggtgagagtaccaaaaatggcgagagttggcgagaggcgagagacgagaggcgagagttgtcccacccctgatataaatgcatctccacaaaattttgtttataagatttttggtgcagatgactcctttcaataatataataatttttaataccaattttaataaataaccaatgagataaataaataaataaaaattggaatttctttaaaagatttaaatttaaaaacgaaccgaatatatgtctttcgtaatattgttattattttgttgtacaaaagttttgtgaaatttaatattattaaaaaataaataaaaagaaccttggttgttaaatgatggaatcttccgcaattttttttcgtaaacgatttttactataaaaacataaaagcaaaaataaatatcaaataatatataaaaaagagaaaaatgataaggaatttctcatttcgacctattcaaaaacaaatctgataaattttaaaatattgtaaaattttaaagatgtcaaaaaaaaataaaaattattcatttcacaggatagcaaaagtaaaaaatttaatatccctttaaaactcggtcaggtcacaacccatgaatctgttaaccaacactacaatgcatggacaagatatcataatcacttgacgaagctgtaaaatataagcaattaaataagatgcaagattaaataacattacatataaatacttctttaaattaaattatatctatcaaaattaatttacattatttaaatatttctttttaaaacctaaacattgttttttaagtatataaattgaatttttaaaattctttgtttgaaaataaacaaaattaaaaatgttaaaatcaaacttatccgaagatttgagggatctttgtaactgaaattttagaataacattcatcagttagcctactttgaagttggcttggaaaaatatatttatatttgtaatattcattaattatttgattattgagagctggatgaaaacaaaaaatgatcatctttgagaaattatcaaaataatataataaaaataaataatgataaatca

SEQ ID NO: 8875 - DNA, 936 bp, Heterodera glycines
tacttcaattaattatttaattataattactttgcatcaaaaaaagaagacattttctgaatcagttttcataattaataattgaaagaaatttatttgtataaaatcatattagaataaaagaaaataattgttaaaattttttattattcaccaaaatataattacaaaatttatacaattaagtatagaaagtagtttttatttactaacagcaaattggaagaaaaaggaacaaactctatgtgaaaaatattaataatttaaaaatatatcaaaattaaaaaaaaattatacaataattatttaaattaaaattatagcacaaaagattcaaaattcaactcttcatcgtaaaagtaattaaatattatatggaattgatattacacataatttagaataatgattccttaattatataatgaaaacagagtatttaaaatttaatttactaattattaaaaaacaacttttgtaaataattaatgtgctaaataacatcgttgacatttaatttttaaatacccttaatcagctcatgtataactaaataataataaaatttatatatacttatacttttattcgccataattgtgctgttaatgtctaatattcatcattatatctaaataaacaaaaaaaaaataataataaataaaaaagaaaaaaaaatttcaaaaaagtactctttgcaactttcgcctaattttgcacaatagtcaatttaaatgaaagaatattgaattgataaaatattttttcattaattaattgtctaaaaaaagattggtctaaaaaatgaataataaattttttattaatttaattaattgcgtcttctaaacttatatttcattcaattatttgatttaatttaactgaaattaagaaattataataacaattttttctaagattttgcatttttca

SEQ ID NO: 8876 - DNA, 2814 bp, Heterodera glycines
tgcgggtcacgcgcggacttcttccgtagcccgtagtctcgccccacctacttgccgccgtagtcgagtgtgcggcggttttttagcgcaataagctaaattaaacttttatatttgacgttcttttcccattttgttgactactggtataaaaacgattttgaggacccataacatgcgtggttcgacttcattccctgatttttagacttagctcgttaagagctttcgaatgataccaaatttgtttaaaaatttttatttaaaattgatttttggctgatttttgaggcaaattttcgtgatttaaccggttcaaaaaccggtttaaaagctttgccgctcagtttttttgacggtttaggcgttttcagcacctaagaaaacctataaaagtatttttatgcgactttgagtctgggacctatgatggatattttccatgatttaggccactgtttccgccggatcaaacgtcaaactcagcggaactgaattataattgatgggaattgatttgatgctgatttgtgaattatttgatgaaatgacagatcattttgaatcactactgatggtttgagaattgattttgatgctctttttcgtcgattttttttttaaagttaaatatttcattctaaatttgattaattaaaaaatatcctttttttaatccaattgaatggtaattcatttacttttatccaccatagatcaaatattcctcatttagccgccagcttaatttcaaaaaattaatttgggggattttctcaagaatattattttaaaaatggaatttaaaaaaaatataaatattaagtctaaaataagcactttggaaattttctcttttatttggctttcttaaaataagaaatttggctttattttgtattttttcttgttaaaatggcctaaattaagcgcaatttggattttttaacaaaataaatgctattttattttttttgtttctcacccaatggaatatattgaaacgaaaaaacaacaaaaatcagtgagcaaaaacgagcatcaaaaatgatcagcatatcacttctattcatccccataattcaaagtgtgattgatcatttctcaaatgcaattaattcacttctgctgaatttactcgcccttttcgctgattaagtgcaatttgaattagatatacactttacaatggcgtggtacataacaaggatggcacggaattccaatttccgaaaatttttggggcctcggaatgctatccctggtatataatggaaagttagcttagcttttccatccccacattcttttcaagtcttaaaaaccgtatgcccggcgttttcggggttgttcatcaagaataggacatgcattctggccaacttcaaatcccggataatacggtcaaaaaggtaaacaaaccacttttgaatgcaataaaatgaaagcataaattggacagtgttaaaattgtcccaattttcttcatcccattgaatggccgccgtctccccaatttggcatcggttgatcatccatcggcggtggtcacatttatattcgtttgctttggtcagtaacagcttttcaattggtccgttcattcaccaattcaaatggcaccattgacattggcaccgcatgaacagtaaataagaaatgttctgatttggagggttcaaatcttacaaaaataaaaaatgtttttatagaattatcatccgttgaaacgaagctatcatcgtgtatttacgggctttaaacggtctcaatttttattttaaaaatttagaaaacccccaaaaatttaaaaattgaaattttttttttattttaaaaacagaaaaaccaaaaaaaaagatttgtatttgcattttatgaatgttatggcataatgttcattttttggcaaatgaaatattaaattttcagaacgcatttttttcagtttcacgccaatcaaatcaaaactttctcgccttcgatatctttagagaacataattttaatatttaatcatttcctaattacttttatattaatacaaataaaagtgttttttagttatttaacatcataatcacaaattacgacaataattgagctgttaattgccgcaaaatgaatcgacgtttaaggaaaatgtgagaatttttaaatgattgtttttttcggcacttttacagtttaatgagcccctacgaaaaaaatcacagggatggaggggggattttggggtaaaatcattggtaaaaaaccaactcatagtgtgaaaaaacagaaatttacctcaaatctcagtacgagtttgcggtttccggcttttgatttgtaattttttcaaaattacctactccctacttttgtttttcattgggcccttaaactataaaaaagtgccaattttctctttttaagtaattttttacgtttgcatttcagttggatttgtggcgacgtttggatggacattctcccatcttttgaacgtgctgaacttggcctcaaaattgcattgctttcttaccgttacgatgctttggtggacaaacattttgacggaaaaaaagaattgacaatttggagaacaatcgaaatttgcgagggcattggaccagaaccgaaactgtctgtacagatcgatgacaaatttgtggcatttccgttgccggagcgtccgctgccaaacaaaatccgctttaattttctctggattaagtaattcaactttttttttgtgtatttttagacatttttttctttcttcaggtacattgaccattccgacagtgaatttctccgttccaacgagca

SEQ ID NO: 8877 - DNA, 2363 bp, Heterodera glycines
attctcactgatcttgaccaattgaatttaatctgttcctatggactgttccccgatgcaattggcgatgatgggccaaatgcaactgctggccaaattctctccaaatggttacacacgccgagcaaaaatggccaaccgaagcgattggtttgtgcgaattttgacgaagaagtcaacttagattgggtcaacagttttaaggaggtgcgtttgttcacattctcataaaattttggtatactaccgctgaccattcaattttttgaaaaaattttgaaaatttttaatcggatgggtcaacaatttgaaggagttgacctgctggttgctgccatattttcgttaaatgaccgactgatgattgattgcatttgattttcgcttcctttttatttagacatttctcggtgccaccaccacttcggtcagctacaaaattccaatttatttgcattcggaaacatcgccaattgagccatttgaatcggtgaacgagcgaaccaaagaaaagctgacattagaggaaatgtcacgttatgatggtggtggtggtgatttgctgttgaagcgatgcccaattagtgaaaaagcgtcggcggatcaatgggaaaacgaccaaaatttggacgccaatttgaactttgtccaatttaatttgtgtgctggcaaaagttcgactgggtaagcgtaaaaagataattcacagttcacacctaattcaaattgtgtttaatttcaggccttatggccaccagcggacgaagaagaaaaagcgggtcaaagcatcgaaatatcgtcggattgcgcggaagacgaattaattacatttgagaaatggccgatctcacacaattggaatttgattttatgccatcattttctctcggaaatgcttttgtgattctttctttaatacatttatttgctactttttttggtgtgcaattttctttagtatcaatgaaacgattgaccatttgtgaaatactttttacttggttaagaattaaaaaatttagcctattaaaatatttagaaacttttttattatattgtatattttttgaaaaatttccgatttcttgcaccacataaaagtggttttgaaaagaaaaaaatagtcaaatttatgaaccgttaataatttgatttccgatcaactttttaccgtcggatccaatcgaaaaatcttagtcgacccatcagccccttttaatgcatcccgccaacccttaaaaatttatttttcagcattttttgatttttggaaattttttgaatttaatggaaattttttcgaattttccaaaatcccgcaatcccgcacgggatcccgcaaattttaaatgcgggattgcgggattaatcccgcgggatcccgtcccgcaaaaaattttgagttccagtcccgcagcgggatccgcaaatttgaaatttccggtctctatctctgattaacaaaaaaaaaatgtgggaacggtcccagtcgaaaatggatctttcactacccgatctttttacatgaaaatcgcccttcaaattttcccatattttctgcacttctgctgactgaccaattacataatttttttccactaaatttagcaatgagtagtcaagctgaagccgttaataagcgaccgcgtccttggaaaatttgctgaaaattgacccatggctaaagccatacgaaaaggaaatttgccggcgcctcgccgaatttcgtcataagcttaattacattgaagaaaaggtacacaaattggataaattaaaaagttaaaattcgtaaaatgttaaaaacaggactaattttagaaatttgtaccgaaatttgacaaaatttgttaatttttccagtgcggtgggctcagggagttcacgcaaagctacaaagtgtatggcatgcacattttggaggacaattcagtccaatgtttggaatgggcgcccggcgcggagggcatggcacttgtgggcgatttcagtaagaaattttgattttttttcacagttcatttggcccatcaaaatagatggttttgccatgccatgacaccaaaaaaaaaacaattttatgcctcaatttttcctgttttattgggtcgatttttcgtaaatttcgggagtttctggcgatgtgccaataggcgtgtaatttgggctatccgacatttgcggatttaacatttgcggacccgacatttgcggataaccccgacatttgcggacccgacacttgcggacccgacaattgcggactcgacacttgggaatcacctttttaataaaatcgtgttaaaataattagaaaaatcatttttgaattcaaaaaaaaattattttttaattaaattaat

SEQ ID NO: 8878 - DNA, 4710 bp, Heterodera glycines
gatggcagcataaaatgccaatgattttttcttactacccttgtcatgtgggaccacttcgattaaattttattgcccacctgctgtgggcataaagatgggcatgcaattcttccatggaagcaccacgtgacttcatctccttaaaatgtacaggcaaaatgattagctaattttttattatcatattggaaggtctttattgtgggaaataatccgtgaatatcaaggcgggtcggagaatttgggatgacgtttcaaaaatggcgccaaaatggccggctccaaaatgaagctcgtcccccacccccgcccccattttatattgcaatttttccaatattgccgccgtcaaagaccaaaaaaaaaaaaaatcgccggacgaatccgtccgtatacagccctccaagccaaaaccaatcctgacacaaccctggaggctaggaacaaaaacttaccgtcaacttattaaccaacagtaacgatcgacagtcccgaattcggaagaacgctttcctggccacttcaaattccatatgctgcaaagcttcagtgccaagaagctaaacaaacaggttaatgggtccaattaggtttcccggctttaaataaaacaaggcatttccaccgactttccaatctcgttcagtgacacccaacgaggccaattcatatgcctccctaaaaatttatgtaaactgaaaatatttgatcagtgatcatatgcaaaattaatatcaatgcatatgcaaatttaaatatccatgcatatgtactatatttacactaacaaaagaaaacagacttgaacattttgttgtccaaaaactgcagcaactgactaaaacattgtttaaattgattgacggttgaccatctgctgcttttaataaaaataattttaatggagatcacctggtcagcggaatttccaagctttgcttaacaaaaaggtgcaaggatttaatttgtttacagtaagtagagaatagagcccatacttttgaaaaaattccggatcaggatcaggattagaaatatttgacccgggccggatttcaggattaaaacttgttcaggactcctggtccgggtccatattttaaaatataccgggatcaggatcaggattctgaaaaactctgataggatccggtcctgtccgggctctagtagtcagttccccatccgcttcccctgccgacatttaccatcatggaatacatgtgcaaaatgtacacagatttgcccatgaagccgaccacgaagccttgctgtgagggctccaaccgttgctggtacggggtgaaccagtgggatttgatgttgagcacgccatggcccgagtagcagacgaggtcctcgttggccgaattgaacgccacagtggaaatatttggttcctgtaatttcataaatgctactgccttttctgtatgtagtatcagtttcatttttgtatgtaattggactactgtattgctcatacggtatttcctaaaatggagctagcgtgggcttcatttttcaaccatcctcgaaaaggggatagtgtttcctttatggtgggactttttttcaattgccctcgaacggagggggggggctttattcgaggggggaggaggagcgaggggaggcggctcgaattcagaggagctgtattttgcggtaatgcgataattatttgctgcaatcaatcaaatcgacagtatcaaaatttggatcagtaatagatctctctactgtctttatcctttatcatattcggtgtgcagtctaccgtatactgtatttgtttgatcagaagatgaatatttgcagttaagcgctttacaatacactttacctgatttaaaatttcacgtttctcggtgtcgtacaaaacgcaaataccctgaaaacttgaataaactatactgtaaatcgaacgcgccataattcttccaatcaccttttcatcaacagttgccaacttgcgtttgctcagacttatgtcaacacatcggatcattgtgttcagacggacctaaacagacagaaatgggaatgctaattaagtattaggaagaaatgcgtcattgaataattaattttgatcaaattaaacttccactgaccacaacaacgggaaacgggttgtccacaaagattttgctgacctaaaagcaattagtgggcacattaaacgcgtaatttaacagcaactgtaataatttatttgccaatgcccggaaagaaagaaaaggtccgataaattttacttttttcaaaaaatatgtgtggttaatttgttaatgggtttatgaaaaatttgactttttagagtcaaataatgaaaaaaaataaaaaattaaatatgattgattggctgctgttcggcggtgtcccccaacgaataaaagtttgattttttttaatgaatttcattaggtgtaggatctgcaccagggatggcattccgaggcccaaaaaattttcggaaatcggaattccgggggtcaaaattttttcggaaatcggaattccgacgtccaaaaatgttggaaatcggaattccgtgccatccctgatctgcaccctcctcccccctctctttccctctgattagggccaactcatttcttaccaatccgttgcacattccagctaaaattgtctcccgaccaggcggaccaccaacaactttgatgtatctaaaatatttcccaactcaatcgaccgtctctccctctctctctgatcattgccatttgatcagtcagtgagtcattagtggggtgacctgatcagcgactccatgctccattcccgctgcttaatgcccttcaggtcgtaacatgtcaagcgcctgttctggcacaggatcaaatgctgactggtgatcaccagcagagagcactcaaaattttgactgatccgatccatcagcttgtactccaactgttcgccctccctttcgccagccgactggcgatagatcagcacccgatcagtgagttgaattgccagccgattgttgtagatggccacctttcgcacaagatcttggcaacggatgcgcgtggacttttgttgctccaactgctgcacaaccacatccgtctggttctcgcggaacgcgtaataatcttggatcagttatttgacttttttaaaaatatattttttaaaattgacattttttggggaaggggagggcaaacagatgaaatgtatttcaacagagaaatttaacaaaaaaatccaagtttctcaaaaaagaaatttacaattttttagtttttttttactggggaaaaactgggaaattaaaagattgaaaatgttccttttggagggggatgtggtgctgcactccagggatgtgtcggcatgccgatttccgattgacgacatttttgggcttcggaattccggtttccgaattttttttgagggaatcggcacatatccctcgtgcactcgcttcaggctaggtttttttgtctgcattttgccactcgccatttcaaagaacaaaagttatttcctgacttttgtgcagtgcatgtatcgtgttcatcatcagctggtagcaaaccaacgacccatcaatacaaccaacttcaaattttgcattactgtctaacccatcattggccactactccacacttaccaaccaaaaattgttgcttgaacaacaccatgctccatggccaagcatccaactgtgccatggcacccaagtcaatgcctgtaaaaaaagtgccatacttataggcaaagttgggaaaccaatttccacaaacaaaattctcgaaaacagagccatttttttagtgacccatgctcgagaaattttgttttcaaatctcgacccaatgaaaatcaccggtggattttttaagcataagatttccaggacgagaacaatttgtttttgtttacccccgacggtgtgcaaatttaacattcgatttgatccaatggtgaggaagaagcatccgttgttgaacaaatgcactgcagtcgggtcgtagtccaattgtttgtcacttcgatgggactgcaacaataaataatggttaaataaaatgaccttggaatggtaatcagcaggagtgatcactgatcagtcagtttagagtccaaaagaagttcgggggcttacgaattttcaatcccgcggaaaaagaaataattctcgagcatcattggttccccggtaatgggctcagagttggcagagtgccaaaaaatctcaaaaacaacccacgaaccaaatggccctgtgaatgggccaagaatccaatggattgggcccaatccgccaccaccagcatttcaccactgatctgattgctgagttttcgttcaacttttttttttttttgattttgtcgttcatcccacttggaagcaatttgtgcaaactgcagtgcccatacgggttcacctcccggcctttccaggcgtgccgtctcctcaccaatgggctattaaacacaatttttgcaaatttatttgggcaaaatttgcttttggcctactgttgggcctgatgccgaccggacagacactgtgccgtcaaagaagccgactgcatagaaaaagccatccgaactccatgcacagcttgtgcactttgtgtgcaccttctgtttgcttaaatcaatttttataaaatcatcttaatatgctaatatttcaaaatggtgttatgatt

SEQ ID NO: 8879 - DNA, 2006 bp, Heterodera glycines
tatactttaatttatccaattttgaaattcagcagtcgccaacactttggtgcccgactttcacaaattggcctttgcgctgctcagcggactgcccaacgaagtttctttcggtcttaacattctcaccgttctctcccaccccggttagttcattttcatttggacatttcactttcttttttcatttaaggcccttttgtgttgaatttcgccaattgtccccagcttatcgctcttttggtcgccctttgcggcgtttgcgttaacgttgaaggttggctgtggtttctttgggtttttcctttttcccttattaaataggttcgtccaatccgtttttgctcttcgattggtggcgtcgttcttcctgctacgacttcgcctccttttgggccgactcgggcgttgaagaggctcaactttggtcgattgtttataatccggacggaatgaaaatgaacgcgacggggagtgaatttgaaaggaacacagcgcaactgatgggcgacgaccgactcgacctcgacagaccgaccaattggagggtcttcaacattttggccgtcttccacaatctttcgtttgaggaggcgaacacggcccttatgggcgaaagtcacgcgcttgtcaggtcgaaattggatcatgaatttcagtttgttttttaaattatttttcaggtttttgctgctttgcttcaattgtcggtggcatttgctgcgtaaaattgcctatgatacactgagtaacatcgcaagaaatgtttgttccccgctaataaaaatgcatttctatcagataaaattggtcgaatgaacgcgactttatgtgcgaatggctgacacagcgacggcgaaccgccaaggattcgctgtcgttggcccatttgcgacaacactccgcgcactttgtggtccatcacaactcatttgcaagtaaacaatgatgagtaatgcattatgaaaatggatactaaatgtgctcaatggtcaggatatccattgcactgaaaatgcgttggagtcggcgatgctccaacgggtggagatgggctaccacggtacaatctgatcttgaataagcgagttcaaatgcaataatccatcggtgcttccctacaaagagtacgtctatcacattcggcaacagttcgagcgcagtagggaacggccatccgcgcagaatgcttactcagactttgccgcccaagaagcgatacgacggcacgcatttgccaatttgcgcaaagagattacggtacgtacagtgcatgcagtgcaagtattctgtaggtattggcgtgattttccattccgtcaggaagattcggagggtccggtgacgcgaagcattcgcctcacttcagcgctcattctgcgcaacatttgtcaccattccgtcgccggacgtcgcaaactccgcacgcatgagagtttcattaggtgaacaaaaacacatgaccaatcaaagggaaaggcataaatggaccaggaaaacaataactgacaatgagttaaacatagctaattttcatttacttgatttgtgtattgttttttgaaaataattgcaattctaacaaaattatttcattttttactcttcctttagttggctgtcactctcacagatggaatcagctcgtacattggcacagtgtttgagtgaaatggcgcgacacgcgaacaatgaaacggaaccacaacgaaatgtcattaaacggaaaaccagctgttcgtctggtgatctacaacagaatcagtcaagctttgcgtcagaacaaatggatgacaatgacacggcctaacacaactttcatggatcatttcgtctattgttaattgcgagcgttccttctccgtcgcgaatttgagcaattcgaatttctaatctaatttgaacaaaaaatcattaatcggaaattcaaatttcttcacttttacactagcgccaaagattttctgatgagtgaccgtattccctccatttccaatttgtttatt

SEQ ID NO: 8880 - DNA, 2233 bp, Heterodera glycines
ttagagttgtacgggaccgggacctggtactgaaaaaacgtacaactgagtaccgaagtcccggttttgaccgggaccgggaaaaatcccggttttttcccgcaaaaagtcccggtcccggtttatctcaaaattctcgttcccgtgggatcgactcatttccttaccaccgtttccttaccaccgtttccttaccaccgtttccttaccaaccgtttccttaccaaccatttccttaccaccgtttccttaccaccgtttccttaccaccgtttccttaccaaccgtttccttaccaaccgtttccttaccaccatttccttaccaccgtttccttacccccgtatttggttcatttccataccaaacgtattaatagtgataaacattgagattaaaacacacaaaaaaatttattcactgttttttagacttagctcgtcaagagctttcggattatcgcaaatgtgttcgaattcgatcgtttaaaaaaaaagtttgaagtgtcaaatctctgaatttttcgaattttaaaccgacccaaaaatatgtttaaactcaattccgcaacttccgggaacccgaaaccggggtaaaaatcccggagcttcagggacttcggattcttacagtacctgctgggtgaaatttgaatagttaaacccgggccttacttcctaattttcaggcccctacaaagcgatttgaaatcaattgtaaattcgggaaaaaaattctcgatccaatttaagaatccgaggaccggataaagctggtaaaatagacaaaacattattttaaaattttttacttcggcttgtgaaaaagtttgaatggtcattgttttgaagctttgtacggttctttttttttgttagaattgcttccattttattatctgtaacattaaacataaaatcaactgacttcttattcatgataagcatccaattgttgaaaatctcttttctattgtcgaaatttttgcaaaaattttcgaaaattttttggtatggaaatgaaccaaatacgttggtaaggaaacggtggtaaggaaacggtggtaaggaaacggttggtaaggaaacggtggtaaggaaacggtggtaaggaaacggtggtaaggaaacaacaccaacccgttcccgtacaactctagtttatttcttcaactcgcgcacacataaacagaatgccaaagttaaaaagttaaattattttgcataaattttttgcttttttttcactagaatcagtaaaaaaaaatctgaatggtgagcgctcagagtgattctcctgttcctaattggctgcttaacatcggaccaatttcttgccatgcgtggaacaaggacaaaactcgtaaattattttctttttatttaaaatgaattaatactttctagaattggctgtttcgccttccaacaacgaaattcacatattcgctcgtttggagactgtttggaacccgttgcacgtgctaagagaacacgacttgctgatcaccggattggattggtcagtgggaaagtggcacgaaatgtgggatgatgttgttgtttcatatctgaaacatttcagggctccgaatactaatcggattgtttcatgttcgcacgacaaaaatgcgtttgtgtggacatgggaggctgaaaagaacagttggaaaccggagatggtggtcgttcggataaacagagctgccacctgtgtcaaatggtcgcccaacggtcggtttgaccattccttactcattcattggcccattctttaaaatgtctcattttttaaatacatttaatttaagaaaaatgtttatattcgttttaatttatttttattaagaaaacaaattcgccgttgggacgggtgcgcgtttagtcgctatttgttattacgaagtagcgaaggaatcttcccccccccccttctaattgttggcttttaattggaaattaagcgtgaaaatgactggtgggtagcgaagcaaatcaaaaagctgattcgttccactgtcacctcattgaattggcatcccaacaacattttgttggctgttggcgcctgcgacttcaaaacgcgtgttttttctgcttatgtgaaagaggcgagtgaaaacgcaaaaataacaaatggaaatttcactgcctttttagattgacgaaaaaccaacgccaaacccctgggggaccaaaatgccatttgggagaattgctcaaggagtaccagt

SEQ ID NO: 8881 - DNA, 5364 bp, Heterodera glycines
aaattgttttgtgtcatttgtcccgttttttccgtttgctatttgtccaatttgcctcaattgtccatcaaagtgccatttggctgtccaccaactcgtcccccatgccctcccattcgtccgcctcgccgtccatggcgtcgtcctcgagcagttcgtcctctgccaattggtcaaagtccgactcttccgcccccaagtcgtcgaccgcctcagtgtccaagttgttttcctccgccaccacttccgcactcgacggtcccttctgagcattctccgccgcctttggcacggctttcactgctgccattggtttgacttcaaattggcaattttggcacaatattaaatataattaattatttacttgggctctttttgtcattggcttttgccgctggggattttttgtctaaattaattcaattttaattagcatttaaaattaataataattaccatttttaggcactcctttccctttggctggcttagcctttttgtctaaaattcaaaaattaactgtttaaatttcgctttatattaaaatccttaccctttttgcctttggcgtccttttttccttttccctttgattttgcgtcttttttaattccttaattaattatttgattaattagttaatttgtattaattagtccctctctcttttctgctttacctcctttcgctgctcctttcggcgccgcttttccttttgctggcgttgcaactgttcctttaaaagcatattccaattaatatttattatcaatttatttatacctttcttatttttcactgcctttgagttggctaaaataataaaatatttttaaatttttaattaattttggccacctgtctcaagaataacagccatcaccaagcaaaccatggccaggaagagaatggcgcgcattttaaaggtttttggaaaaggaaattattaattaaattaaaataattcgaatatgtttttcgcttggctttcttttggcttttatattcctccaaaatcgtttattttcattgaaattggaaatgtttttccaaaattttttgcccggaaatgatgccaatgccaatctttttttccattggtctgtatatgctattttcgttttccttcctttgattttaaaattttatttacaaattactcattcaaattttctttttgcatcaatattcttaataatttttgatgaaaaattttaaaaaaccaaatttctctattaatttgcttctttttaaaaccttaattatccgttttccatttatattataaattaatttccgatcccttaatttttcattacttaggcatgattatgtaaaaaaacatgaacccacgggaccaatttcttagaagaattagaagaattttgcaaaatgtgaagcgaaattttttggaacattgtttggtgagaaaattaaaagacaatgatttgaattaggtattcaattatttatacacaaggcacggatttaattgtaaaaatcacaaaataggaatataaagttaagatgggtttgaagatttgattcaattccccattagagggtcccgtttctccggtttacgaattcccattttcggtgatccccggtttaatcattccccgcctgtggggaccggtaaattggacgccagaaaattggacaccagaaaattggacaccggaaaactggacaccaatttcttaaaataaagccaggaattggggtgaaaaataaatttatgaagggtaaatggattaatgaattaaggaattatttgttagagtaaatcaggcattcaacatgcacgatgattgatcaatgtgccaaaacatgcacgaaaatgggcgatggttagtcaatgtgctaaaattgcataaaaaatggcaatcctatctaaaataaaactttgtttctttctttatgaatgttatggtggctttcttctcctaatgttacaataataaaaaccttatttattcccattttattacgcttataaaaacacagggatgtgcagactaaaataaaatcttttagcaaaaccaaaatttttgtttatttatttttaatttattttatatccaataatgtccaattttccggtgtccaatttaccgggagcccccggtactaccggggatccccacccccggctggcaactcaactgaaaagtcagccgatttttgagatgatttcttttttatgtcactttttgaacaaataatttttcgaaaaaataacatttttacttgtatcataagtagggtgcggatttttaggggcgaaaaattccaatttagggacctaaataggggcaaaaaattcgcaaaataggggcgaaaaagtttcaaacgtagaggtgaaatttattaaaattgccgttttctctatgtaataagttaaaattaagtgattgcagttagaaatgaagtacattccgaaattttcggggtttaagggtcgattcttaggggtgtatttttcagaaatttttgggtcgattcttaggggtctgttttttgaaaatttttaggtcgattcttaggggtgtatttttcagaaattttttgggtcgattcttaggggtctgttttttgaaaatttttaggtcgattcttatgggtgtatttttccgaattttttttttggtcgattcttagggggtgtatttttcttttttattgcattcttgttaataaatttccgaaaaatcgcgaaataagggcgagaataggggcgaaacgccaaaatagggacaaaaacttattttaggggtgaacactcaaaatagggatttttaggggcgaacatccaaaatagggattcctagggtcggatagaggcgttaaaacgaagaatttccgaacaaaaaatgtgtttttcgtgcatttctcgtcgagttaaagccgcagaaaaaataagtaaaaacctaagaatccgcaccctaatcataagttcgattcttaagacttttttattgcgaagatagaaaaaaatggatcctaaaaaaatattaacaaaaaaaagaagataaaaaaaaagatatgaataataaaaaaagattttgaataaatattcaattggaggataaattcattcacagtaaaacaaaaattgttaaattattggtcaatttttctttatttttaagatttttacttaattaatcattttttcatttttcttcgattatgattttaaaaaaataacaaaattatcaatttttagcctaaaatttccggtgcaccccaaaacgtcgtcggccgaaacgtcgtcggaagactttttgaaccataactttgttcactgtcaatcaaattaagaattgttggtgttgttcgatagctctatgtgtttattattaatttgcaaaatctcaaaaagtttggttaaggttcaaaaaagttatggccagaaggaactcaaaaacccagtaattcgaacttttttttgctctgatttttttgtgcataaataaaaatttttgaaaatttgcaggctaatagcatttttcgaatgctttcgaataataccaagaatgtttaatttggttgagaaagaaaaaagttatggtcgaaaaattcgttcgacgacgtttctgctgacgacgttttgtcctactccggccgcgtcgcgcgtttcggggccattctttttttgtttaattaagacaatttgagtgattttcaatacaattttttaaatgcatttggtgcttggttggcgctggaaaagcgttaccgaattttttttttcctaaaattgaattcgttaaatttaagctatataaatcgacgattgggatttttataatttcgcgaaatttcggtgccaaaagtgccaccgatgagaattttgcatttatgaaatttgttgagaattatctaattttttaagatttaaatttccctgctaactacgactccctccccttttcaaaaaaaaaaataattgaaaatttaacaaaattgtctattctagtagtgccactgccgaaaaatgccagcataaacccttttttccgatttcggctccccattttccatccgtctatttatatatatataatttttttatttccgttacaacaggtgttcggcggagcgtcgccctcctccgtgtcgatgagcaacggtccgcgcgaggagcaaaactttcacctgatccgcgttggctttgacgacacgctgcagggcgaactgatcaacgcggcgacaatcaattacaaagtgagtgcaccggcgaactgcttgagagcaataaatgaacgcctcgagcgtctcgaacgggatcagtttccatcccccctgaaaaattattttaaaatcttcaaacacaaatttttcgaaaaaaacatcttagaattttttataagaaaattttaagaaatttaggtaaaaaattttaagcgatttttggaaaactagttttttctcataaaatatgaaaaaagcctgaaaattgtcaaaggatgtttaatttttacttttaaaacttcagtgcataaaagtggagaatggcgatcgaatgccgcagctgatcgagcgtgcgttggacaaacatttgatggacccaactgaagcgcccaactactgcttggtccaattgttgccggacggaagtcggtggcaaatcaattgctgtttttttcaattattataaatacaaaaactatctaaacaattaactacttgctgatcaatcgttttttgtctttccttctgatcaacttgttgtggccaacactcactgatcaatgttgattggtctctcaatcaattagccgatttcattctcggaattctgatcaatcatcttgtcaacaccaattattaaactaaataagacttagtgttttgctcttttcataagttcgccgattagaaaaggatcaatgacgtgaactccacgttaccacttactaatttttcactctattctttacctggcattctcggaattctgttcaatcaactaattgacgccgatcagtaaatttgatttgatatttcttctgattttgctccattgtctgatcacgtttttttcttcttacatcaaaattggatagatgggaatttcatttatggcaaatttttcattaaaaagtttcaatttcaggcgagttcgtgttccccgaccattgcaacccgttctacgcggtcgcgcccgaccccagctcgcccatgttggcctgcgtgttgcgcaagcgtcgtggcatcggccctggaggagcggcggatagcggtagcttggccaccatgttgaactgctcgtccggctccacgcgttcggcggccgcgatgctggcggcacagcagcagcataataacggcacaaccggcggtggtggtggt

SEQ ID NO: 8882 - DNA, 5768 bp, Heterodera glycines
tgatcaaatttcccctcaaccattctcaatcgggagttgagggtgttttaattgaattgcgcgcgtgacccattaattttatttttgacccgaattgtgccaaagtgccaaattttgaattattatgccaaagtgccaattttgaattgtgccaaagtgccaaatcttgtatcgggcatttattttgaccaaattatcctatcactttttcatttttgaacaaattccaggcaacttctgtcgctccgtcagccaatcttttggcacaacaattggccggtcaatccgcggccgccgccaccgccaaatttggcaccactccacaacgccaacaacaacagcaattacccgcaaaacaacagcaacaacgccaaaagcaacaacaccaacagcctggtcaagcaggtgtgccaatgccaaaatcaatacaaaatctgttgtttgatagcttcgagaaatttttctcgacaataaaatttaaattaattacatggagtttttcgaggtcgagaattttcggagggtatcaaagaacaaaagtcgttcagcagcagagatcccgaggcttacttttttaacaatattaaaaaaaactgtgaatatttatttctccctcactcacggccatttaaaattagtaattaattagcgactaattattaattaattggcaattagcaacatcatcggtcaatttccgttataatttttggtcccttccaccaattgacctttgatgtttggcgatgattttcctttgggtgccgccgccctcgcacttttgccttttattggcaccgcgacacagtcattcgttccggcacttttcagcacattttggcattggcggcgctcagcagcagcaagtgccggtgctcattttgccggaccaatcgctgctcgagcggtacgtgcagcacaagcgggacgcccttgaccaattgcacaacagcgacgacgacgaccacgacgccgcgggggacgccgctgctgctgttgacgaaggtgggccccgggggcgatgggggggggggacaaaacgccaaaaactaaccaaaacgacgacaacgaggtcagtcacctaacccatcccatcgtcaattgggtggaatttgagtaccaccaccgacccgccgccaacaaaaaaggaaacttgtgaatgaatggctctgctgcataatatcccttttgccccctggggggatggggcgacaacaagtcgatttggggctgggcgagggggaggaattaaaggaaaagtgccgacgccatcatttgtataatcctattttattagggggccatttttttgcgatttacaaattacgaattatcttaaaaatgcattgcggatcccgtgggaccaagcctgaaatttgcggatcacgctgcgggactggaactaaaaatttttttgcatgacaggatcccgtgggattgccgcggcacacattttcgaatgttttgacattattgctcactcaatctttggcactctccatttttttgtctctcttaagacaaacccctgctggtttcagttgatttgggaattagtttatttagccccgagctctcaatccctcaacatttgggtgctcatttccctcccatccctttggcatgccaatgccacggaatgccaaagaatttgtcagctcgatattttgagtctcggggatttgtaagtcttgcgattcccttttcattccgttccccttttttctcaaatttccttaccccaaaatttctctcggtcttgaccttgactctcggcatcaatttttgccattctcggtataatttgccctcctttcagcgctccacaccgccacaacgccgtcggcaccggcactgttcgttccgcgcactgctgcggccgccgccgtcgtttccgcctcgttgcctggctccaagcggaacagtcagatgttggcggcggtgccctccggcgccgaactgccccagccgttgaccggctcattccactcggccatcgaggcgaccgcggccgatttgcgcgccgctgcggcggcggcacagccgcggctaaggtgggcaaaagccaggggagcaaatgctgaaagaatctgatcaagaagataaggggacgctgatcattgggcagactctgatcggaacactctgatcagtgaactctagaatagaaaccgaaaatttcaaattcgcggatcccgctgcgggattagaactcaacattttttgcgggactgggtgccgcgggattaagccttgcgaatcgggatctcgcaaaatcccgcgcgcgattccgtcccgtgctgctggtctctagtctagaacatagaaggtagctcgagactcgaacccacggcaaaaatcatcaaatggaaattccaaattattcataactttactcaaaatcaatcaaatttttaatttttgatagaagccgatagccctaatttgtaagtgtattttccctcaaaattgcatgcaaaaaactgctaactttcaaaaaaagttatgaccagcagaagaactcaaaaaaccaaatttctcgaacatttttggtcataaagaaattttttgaaattttgtacgcttatagaaaatactgtgccaagggctgatcgccagaaaatcaactgatcaattttcaaatcactctgctgatcacaaaaatttgtctccactaaaatttttaaaactttacaatttttcctttccatttaagccaatttcatgaaattgaatttccaaatcttaccaatgagcacatattgatttgtcccaattagtgttttgttgtttggccttccttgttttgttcgaaaattcatttaagaagaagcccctcataaattggttttgccataattagcacaaccaaaagcagaagaagcggcggcggcacaccgtcaggagaaaaagagaaccgtaccgccgctcattagccattaaccaaatatgcaaatttaattacccatttaattaccccactcctcgcggttttgtcccgcgtgtgtccaaattagtatttatatgtatgtatatttatgtaaactttccattcattcatattcatagaaattgttcaaaaattctttcatttttggcgggggagaagggctgggaaatttttccttttttttgaaaatttatccgctaaatggactgaaatgtatacactaattagcgattagatcacagcaaaaatttaaattccatgccatgtgggacaattaggggaataattaccattaattaattaattgacaataattatggccatttaaagacgtgctcaacagcagcagcaacaaatccctatactcagcacacaaacgtttgagaagcccaagtcgctgtttgaggagcaaatgcagcgccaggccatccaattgcgccagcgtggcgccgtggcgcgccattcgctgcacgacgacgacgctgaggcggcgccggcagcaaagacggtgcaaaaccaacagcggcagcataaacaggcggcccaagcagtgccagcaacacaaccacagcagcggcggcagcgttcgggcgacgccactgctcgtaagttaaaattttggcctatcagagtctatgttttttcggcatttttgactctagtccaaatccgggtcccctacattttttgttcgtccccgacctcgattcatgatattgttagcttttccgaccctgcatatgattcccggcatttttggctatcccaaatccggatcccgacattttgttcgtccccgaccccaattcatggcgttttttccccttcccgaccctgtctatgtcctcggaatttttggtttttgttcgtccccggccccgatttcatggcattttttgccgtcccacaaaccctgtctccggcatttttggattacttttccttacaaattaaattttttttttaatttgaaaaacaatatttaattattttcctccaatttttgtgggaccatcccccgccgttgctgacgccgttgttggcactactcacaaccagcagctggtgaccacacgctcaaaccgttgcagcatgagcagcaacggtacgcggcacacattccgctgagcgggcgccagtcaacgacaagttgcgagtcggcgaacaggtgggagaacagcgaaaggggcataaggagacggtttttctagtcgagagcaattaaagtctcgagactgaattggctttcgaaaacccgaaaaattctccaaaattcggcaaaattattccaattcggtatctaatgagctactctgatgaggaaaagtcgcgagaatggaaaaccttgactcattcgagagtgccttcccccgtcccgaaaaataatttttaaaaaatttttatcttaaatctaaggaagaatttttaaaggaaaacctcaataaaaaaaacatgaaatttttttaaattttgaaattgccaaagaattataatttggcattctgttaaattttttcattcgtcattttttaaaaccgggaaatatatttttgacacatttgtccatctgtcccgtgaaaactgcacttttttattggtttattattgtatttgtttgtttaaaaagggtggtgtgatttttggcacgtccgcccattgacttttgatcggtcacgggcgacaaatgaatgtaatgaatgatccatcagttttttgagattattatgcattggcgaagtggtgaggcttttgggaataattgacaaatttttggtttaaattctgatcattaatgatcagaaaatgagagagagtatgaaaatgatgacagagagagagacagagagagcgagggagagatagagagagagagatgggggagagaccgggacaaagaagagaaagggatatagataggaggaaaaaagagaaagagagagagacagcgagagagagaacgagaaattaagagtggcagagagagagtgagagataaacgacaaaaaaaaaaggaaaaaaccaactaaaaaaggggattgagagacaagggaaaaatgagagggagacagagagagaacaaataaattttttatttgttgtgtcacccgccgccggcgtttgaccgtccgtccgttcattttttgataccgccgacagcggcaaggccaaatcgttcgcataaaagtgtgaacatttttgagcacctaatttaattcattttttggggtaagcgacgaattagcaaagagtacggtattacactgggacggtcattagatactgtatggttttagacttcgctaaagccaatcccgtgacccgtagatgaaccaaacacaaaatattcttcaaaacttgcctaaaaattcatcgaccctggctatatcttctagccacggtggcccagccaaatcacgggcaattttaatccatccaaaacactgtcggatcaaaaccgtgtgtcagctgatcagtcccgacaggtttcatattgtcaccgaataatcagatgaaaacctatcctctgcctcaatctgatgatcagtcagtgatcacattgatcaggcaatggcattttcgtgactgatcggtccacagactactgctgatcaccttcattattatattgatagagaggatttgccaataatcaattattctttatcatcatcattcatcactattttatcacccatttttgcttcttcttttctgtcccccgtttgtctcccgccctgctgctgcttctgctggtctctcccgtccttcaatctgatcacctttctcacccccccccaataaatgtatatttggccat

SEQ ID NO: 8883 - DNA, 919 bp, Heterodera glycines
  unsure (1)..(919): unsure at all n locations
agctgcttattaatttgggtcaattgcggcacttttcgagtgatcaccagccgatcaaaaatgctttgctgtccccattatctgatcgcaatcggatggngactctttcgtccctccaaactttttccccnngtctccccngcttccccctccnnccaccctgttaaaactcaagtccaactattgctccgttcatacgatcaaatactctctctgatccatcggtggctggccgatcggctggctgatcacctccatcattattctttctttgtcaagcggtagtcattcagtcagtcagtcccccccccttccctctgatcactcaattacgaaggagtgaaagacaatcaacacaaagggttgggttggggaggggtgatcaattgtctattgtcctttccactcttgacacaaagaattggagtaatcaggttgatcaattgtcctgtagtgatcaggttgatcaattgtcctttttttctctcgactcacttaacccctgctgctgatgagagaaagcaattgaggggacttgcttctgctgctgttcattgtttatttttgtgattattgttactttttgtccttggaaagttaggcaaaaaacgttttctttccgtgtcatttttctattgtagaatacagtattatcagagtggatataataccgtaagtttttacagtatttgtcatcgaatttcattaaaattgggaccagttgaatgtgattggaatgatttgaacttttgaaattcaatctgtgcgcttctgataagcattcgtatgcttattcacctgccccaagccgaccaatcaaagagaattgatgctcgagagtctcgagtataattagaaaatatgaaatttctttaataaatagctagcaaatttcaaaacatttaacaactgctttaca

SEQ ID NO: 8884 - DNA, 4484 bp, Heterodera glycines
  unsure (1)..(4484): unsure at all n locations
ttccttaccntttttttggcatttcgttttccaccacaacaccagcaacaacagccacaactactggtggtgatggtgccgtttctgcgattgtgctacgcaaagcgctgctccatccgtcggccgggcccgtcgggcgccggtacagctcggagtgcttcttcacgccggtgaactgccaccattttgtgcgccgtacagtgttcatgccgagaacgttgggcgccgccagcggcgacaacacatttgccgcgacgacgacttgttggcacaatcgaaagccgaagaagcagcagcagcagcaacaacggcatgaaaaccagaagcagtagtagatggaggcggacgaggaccaaacaacaacattttcggcacagcggcgctcggttgatcacttaggctgctgcttatcagaacaacgcttttttgagacaaattattctagatgaatattgtttaatttattattgttttgtgcatttgatttagttttttttttgccattattttttcttttattttttattaatgttatttcttgagcccgaatttcatgttttatttcttttgcggctttattatggcgagagaagcccaaaatagcattttctccgaacaatttttgatttcagcgacttacatataaaaacataaaaattttgacgttttggcacaaaaaacatatggcacatatttcgaggtttggcacatattttggctttttgagaaaaatttgtaaaaaaaatacaagaagattgtaaatgcaccccttaaaatcacctttcttgctatttttacaacattttcaaaatttccttttttatttcgaatgtcgaaagccaaatcgaattcttaattcgtcattggatttcgaagttccctgctggaactttcaatttataaaaataattttaactgaaaaataaccaaatttaccctccaacacctcgaaatgtatttgatttgcaatggtggcgaaaatgataaataatgagaattttctgtgatttttaggtattaatacacttgaagtgcttccaattttcgcacattttttagcacatcttttggcattttttaggtttttagcacatattttggcattttagcacattttttattacatatttcaggattttagcacataaaaatccaggctctagttatttaaggtatgtgaattatattttcgtcacgataggacagattctccaggctatgaagaataacaaaaaaaaaaaaaatcccaagaatgttggatgcataaaatggataacaaaattccgacctttactttatttaattgcatgcatagatttggcactgcactaatcgcccaaaatgccaccggtggtcatcttcaatcttttcaacaaacaaaaatgcatttaaactttttgcccgcctttataatcgggtgcccgttttagtactgagttgaaatggttttcaatggtcgtgaccataaatcctcaatggaaaggtgggatttacgacttggcacattattttaaagtaaaaggtcggaaataatgtcgaaatttggaagaacggacgaatacaagaggctacagattgaaatggatctccccgatccttggggagagaaaagtcgaggatcagggagcaaattttcaataaaaaaaagaccacgtaaatttcttggaaaaaatctttaaaagtcatttaaagaaaaaaaagttaaatttgaaagaagtaaatattgttgttttttatttacattttgttctgattccttaaaattcttcacaaaatatgaaatttatggcataatttgttaaatattttatctagaaatttaaaatttgacgcaatcattttttggacaaaagtctgtaaataactagccaaaatttcaaaaatgtttccgtcggcgtctaccgcacgctttccttaaaaattagctcagctcaacatcacaaaatttggacaatttttgaacaaaatctgttaataaatgacactcaactcttcaaaaaaaaaacaggattacataaaattgggagaaataaagataaaaacaaaagcaacagcacgccaatttaattattttcgatcatttaaattattattttttttctttttctttttaaaactctatctaatggatacaaaaaaaggcaccaaaaatcgcgaaaaaggcactataatagcacgaaaaaattgaaaaaaaggacattcgcaattccccgcatcggccggggtcggggagcaatttgaaattgaagcagctcatacgaatattttatttcgaaattatagcattaaatttaattttgttcatctgtttttcaatctcttatcccttcccacagttcatgagtcttttgggtcaatttttggtcaagagttttgggctaagtaccatttctaggctcctatcatttagttatcaactctcggaaaacagagaatttggtaattatgattttttcgactctcgactgcctaattgaccccttttttcatcggctattctcaatgttgactctcgcctcgcttcccagtaaaaaactcttgctcacattaaacatcgtgacgaacttaattgcctttttaaaattcccttaattcagattgctatggggaggtcatttatctgtagtgtacttttaccaaattcccattaaaaaatgaattaaatttntgtttttccgtgatatcattagattagttcacgcacttcgacatgttcttaacagcataaactttaatattatacgacatcttttttttataagaacatcgtctgtcaacaatttttaattcaccaataatagaaaaataaaagttagttaattaaaattcatttccttacaccgataatctccaaataaataaataattaaatattaattttggttatgtgacattaatcagcagtccgtcaacaaataattattgttgaaatacataaattaattaatagggagtacaaattagctttttttcgaaccgaaatcacttaaaactggtcctaatctcagtgattagtgcctaacgaatgaatatcgattagaaccatgtccgtcgcttaattagtcagatcatcactctcattagtatactctctagaattttgtaatcagtttccataattatcttcgtttttctatctttatttaatcatctcgataattagcttgtggtcgatttcttcatcggtggagaaagaaccaccgagtagaatttcgaatttgtccctgcagattctcgacaaattcttgccagccactccgtcaaacagcacttgctaattggttggatgccacaacaaaaaggactcaatttttggttatttaaattttaaaatattttatttccctgcggcgcctacggtacctccgggtatgttacgctctcaattaaaacaggaacagccgaaatgctatattgcgtgttttttttatttttttatttagaatttataataaatttatagcgatgtcaagcccgaaacccttactattatccggccaaccggaaaatgccgttctctaattgtaagaaaaaaacaaaaaaccatgtttattttttatttttggcttgccctagttcagcatatccatttaagcaaccaataaaaggtggttgcgcggaatggaatctgtagcggaaacgcatgctagcacaagtaaaaattgggcacggcactaatccctcataaagccatcggtgctttctttagccgctaaaagcccccgcttttgaatgaatcaaaattttgacctttactcgttgcttcgcgcgtatttccatctcttcaactaacaaaaaatgcatttaaagattcacactttttgcccgaatttataatcggatgcctgttttactgttgaattgaaatatgtaataaatccccaatggaagggggcggcgatttacgaattggcacaccattttctggacccgataatgccatccatttccggacaatttggcacatacctcagctgtccaatgatgaagccagaaatgtgtgtgcacatgacacggacggcacaacgaataagttaatttatatttttgtggcgcgacttggcatggctaatgcctatcacttttcaacttattataagaaaaatcgtctctaaaaatgccaattttcttcggctggatagtgccgtaagtccgtgccggattaaccgcggcacatttgggggcattggcgtttgtaatagtggagagcccatacacacacacaccgtatcccgcgcagctgcggtgccaaagcatcataattctcagcaaaaaatgcgccaaatccttccgacctcacggggtcgaatagcgtaaatggacctcgtcctcattatcacaagcaaaagttatccttatcatttgcttaatggtaccatctttgccctctctcccccttctgccttgcttttgagacggcactttctgtttgtgtgtttatgccagaggcatttcaccattataaaattgaggtcgtaattgtt

SEQ ID NO: 8885 - DNA, 5699 bp, Heterodera glycines
  unsure (1)..(5699): unsure at all n locations
ttaattgattaaattgtaaaaaaaaatatatttaagttatgttgttaaatgttctaatttttaggtcctaaaatctcacttttgggcatgatattttaattttgaaaaattctataaaaacctgatctaattcccatccctatttttctcgatctcgatcgaattgatcaattataaatattagataagcatttgaacaaaactttgcacaaaacgtaaaaaaaaattgagttttagcaaatcccgataatcccgcgggatcccgaaaaaaatcttcgggattgatcgggaccgtgattcggtcgggatcccgactcgggatccgtcccaacgtttttacaaaatgttcgggattgatcgggatcgggattcggtcgggatcccgactcgggatccgtcccaacgtttttccaaaatgttcgggattgatcgggattcggtcgggatcccgactcgggatccctccggtccctgttgtccggtctctagtcagtacgatcccttccgccgtaatacaaattcaaaaacctaagtggcccttccgcagacacgacacaccaaacaagaaagctcacagcaataaatgaataactaacaaatagaaagcataaataaattaaggagcaaaaaagcaaagcatatgttgagagagctataattatgttgattttattggcttgctgaaggcccaacaacagcttctacgatatcacaaaaatttattggccccaattatcgatgtcgtttcccgctagtctatattgtaaagctctgagatgatcatgatctaaatactgttgatcggtcgattcttcaatctcatcgaataccgttactattcgtttaattgctgcatcattttatctatacttttttgctattggtcaatgctttatcccacgtgtgttgtcaagttcatattctcttaatctatctgttgcaattctttcttcgcttttaagacattaatgagcctttaagaaatttttatattaaaatcttgacacatttttaccgtgatagagggggatgttctttggcaaattgtcttctcagtgccaaatgaaaggcttcttgtgcgttgttcgtacgtgctagatttccaatgattgaatcgtgatggttccatgaagttggcacaaacaatggatcagccccatttggccgaatgacataagttcttaaataggactcattcattttttcaacctaacctagattttatttaatttcctaatatcagtggacctgccaaaatagtcaaagattgaatccgcgttgttttggaccttgggcaatttaacaacgcaattagtactgattttcagtataaaaacgctgtgtaaccaaattaattaattaattaaaaatgaaattattgtcaaaaatcctttttctgaccaatttatttgttgtgagcaattgccacccaattgctaccctttaccaagccgccaaaacactaaaaactctaaagagtgcgcatattttaacaagcgcgacaatcggtgccctcggtggagcaataactgcacaattaatcgaggacttaatcgagatgctagtcgaaaaatttgaaaataacggtattataatcataaataaacaacattaggttaggtatttgtttcagacgacatggatttgattgagccgcttttcccaattcttttcactctcgaaaagaatgaatttttgctagaatccaaagacttcaattattcacattttttttcaatgattgaagacataaccggacggagccatgttaaggaaatttgcttttacagtaagaaattttggaataattaaatttaaataagtaatttagctaaagatggtggggatagaaaaattggacgatcacgaaaagcaatggctatagtgcttatgtatggtttgatgaatggaaaaagtcttgagttatttttatgttcataagttgtatttgtagaagctgttgttgggccttcagcaagccaataaaataaacatattatagctttatcatcctatgctttgcttttttctccttaattgtgctttctatttgttatttattaatttattgctgtgagctttcttatttggtgtgtctacggaagggccgaaacacacttaggataaaagaagcggcgtgggttgtaggtgggcgcgttggatggtcgcggggtgttgtcgtccgccgagttggcaaaaggcggtgacgaccaccgacgcatccgtggaccccgtgccgtgccacacacacaacccacagcgcgttgtccatgtccgtcgtggacattgatgcccgcctggatgcacgccacacagatcacttccgccacaagcagcagcggcacatgcttttggaccagctgcgtttgcagctgcagaggcctgtcctgggacgtttcggcatcaaaaatgcacagacggatcggcaaattgtgcgcgtcatcctcctcctcatccaccacccgttcgtcatcatcatcatcatcatcatcatcatcgctgttgttgttgttgtggccagagtgaatgcttgactgtggcgtgagcgacacgcgagctggcgcagcttgttgttgttgttgttgctgtgccgccgctcggggcgcacgccacccaatcggttgaatgaagcatggttgctccgccgtgtggggaccaccacattttcgacattctctcgcaacttgttgctgctgctgctgacaatcgtgccgaccgtccgcatatgctacgcgcccacactggcgacacacttgacgccactcacagattgggcgccactggcgcccgccccggccgtccaatggtgcgggcgcacgattggcacggtggtggtcaaagcattcgtcgttggggaacacgaactggcagtcgacacacaaacgtgacgtgctcgtcccatccggcagctaaaagaaacaaatttgtgtatgtgcgtccgtgagcaggtggtagcggcgagcgacctgttcactgtgacagggatagttgggcccaaagcgcaggcaaaggcggcacaccacccgacaatgttgtgcccgccaaaaagtcaatgccggcggcagactgctcattcaggcgctcaatcgctgccgcgagggctgccgcgttgttttgctccgggggccgaagcggcaccacgtacggtcgctcaaaaccgggcgggtgcacttgaagcccaaccagcaacggtggcggatgcccttggagcacacggtccaacaaatgttggattagtgccgtcatgagcaagtccggccgctccgcttcttcaagcggcagaaaacggacttccgcaatttccccgcgcgtgttgcgcggccggtttctcatcatagtggagctctccaccacaaaacattcatcaaccggtcgccgcatctgaattacgcaaaatgttgatcatcatcatcatcatccgtcattgcagtttggttcattccacatcaatttattttacaatgatcacagaatttaaattacactaaaaaaaatacatattttacaacacagtcttacaaattgggcaaatgcgactgatcagcagccatttctcaatacagtctgggtggaacttgtgcagacagtcaagcacggtcacaagttcccctagcaaaaaaggcatcccacaaatgctacatgtttctccttcattgatcaaatgttgggtgatgtgggcgaatggcaatcggctgattttgtgtttggggtaggggggtggcgggggtggaggagaaacaccggtgccgtccccggccaccggttcgccatcaatgatcacccatggcggttccgcctcttcatccgtgtccgggctgcaccgtattgggcgcgaaagcacccctatggcctcacgcaccgctgtccgcgcagccaccgctgcagcgcgtgggggcggccgttccgaaatgttgaggatggtgagtgagggtgagcgaatacgttgacgcggaggagcactagacgtgctagggtgagggtcaagctccaccgactctcgctcccgacgtgtacgccgatagggatgctaaattgtggaaaaaacttcctaactcaaattcaaatataagtactaagatttatggtaattaattatcaatatgcaaaaacatttttaaattgattagctcaaattcaaatataagtaccaagatttatgtaattaattatcaatatgcaaaaacatttttaaattgatagatcaactttaacgaatagttgcgtaccgcttaattcaaaaaaaaatacaactttttttcaatcattcactatcagtagcattgccttttattttaaaatgattacacgttaacaattgcaatataagagtaacattattataccactgtcaattaacaaatcacattaaaaattttacgcttataaaccaattttcaacaaataattagaattttttacctcttaatttaagagaaaaaatacaattttttttcatcaatcaacatgagtaaggtttgcctttattcaaataattacatgccaaaaaaaaattgatcaatttaattaataatcctaaagtgtgtgtgtgtgtcagttaaaacattatcaaaattattgtttaaataaaatagcattcatcaaatgtcaaatgttaacacaaatggaaaaaatcacacatgtctttcagcggtgcgctcagcagttgccgacgagtctgtgactggttcgctgttcttaaacatgaacgaaaatttttttgtttatgtgtaacaattcgtaaacacctcttgcagagcagccgccccaccaagctgaacattaacaccaccacgactctgctccacttgtacaatttccggctgggatggctgtagagaaaataaaaaattagcaaaacataataaatatgatttattgttcaccacagggcgactctccgctgccgactcatttccctgttgttgttgcggcggcggcggtgggggcaacgacaaaaactatttttttttttttttgtaaatgtaaaaaaaattgacatttgcagtttaatggaccctttttttttgtaatcttataataataaatcgaaaataaatgccggtgatcagttttacccctacaaactaaaaacaatttcttttttatactccacttattttttcgtcaggtcctttaaacggtaaaaaaaaatttgaaaaaacattacatgttgctggtcaatgtatgaagccaggttgagtcccaaacgaaaccacacgccatttgcaatcattctcggtggcaatgttcggcagttgaagaaagagtacgtgtctcctatgcgcagcatggccaacaattcggcctgttggcgccacgctgacgcctcaatccgggccccctccgcgtttccaagcaaaacatttgcaaccggcaattctccagcgggggttgactgtcgctctcgaaaatcaacaacaataaccgacagacgaacagggctgtaatataaaaaagcataatttaaaccaaaaaaaaaggagtaaattacggaagaacccggttgaaagtgtcgacgcaaccgttgagaaacgcagtgctcgttgttccatcaacacaaaattgtgcaatgtttggcaaatatccataaaaaatttatttttttttttgcaaaaaaaaattgtgtatttactccgctttgatattgcgggtgtggggagggcggtggtggtggcataaaagnggcgttgcggcacacc

SEQ ID NO: 8886 - DNA, 1181 bp, Heterodera glycines
gcgattgaaaaattttcaaaataagaacatcaaggccaaaaaataagatttttggctcaaaaatcacagaacattttgcgaaattgcttcaagacagttatttttacaatttattcgatcaaaaatgtattaaatattgtatttttcacctcccattttcaattttaacaactttggggtggaaataagcaaatcgtaaatttcagtacactcggaatgaaaaatcaaatttttaagaatttttttgcggcgcttttttcaaaaaacttttgggaaatgggcgaggggggagggtccggcggtgccgtcaggcgccgccgggaaaatttttgtaatttcgttctgatttgttaacagattttcatcaaaaaaggccaaattgcaattaaaagccaaacaacgactttttcttgcgtttaacaacgctttttttttgccgcacattttttcaaaaaattttgggggatggacggggagggggtccggtggcgccgataggcgccgccggggaaaaatttttgagatttttaatgcgatttgttaacagatttttgtcaaaaaatgaccaaattttgccacaaatcttatattttcttgataaaaagtgacattatgccacaaaatttcaaaaatatgagtttatctaagaaatcagaacaaattttggtcgataccccaaaatcagaacatttctgacaaatcagaacatttttattttatcagatttggaccctccaaatcagaacatttctgataaatcagaacaaatgagaaccctgacttaaacaaaaaacttggttttggttatttaatgaatattaatattttataatgtttttgataaggaaaatttttaaatcaaaaattttttattaagaataaataaaatcttggtgaacaatttttgagaaaatttttcagttcttaaagatatattttccgaaatttttttagatcatttcttaggggtgtattttctgaaaaattttcaggtcattgttataatttttcatttttaaaaattttctctcatttccattttagcaactattttctgtgttttttagaatcaatgagcaaacacacgtttttggctgccctttccaatcattttcccaatctatagtataccattcaatagagtttcaatagctctacaattttattcagaggagattttt

SEQ ID NO: 8887 - DNA, 6001 bp, Heterodera glycines
tataccaagagcaatcttccggtgttaaatttgccttcactttttgtctttattaaaaataatttatttgcttttttactccattttttgcagttatttggctatattttcgtatatacccaacaaatcatcagatttagactgaaaggttcggccatgaattaacaattatttgttagaaaatactttttataaatagggctgccaattttatgtaaatacatctttttttcctggcttctccttgctctaaatagcaggaaaaacactttcttttttgtgtttgcgaacaaacattgggacttttatttacatatttttacatatttcgggattttcttacatatttgtacatattttggatttttttcatatatattttcatttttttacatattttgagtattttttacggaaatttttggaaatcctcaaaaaaaaatccaaaatttcggcaaatatttttgtacatattttcatttttttttacatattttgaaaatttataaagaaaaaataagtttgaaaatgttggctaaaaataccaaaaaaaagtaatttttatgtcattttgtggctatttcatatgttacggggattttctttccaaaaaataacattaaaaaaatttttatttacatatttggggttttttgtacatattttgggatttttcttacatatttatgtacatatttggaccactttttgtacatatttttggcagccctactaataattatatttttcaacaacgtaaatatattatttcagctttaaagaaattaatacaaacaaaaccggaattcaaatttttaaattaaaaaaaattgcgatttgcgctcaagccgactccaaccgaatgcaaccgcccacccgtaattttcggtgaaatttcgtctgaaatttcggtgatttgtccttgccagacaattgagcaacgctcggtgtgtctgccgctgtcggtggtgtttttcgcacacacattctcctcacaatctctttagcggattgctctcttcactccattgtcttcaatttgcactctctgctgctctgttggacagagagaaagaaatatcactgggcactgtgatatttccacagagagtcagacacagcaactgctgttgtgtgtatgcagcgccaggcgtgcgcagacaaagtccgttatccatagatatcaacacacagacagtgtgagatagtgaattcagttagaattcactgcgataacggccagacaatgcagaaacggaagagagagagaatgaggcaaccaaaacactgatgacaagcagacactgtgcattcgtgtggacgggaaacggcgccagcgagcgcaaatcggtgagagagtattgcgttagagagcatatataggagaaggaattttatcgaatttttatgtgtgggatgaaaaggaggttagagaaagaagcatgagatgaactatttctttgctacgctgacttctcttccaccctcgtaatttctattatcttttttctgtgtgactataccaaaaatggctatttttgagtgttacataattgttccgattatcagtgatcacgcatgcataatatttatttgacatttgaagccatcagctcataatttgacaaattataaatttaaaagaataaaaaatatttaaatatttttttccatttccctatagaaattcttattatttttttcttggccaaaatttgtgatttttgtaattttatttattttggaaaaatgcatttaaaaatctcgaaaaatatatatatatataactttaaattaatgaataaattttgtggtaatacctatgagctgttattttttttatgctcaatatttgctaaacattacaggatttatcgtaaatattatataaatatttttggatttaataaatatctgtcccagcactaataattattttttccgcaactgtggaaggatctgaaatcaacaaaaaaaattcttttaacatgatttgacgtcacaattaataaattttaactttaattggaaaaattttgtgcaattcacttgaataattcgcaatttctgatgcataccagggttattgcgaatcgaaaaaaatgcaaaatacggaaaaacgaaattaaaacaaaatacgaaatgcgaaacacgaaaaggaaacgccataaaatcacgaatttacgaaaatatgaaatgcgaaacacgagatttgtttcatatggattctaatctgattttttttttcgaaaaatgtttaatttaatactaaaacatatttatcaatgtatttccaataaaaaaaacaaaacattgaaaaatcattatgggcacatttcataaattcgagataatgtaccaacgagaaaatcgctgatgatatcgggattaacattgacattggcatgcccgtaagagtcgaatctcgcatcggcgatatcaccacctcgaagtccaacgaaaagtttcaggcgaaaaattcggccatctttgacaatcagttgaggcatacgtgttcaacgcttcacacttgaagtgagaaggcagtacgtaatcaaaatccaattaattcgccttaaaaaccaaaataaatatgaaagaaattaggcttttactttgcgaggacataaatttacctgaaaaaggtggcgccgactgaaagtgccgtctgcgtacacatttttcataatacaggtccattgtgaagtcgaagatcgagcaaacaccaaaagccttaatacagaatttagtggaattttaggattttcattttttcacctttgtggacagcgtccaaactgagttgaacagcaggtggcacatattcgtcacggagaacacgttttataacctaaaataaatgaacaaatcataattttggcataaaaattaggaaaagttgacctttttgtcgcagctttgttcggaaaagcagctaacattggtgttgttgtgttctgcaagacttgcgcaagaattgtagccggcgctttccacgtctcaactgcacgccgttttagctgggtcacacgtcgctgacactccactgttcggcgctcatgtcgcatgtgtggcttccaataattttgaggacattatattttgtccccttctatcgaatcacagtttattttttagctgtctagtttttaacccgagatcggctcttctatttttacaagggaaaatccccaaaaaatttcaccttgcattttaaacctttcaaagggagcggggcggctcgtttcccccccgccgtttcccccccgaatcagttcccccccgcatcgtttccccccgagaaaatttaaaaaaaaaaaattgctaacttagaaatttttcaagaataatttatgagttacgggggagaatttataagagggaaacggaggcgcgtgaatagaagttacgggacaccttcgagatgcacttattcgtgacaacgttgtcgatgggcagagtttgttcgagttggcttctccggttgctagaaacattttgtaactatatggacaccatgccacagttgatggaaccttcaaagagacttaacccgaaaaattcgaatagtttaatttttataatattaagtgctccccagctcattttacccaagtctacacaatttctgtactgatcgataaggtggccgtcccctgtgtttatggcatacttaaatcaaaatcagaaaataataccttaatgtttgttttagatttttttaaattagtgatcagtgccaaaatttttaagatgttccaagcagttgttcaatcagtcccactcaggttttcccaaatgccacaagggtgggctgtcttttccacttttgccaggcggtttaccgcaaattacaacgcctgcctcaacttcacactcacttttttcaaaacgcagaccaacacacggatatttaatgttttttcgctcttgcctttgtgcctgttggtgaaccactttacaattatttttgtttgttggttcaccaatttccgcataacgaggaagttgaacgtatgtattaaaaactaatttgatgggctaattaaaatttctagaattggtacggtattttctgatcacatggatcggttgtcgggatgtgctaaacatgcccgaaattgatgaattcgatggccaagccgaatatggtgcctatggctatgttgatcggttcattcgaaactggatccaacaatcagcaaaccaaaatcgggcagctttgtttccgatggaattgtggaacatgtgtgatcggtaaaaaaaccaaataataagtaaatgaattttgtaaatgatagggtggaaggcgacctctgcagaaccaataacagtgttgaagcttggcacataaatctgaacgcgttattccgttcaccatcgccacgtctaagcatttttcttcggaaagttcggcaagaagaaagccattggcgtcagcaagttgaagactttgcaaacaacccagcaaatggaatacgtggcaagggaatgaaacgcaagcaaacttatgtggaccaagacatgaatcttaatgagttatacgtcacgcgaaacaatcgccatcctctgcaatatttgcgcgcaatttcccaccgaatggcagaacctctttaggacaaaaatcaatgatttttaaaacgtaactaagaacctctttaggaataataattgatttatttttcatttttaaaattaaaaataatttttaaaaatttaattttggtgtcgtattttccgggtgtcgcattttctgtttttttaaaaaaaatttacggtgtcgcattttccgccggtgtcgcattttctggtgtcgcattttcagggagccgcttttattgtatactgccccctcgctttattatgacaattaatttcgcggcaaaattagctaatgattttggatgagcttgaaaaagtcaattatttttgtgaatgttttcttttaactttttcagttgttaaatattaattattatttttttaaattattgaacattataccaatttaaaattataagggaataatgatcttgagtctcgactagagaaaagtctcgcttttttccgtctcggtctcgatttccgaaactgagcccgagacttttttttacactcctaaatgatttttcataatactaaaaaagagctgattggaacattgtgcaaatttaaaatttaaaaaatgtctgagtgtcgaatcgagaaaagtctcgggggttttgttttggtttaggtctcggtttttggaaatttttggtctcgagctacacactattggtgacccagataaaaacacaaacacaggtgctcgtccgtgttctgacgacagcgggaacggtgttcgagacctacgactccgctgccaaatttttttaaataattagattttaaaaatttcagcaaataattttactttgtagaaaattttatgaaatttctttaagtctcattaaatttttcaaatattccctattcctatctttttaaacatttttcaactttttaagaattttttaggagggggaaaggtgatagttttaaagaaacgcgcatggcttgacagttcatgtgatcggctcaaccaaacacacataaaaatccgaaactataaaaataccgagaaattttctcgatttgaaaatttttaaaccgagaaatacacaaacaaacaaaaaattgaggaattctcgagtcatagcatccgagaaattccgacaagaacttacaaaaaaaaatcggctatgactctgaaaactcgacaaattttctcaaatgaacgattccaccccctgctgtgtttaggcacacaggtgactgacaatgccgcagtgtccgcagcggccggccaagcagtggatgcagcgcggctgccttgggcaagacgacggtggaggaagcgaagctcgataaggtgaaactgttcgacgcaattgccgtgtcggtgtggcaccgccgtggtgacaccaagcgcgcaagggtgcgcacactgccgctgact

SEQ ID NO: 8888 - DNA, 3669 bp, Heterodera glycines
aaaaggaaaattaaataaaaatttattattttaaataaaaatgcaccaaacaaatatgtaaaaatgtacaacaattcaatgataactttcgagaccatttaaatatatttaattgctccaaaacgtacgtctgttggccattccgatggtcaccgcttcggactcggactccgcctcggccccgggcggtcccattatgacctgttgaaaatgacaaatgtgagggattgcgaaattgagcagccaattaattatgtaattgattaattattaaataattaattaattcccttaccgtaattgtaaatgtgtaaaaggtgttccagtcgagaccgctgaagcgatgcgtgacagcagagcctgtggcaaggaaagcattcaaacaaacgccattctctaacattaagaaatggaatacagtggaaatggatactgtaatttttattgttagtgttttttattttatatatcgtatttactgaaatggaactcctccgacccctgaaataaagccccccccccctttgagggcgttgaaaaacagaggccccgccggggttctaattcagaatgtacggtatgtgcttgtgtgtgtcattattgaactgtccaaatgtaccgttcaattccaaactcagcgcgcggtgcaaatggggcccagcactggcggtgtaactaaaaataattgatgtttttaaattcgagatttaatccaagtattacttcatgctaaaaatgattatttttaaatgggaaaccggcaaaaaatgggtcaaaaaccgaggattaaaaatttggccatttaccaagccaaaggataattttttaaaaggtttctcaatggaatccatctcattgtaattggtaaaaaatggaaaatggaattttcagcgcaattaattctctaattattatgaccacctcaagcgaaaacggcataaattgtgcgcgtcgttgcgcactgtccaaaaaagtcgcacataaccggagccaatcaacggacggaacgcggacacttttaaagggtctgaaacgggaaaaatggaagaaatatttaaaaattaaattggttaattggaaatattaaataattataaattaattaaataatgattaatttaatatttattcattttttgcggtccttcttttgctcctcacatgttgtgatgttgacgtccaccggtctgctgcgaacgccgtggagaagtgtgaacaaagcgaaagtgtacgttttgccgggcaccaatttgttgaaagtgaacgatttgctgaaaaaacaaaacaaataaaaatgtgaatgtggaagaattggcacaatgaaaagccattttggtcaccatttgaatttgctaattattttggcattttgctcacgtgtcgttttttgccagccttcggatcagtgtgtttggcgtttcgtctccgttttccaactttttcccactctttggcgctgtttctccgtccccttccgctgcttctgctccgcttgaggagtcaaaatgcaattcgtactgatcaaacggatgggaagggtcggactcgccaaaattgatgttgatcgaatgggtggagatctgtcccgcgtaaatggtggaagtgatcaccggggctacacacagtcaaaaaaaaagaataaattaattcagcaattttttttattacgttttgacatggacccgtccacgccccacccctctctctctctctctctcttctctctctcttctctctctctctctctcttctctctctctctcttctctctctctctcttctctctctctctctctctctctcttctctctctctctctcttctctctcttctcactctctctcttctctctctcactctctctctcttctctctctctctctcttctctctctctcactctctctctcttctctctcttctctctccccttttctctctctcccccccctctctctctctgctgcctctcctctgcccgctctctctctctcttacgtgtgatcaatcgtacgcccaaaggcgcactgcatttggcggccaactcgcgcgacacattgcgcactgcgaaagtgtacctgaacagtttgcatttatagaaagtgaagcactaaattttttttttccaaaaataattgaatttcatttttaattttctaacgacaaatttttcaaatttgtgcccgtacagtcgggctggctccaatccggtgatgttcactcgtccctccgcacttttgccgcccgttttttgaatgtgttcgccacggaacacaacttgttgccggcccaccaccttctgaaagcattttgataatttcacaaataaatacaaaactaattaagtaaaagccaaaatcagcacacatttcaatggcactcatttgttaggacagagttatttttgaatggatattttagaacacaaaacagcacctttcccggagaccatgcgatgtgcacttcgtacagctgaaagtgtgccgagtcggcctttggtggcagcccaaagccgagcaaaacggaggcttggaaatactgggaaaaatttctaatattaaaatgttttgagccaaattttagttggatttatttaaaattattttttagttcattattctcttaatcctttttactaaatttaacaaaagggattttaatgctctattttctcggatgaggaaaacatttgcaatttttaaaattttatttgtaaaatgcaaagccgaattgcccttttggccgatttattctcagatccaaaaaccgcattatgaaatgaataacaaatggtgaactgctcgcccacctcgtccgtgtaggagcgtataacgcgcacactttgcaccggcgcgggcatgcgcaggtcgagcacgcgacgtgcgttccattggggggacacggaattctcgaacagacacgaaacattgacctgagaaaatagagaagtttgtgcttaagagacaattgtaagcaaaggcaaaacactaataagctccattcatattttgcaaataaatttcttaaatttaaatgccaatggctaatttaaaaagtgattccgaaatcgacaatttcagtcggcggaacagattcagcaatttccgagtcggcattccctgcagcgttagttactaatccccccccccccccccgctggtgtttctgtctgtctacctcaacacacgcattggccacaagcggaagcagcgcctgcggcgtcaccgtccgttgtgtgccgattctgccgtttgccgttctattttggcaggaggaaaactgatttttgatttttaaattgaaatgtgccaacttcttgggccatattcttcaccgatctgtccccaatccaaatttatccccaggcccaaagtgttcgcttccgcctccctacccaagcggacggtgtcgcaccagaaacgcgtcacatgccaccagctcgggcacgcgccaggcaatggccaacgtgcgtgtgccgtgctggcgcatgcgaatgctcggctcctcccgcgtttcgtttctgctctccttgggcgacgtttcatctacagtctccgtctcctccgcccccgcttcttcgtcttccgcctcctccgcgccgtcgctctcgttgtctgactctttgctgctctcttcactttccaccactgtctttgtgtccccatggttt

SEQ ID NO: 8889 - DNA, 966 bp, Heterodera glycines
cgtgatggtaccgtacgccgagtgcgaaatgccaattcaagcggacacagcgaacggacgccaaaatattcggcgtacagtgccaatcttaaacagttttacaagcatatgctcatttaatgatttacaaatttattattggaataataaaaagaaattctgggtaattatataattaattattgtataattagtgatgtttattactgctaattaatgtggctgctcattaattaaattattttaatttttagtttgataattcattttttctcttgtcaattgcctgtattgtgtgcccgtcctcagcctgcgcaggcgaacggaatttgcttttgtgcgtgcgtaaaaaacgacgttggaagaagccaccgaaaaaaaagttaattgaaatttgaaattgttatttttaaactagggcttctcctcgacttcgggggacaaaaatttccgtcaatttttaaaatcctcgcccatctttgtcgagaatcgaatgccgagatgtaattttattaagaagtcgaaaaaaaagaaaattttaagcaaaaactaatttaatgatatttaacacaaatttgtattgcaaattatacaggattagttctcccttaattttgtcggggcgaaacccctaatttagacggagaaactcagaaaatctacaagtaaaagaaataataatttattatttgaaaattgccaaaggaggattgagaatagaaattgctgtttaaaaaccattttaccgggaaatactccatgtaataggcatagttttgctgctgttgttccgcttgtggcaaccgtagtgccggaggcggtgtccacgcgagtgtgcaggcacgctcagttgccgtgacggacaccagcacgggtttgtcagggcctgtgccgtgaaagggtttgcataaactttggcgactcatttaaatataaatgaatgaatgcaaatagccaattctacag

SEQ ID NO: 8890 - DNA, 1202 bp, Heterodera glycines
aattctacagtactcgagtgtgccgttccttccgaagggagtacggtgttggcggtgtttgtgccattcctttctgtggcaattcgccgccctttgtcctcgtaaacggcactaagtgagtaatggtagcgaactgctggccaagtgccattcactcggatggtgaaatttgcctccgattccgtcgtcggtgttggcccgtgcaaagtgaagggcgacgggggctgacccatggggaggccaatactcctaaaattaagcacaaaagaaaagaaaatggaagagattttaaaattaaaaacaataaaaattaaataaaaaactaaaaaaatttaattaaattttttattaattaattgaaatataaccaattattttataccatattcaaaaaaggacttatttttaaaaatattctaaaattaatgaaacttttataaatgcgctaagataagtaaattattttattgtaaaaattaatattatatatatatttttttaatttggcttttcatttgtgaaaaagattgcttaattccctcactgaccatgatcaggtaaagtggcatttctgctgcattggcattcctttgaccttcggcactgtttttgccgctgtttttaagccgcaacagagaaaatgaaatgttaatttgcaaagacgaaggacaaaacggaggtgacacaacagcagaagcagaagcattttttgcattattgccataggaaagaatcagcgcaaagagaacaattaggaaaacggcaattagagaatcgcccgaagggaaaaagaaacggcggcgatttggcggcagcgaaaggcgacggcactttgggggtgtacaaacggatggcgaaggtaatgccaatgaaggtgataatgaggatgatgaggttgatgttgattttgttggttctgttgttttactctctcgaattgtggggcgacatttgtgggcgaacaattcacttccgcacagatgacgaccacctttcccattttcgtcatcatcgactgctgttgctgctgctgcgcattggtcaacggttttggatgaagacggaaaggatgaggatgatgatgatgaagatgaagatgaagttggtgaaaatgatgaagatggtgaagatgaatatggtgatggattggtgtgttgtgggagatgatggcgggtcatctgctgatgcttcttcctctgctg

SEQ ID NO: 8891 - DNA, 507 bp, Heterodera glycines
ttttaacccttaccattcttcttaatctgcatttgctattgaaacttcactaaagggattagtctattcaaaaacgtttggtactttacggttatctgtgttcagattttcaaaaaaaaatttttttataaaattgttttagggttttcagggtcagggaaaccgattctggcacttatgttgacccaattcgaagcctaaacccggattcgaacaaaaagtcaaaatccattttttttgcaaaaaaatacatattttatgcacaaaatcgcttcacactgccacgaggacgactcgtataacctaaaaagtgtcaaagttgaatgtgttttgggcttgttttggtcaaattttatgtttctaaaaattccatttcttgctaaaatcgctttttgatgacttggtagatgggttttcatgctttttcatcattactacgtaatatctaactgttttacaacagaatttcatgaaatcgtttatggcactaaacccaactcaagcccc

SEQ ID NO: 8892 - DNA, 1744 bp, Heterodera glycines
actgatattgttggtgccttttgcagcttttccttatggagtttcgtctactctttccccgcatttttctgctgtgtcccttcaccgccgctgggcattcccccgatcgaatttggcacaggaaaaacggcaaaaagaacgaaaaaattataggaaaacgccattaaagcagtagcagagaatgtttaaaaatttgaatcgactaaattaattttattgcatatttataaatttatttatttcaattaaattccccaataatttagttttttgcttacgtaaaaaataatgacgcaaatgacaattattaattagtagtattgttatttgtcagcaatattattatgcataaattcatatttgtataataacaatggcatattagaagtgaatatgaatttacgaaaaataatatatccatttctgggtatttcccctggtgctaaagccatcatttgtgaaggctaaaaagtctgcatttttatttgctaaataataatcaaaacttagcttaaaataatccaatttatcaacctttttagacgcactaattttgtccctaactttttttaaactcaataaatttttttttaatttaacagaatatggagaaatctttgggctatcttttcatattaagtgtggtgtgaattaattgaagtttgaaccattttcatgcatttaagcgtccttacatttttgtatgcaaataaaaatatgacacatttaatttcttaataattgttttctgaaacaattaattttaattttcttgcaatgattagtagccgaaagatttctctattattctgttaaatttcaaaaaatttttggcttttaaaaaagttagggtcaaaattgcgcagtctaaatttttcgaaagtttttggttacaactttgtgtaaattttgcttgatttttaaaaaaattataatattataatacagggaggatacgtagagctacttttaataccaagattgataaattggttaagtgtttaagcaaaattttgatttattatttggcaaataaaattaaaataataattaaaattaaatattgcgaacattggatacatacttttgtcactttggctcaccacgaatgattgtaaagcacttgacaaccatatgatatcatctaatccatacgaacacttttgttgaaaattaatatcaagattttcctctaaatattttcttccatttttatcttttaatttccctctgatcaccaaaacacagacaataaataataaactacgaatgtttttaggaatcgctgttaaattaaagcacaaaaatgtgcccaattttatcttttcaccaaacaacaacattttgggcggcggaagaacgactaatcgaatcagaagaggaggaaattattggggtaattagcgggggtatttaaaaaccatttcaaaaactcaaagaacattcgttcaccgattgaattggtcgcatccgccgacatttgttatcccttcgcttctcctcaaaatgttctctcctccgattgtccgtccacttccactgatcactttcatttgccttctgctgactttaattgatcaccaaaatggtaattgcttgttcattagctttgtcaattaacactaatgaatgccctgcccctttcacagctcttcgggtgctcgtctccgccccccaatttgtccacagccatttgcacatgcattcggcaattgccgatgttttggtggaggagggaggccat

SEQ ID NO: 8893 - DNA, 4598 bp, Heterodera glycines
  unsure (1)..(4598): unsure at all n locations
cttgaaaatgcctttcacttcatgtccttgaattttttcggaaaatcatcaaaaattttatatgtaatctaaaatattttttaattattattatatgacattagaaaaatttttaaccattctttttaaatttaaatttccgttttctgagcacccaccacttcagacacttctcgtcccgatgtgggatgtcgtttctggcaatcccccgcccgtggaaaaaacgaattggactcgtgcccaaagggtcattcgccactttccgaatgatgccgatgggcaaacacttcgccaaggcattgccaaaatgccattcgccaattacgacatttggaccaacgacaacgacgaggtttttactgaacgcacacttcaactcttcacagagattttgactactgcctgcagcggtacggagttaatattttgtgccattgccatctaattcatttaaaatgccatttttgtctctctcccattttccgtgccaatttgccattcgccctaaaatgcagttttatttcgtagctcttcaccgttcttcccaactcttttctgcactcaacagcagcagttcggcgcctgcttttgacgtcgcaatcgccgaatggttcgacttttcctcgttggcactgttccatcggcttggcatccccacaactctgatcacttcggcgcttccgctcgattccgtccttgcgcgttatctcggcattccaatgccggcttatgtgccaagttggaaacacaatttttaaaaccgaaaatattttcatgcaatttgagttgtcaacaaagcatcccccgagggcaccaaaatggacatttggaggagatttgtgaattacattgataaacgaagaaacacgcaactcgatcaaataattaataccgtggccaactcggtgttcggcgaaaattttccaagcccgcaggaattggcacttcgtgccagctttttgttgctgaacaccaacgaaatgctggaccttgccaggccaacttccaacaaaatcaaacacatcggtaacgtcaaactcacaataaacttaaagaacaaaatcctcagaaattctaaccatttttatgagggggttcctggggtgatcaatcccatttccctccccaattccaactccattntaagaatggctttattttggaaaaagcactgaaatcaaattataaataaaattaaacaattaaataatatttaaatacataatggaataaaatgttacataatgttacaaaataacattacaaattaaatacaattaaataaagttgcataataatgattaagtgatcagcagaaggaaagatcgcacattaaatagacataatgnagaaggggaaaagtcattggctaacggaaaataattaaatgaaatgaaacgttgcattaaaatgagtgtggaaatagcgatcaatgcttcggcagtttatgttaattagcttatcattaaatcaagtccgcttttcaggtggttttttgctcgattccgactatccgaagaatgccgtggccaaaagaatggccaaagatccctccatgccttccgcttctgctccgtctgtttttgtctctttcggttcggtcgctgaccccaacaaaatgccaccacaaatgctccgtgcctttttgcacactttcgcctcgtttcccgagttggattttgtttggcgcttcccgacacagaaaggcaccgatgatgaagcacggtgccacaatggcactctgttcggcaacaaaatcccagcaaatgttcgcctcgtccaatgggttgatcaacacgcaattctcggttttttggattgaattggtcttcaattttactaatttgctaattatctaagcccatccgaacacccgtgcatttgtgtcccactgcggccttaatagtctgaacgaggccgccaccgcgggagtgccgttgctttgtgtgcccctttttggcgaccaaaattacaatgcggccattgtacaaaaccatcagaacggaattgttttgctcaagaagcacctgaacaaagagaggctgcaaagtgcgttgaaagaattggtggccgatgaaaaagcgaataggtgagtgaattattaattgatgaaataattaatcaatagggtagcaacttttagtgacgaaaaatcccgaaatagttaactaaaatagtgagtaaaaatgccaaaatagtgaagaaatagtgacaaaaagtccgaaatagtgacgaatagtgacataattttcagccaaaaattaagcaaaaataatttttattcactgattgcattgcaaatgagtagggctgggatttttaagggcaaaaaaacaaaataggtacataaaaaataatttttaaaattaaaattcttgccacgaaaatacctttttgagaaaatttttttcatttcttaggagtgctttttgaaatttttttttgtcgattcttaggggtgtattttttgaaaaaaaattttaggtcgattttatgggtgtattttttggttttattgcgtttttgttaaggaattttccaaaaaatgtcgaaatagtgaaaaaatagtgacaaaacgccaaaatagtgattctagtgacgaaaagtgacgtccaaatgaaaaaattttaacgcagaaatgcgttttttgagctcctttcttcaaaacaattgagcaaaaaaaaaagttttttcactaaaagttgcttccctattaatcaacaattggtttgcttaattcttcaacataaattaatggagtaattaattaacgatgatcaataatcgattaaaataattcattataagcatcagcaattaagatgcctaattcacaattagctaattaaccggtgaatttaattatcataagttatttaattggttaattattaaccatcggcaattattgattgataattcattataaacatcaacaattaaaatacctaattcataattagctaattaaccggtgaatttaattatcatgagttattcaattggttaattaattaaccatcgacaattattgattggaaattcattaacagcatcaacaattaaggcatttaattcattattagctaattaaccggtgaatttaattatcatataattcattataagcatcagcaattaagatacctaattcataattagctaattaacggatgaatttaatcatcataaatagttaattaattgattaattacgcttgtccatttttgttgtcccttcagttatttgcgcaatgccaaagtgatcagccggaaaatcactcgcgctcctttccgtccccgggaaattgtgcgaaaatatgtggaatattccgcagagtttggcggccaattctccgaaatgaatttggagggtgccaaaatgggcgaatgggcacaaaatgggctcgactttttggtgccgttggcacttacaatggccgcactcattctgatcagtgtgtcagtaattggaattgtgattagaaaagtgatcagcagaggtcaactgttgctgttaacagtgaggcggcatgatcaaaaggggaaagatgactaattaaggaaaatgaatgtgatcatcccacaataacatttttatttttacaatttgttttgatgtattttatttcatcgattttatgtttttacaacgtttttttaaattcttgtatataatttatttgcattgatttaattaattacgataaaacttgcaattaatattcattgtttgtttacaaattcacttggttaacaattgaataacaaatataatgtcaaaatgttagcatagaaaaacaataaaacataattgataactttttaaatggaatttgcccattttttcgctttcaattagcttcaaagcttagcttggactgattacaattacacaaatttcctatggtaatgaccacatctttttaaaatggcgccgtttgagttgcttaagtgcaaattgcgccttcttaagcggatgaattgcggaccacggccattcgatttgttctccattagtcagcccttgggtgaaaattaattttattttatattttttgtacattttaattaattagccatttttacccgttaattgtcggaccaatgttcggaggaacagaagacaatttcgagacagcaatttgtaagtggacgggttgaagatcgtcttcaagttgttgacaacggagacaatttgtccaaatgttttttgggtgaaaatttcttttccgccgtaagaaattggtcgataattgctggaaatttaattggattaattaaagtcaaaagaaattaattattttggagtgaatcgaaaacaaagggccaaatcataagaaattgcccaataagtcttgaatttgaaataatcccagaacaaacaaataccggtgcattccgccaacaaaacgcgtggaatattccatcggtttccaaaattcgatgccaggatgatggaaatgaatttctgaaaagacagcaaatggcacaatcaccattaatccgaatgaataaaaaatagcgctaatgatctttttaaaaatgggtaccgattccgcaaatgaacagtccggcgtgataaatgccccaatttg

SEQ ID NO: 8894 - DNA, 3827 bp, Heterodera glycines
cgtcaacaccaccaccaccaccacaactgtcaatccacagaagattggtgtgtctcgtttggcatcatcaactcgaatggggaaaggcagcgtgactggcaaaccactaaaaattgtcaccaccaccaccaacaccaataccacaggaacataaccaccgccaacaccaataccaacaggaacacaaccaccgccaaaaacaacaaaaacagcagcagcaaaatcaccacccctacaacaaaaactgcaaaattggttgtggatgagcagttgccagtcgcaacactcctcccaacattgattcaccaaatgtgcaaggatcgtcccggggaagaaaacttttatcagcaagccatctgttgggcactttttgcgctctatttaatggtgattgtcagtctggtacttcatcagctttgttctatctgttggttaaaaaagaaaaaggagtatggacagcgcgcagatttcgactattttgaggcaaagtcgggaaaccgcacgagttttccggggctgtttcccaagtgaccagctcccagcgccggacacgctacggtacccagcggcgctagttgtgaacaacgacccacactacaaacaaggatcccattggtgcgcgatttatgccccttcaaagacggaggaagcggtcatatattttgatagtctcacaaaaacaattcctcctattgtaaagacatcatttatggataaatttccaaaaggttttgttacaaataagcacccgtaccagtccccactcactaccacatgtgcaattcactgtatagtgttcatttatcatatggccttaggtcacccatttgatgcatttctgcgcatattagacgctagtgaaagccccgacatgtattctttgtgcattttgaataaaatgattaatccgtatttgtgtgtgcgtgccaattttagtctccctcggggaaagggcatagggaatgattgattaatttattataccacggcgcacatcgcgcgctgttggtgcctaccgcatatatacaatgaattgacgcgggaaaggctcactttttcgcaaaaataaattaaatatattaataaataataataatgtcgttggaagaccacaattattgcggcgagatgggcggcaacgaagaaacgcccacaaagagaagaaaaagaaatgatgatgatagggaacagaaatttcaaaaaaactgcattcgcactctgagcgccgacaaacagtacaaccaaaatttcaaagtgcagagcgtaaagtcgacttttgtcatcgaaaatttgcccgccaaccccgagtcaatgctgcgcgcattgttcgctcactgcatgtcaaccgccctggacgagtcacagcagaacgggatcacaccggatcaattgggcgctacaatctcttcagatcttctaaatccgagcatatggattcctatacgccgcatttccgacaacaccgccgactcaattatgaaccgcttccttgaggtggcacagtcaaaatcgcgggagggctctctgtggggctcgccgttcactgtgaccatcacaacgttggatgttgcgcagctacctcagcggcaacaggtgcgtggcagtgggaaaaggacagcaaattcagtgcagcatatcgtcaaagaaagtgctcttctgcggatcaataacaacgatgatgcatattgtcttttttacgctttggagacaagcaggaagtaccacatcaaagagatgagccgacagaccttttctaaatatattaatcggcagaatgggcgacgactggaagacgtgtttggactgatgagcagcgcaaacattcgcaccgatctgagagaatatgacgcggttgtctatgtgccgattgtcgtggactattggaatcggaaatacgccacagcaaaccagcgatttaaggtgttcatttttggcgctacaggcagctatcggccaaaatttcaatatgggccggacaattacaacgtcgaaatcccgctctaccatcacaacggccatttcgacggaattcgaagcggggtgggcaaagcggtgtttgggcgtgactactactgcttttcgtgtgagtgcccctacgataatgccaatgatcattcactgcagtgtaaagcaaagtgcataaactgcggtcgcataggagtggggcgaccgtgctgagcggatgacaacaacgacagttattacagagaatacacagcatgtggcaaggatttcatgagccaagactgtttcagtcatcatttgtcgagcaatgtgtgccgacaattcaagaaatgcaaacagtgcggagttgtgtggaatgtcaaacaaaaccgacgaaaaggacgcagcggacacgtttgcggtgagaaattctgctacacctgcaaatgttaccataagccggagcggggctgcttcatacagcagttgaaggcgcgccgccccacaaagtacagactgatcgcctttgactgtgaaacaacacagaacacgcgaattgagggcgaccgcagacttcattctgtcaacttcatctcatgctatgtcgtctgcaccaagtgcataaacgaaaatttatggcgaaattccctacaagcgccatgtggcatttgcggtcggcagcgcaccgtcacattctcccaccgcgcctatgaacgcacacaaaccgatgcccaattcatcactccgtgcccaatggcggcctttgctcaatggctgctcagcgaattcgatccgcgctatcccacaatgctcttcgcccatttcgggggtcgctttgacaacattatgctgtttcggcagttcttcctcaacgggttttgcccgcaaatgatccgccgtggtaacaaattatacgaaatgaaaattgcgaggggcgaaaaaaacccggaaatcatcgtaagagacagctggaaccttatgccggtgccgctcggcgctctgcccggagcgtttggactcaatgtgcaggataaggagttcttccctcatttggcgaatgttgaggcgaattatgggcacattctgcagtcgctaccgccaaaagctgactacttatacggcgggatgacgcccgaccgacagcgcagattcgaccagtggtacgcggaacaccgccatcagcagttcgacctatgtgaacagctcgcagcctactgcaccaacgacacgcgcatactaattgaggcgttggtcgcttttcgcacggagttcttgacgatcagtgacccgttggagcggcatggatgcttggatgacgacaacgacgacgaagaggaggaggagcaggatgacgacaatgcatttgaagtgatcggcggtggcattgacataacgtgggagccgatgaccatcgccagtgcctcaatgagacactttcgacttaatcacctcaagagggatcagctcgccattgtgcccgagtgcggctacgacactacaaacacgcaaagccttgtagcgctcaaattcatggactggtacgccaaaaagaacggggtgagcatccagacggcacactcgcccggcggagagaaaaaaattggtcagtacactgttgacggatacattgcgtcgaccgacaccgtgattgaggtcaacggctgccactggcacgcgcacgaccacccgcgtcaccgctttcagccccaaacagtgatggcgaatgggaaaacggcgcagcggatacgggaggacgatgcgcgacggatggccttcatcacatctcaggtacaacaagtgcgcgtattttgggagtgtgaaatcaacgcggagaagcgcaaaaaggacgaaatgaagcgcgcctttgcgcagtacaaggacag

SEQ ID NO: 8895 - DNA, 1918 bp, Heterodera glycines
  unsure (1)..(1918): unsure at all n locations
gcaaaaattttaaaaatttttcatttacttcaaaaaatactgtaaaaggcatgaaaaaaggcaccttttcgtcattttttgagtttcgttttcgaccgtcaaaaaatttagtgtcgttttcgtatttaaaatttttaaatttatttccgtttcattttctttttcgcttaatagttttcgacagtgattgatttagcagtaaagttaaacttttcctatatataaatttataaaattgatatgaattgacacaaataagctatgagactttgaagacattgatatgagatcaaacagctggttaataagaatttataattaaaaaatttaattgttactttttttatccttattaataacttattaatttattttcatgacaacaattttggcttttaaaattaaacgacggcataaccttaatatttgttacaaaagtttaaatcaatacgtaattaaaatattaaaaccaaaatatagaaatattataatatttcaaatcaaaattttataaaataaaataaagaaaaaactttcggttaataacaaagacaaagaaattaaatagtcatcaattactcaccagccattttcttaaaataaaaattttaaaataattagaatatataatattatagtaatgtaatgaaacataaattaaaaaataactttgaaaaatgaaaataaattatttaattacaacataaattaaaatcacgataatatcctagccgtatcttagaatgatgaataaccaaccccactgccttaccacagcattccgaagcccactcgccttgttaacttaatattattttctagcttaaaagtttgaataattatgattgatcggtaaaaaagcaaaataattataaaatttaagaaaaattatttaaaaatacaaaaaaattaaatttaaaacaatgaaaatataaataaataaattcagaattatttaaaaagtggcaccatcataattaataataggatttatatgtttttttcgatattcagcgacagcaggtcctaatttttttcacgacaacgcggctggtttcacgaaaaaatactatgtctccttgtggataaaatcgacacgccgtgatcaatcgtcaccttttttcaaataagacgctcaagttgcgattgaaattaaaaaaaataatataaataataaattaagagactagtaataattcataaattaaaatagataataatttctcttaaaaattactaaatatttttaacaactgagtttccattttacacataaaataaaagataaatgattctaataaaaaaataaaaataatttttttatgataacaaaattaaaaatactaacatagaaaaataatttaaaaacacatattttaacgaggtctttaatgatcgtaaataatttttcactattattagaaaataagaataaaatcacttgtgcaaattcacaaaattacaaatcatgtttaattgaccttttttcaaaaatttttcattaaaaaataaataaaacaataaatcacagaaaaatatgccagtacataagtaagttttgcagttgatataggagacttagaataactaaaacatgataaacataataattcaatttataaataaattaaaaacaattttaaagattaaaactttatgtaattgacctaaagcatactcaattaaaaaaaacaatctgtgcgttaaattttaatttgaaaagagatttaacaaaaattcatgaaaatacgaatatattaataatctaaacattgacatatattaattaaatcatataaaaaatttattanaatttttttgaaaaaactatttcactttctcatttttcggcagcatctaaagtgaaacgtgtccactggataataaatttatttaaatttaatatttgaaagcgatt

SEQ ID NO: 8896 - DNA, 4560 bp, Heterodera glycines
  unsure (1)..(4560): unsure at all n locations
atattttttgttgtaatttgttaaaaaatttgtaaaaaaattataccccgattaaagagaaattgataaaataaattgattaccagcataaacttaacaatagtaattttgtaataataaaaaagctaagaaataaaattttggataacaatttaaaagctagaattaatataaaactaataaataaaaattaattacaaaatgaagaaaggatatggtggtctgagctgagccatgcaataatgactggagaaatttttttccctacgagaccataatgttcaaaatttgcagctaaaaaattcatattaatacataattaggattcaaaaaattaattgcattttaaaagcaaaaaatataaaattaaatttgtatacataaaaaaacaactaagattacctatagcgattcatgagataggtcatgtcatcgcttcatcaaaaaaaaatataaaaagtattcgcaacattctgatccaaacagtaaaaataataaattaaaaaagaaataaaaatggttaatttattagccacttaatttctttatttttttagttaaaaatgcaaaataaataattttttgaattttcaaatttttcatatttataaacaatataataaaaatttaaacttttatattaaacaaaaaatacaaccaattcaaatgcaaaataattttaattaaaacaataagcaaatgttattataaattacgaaatctttagaaactttgtaagaagtctgccaataataattgattaggtctattaattcgatttatctaattaaatccataaaagatttagtcacttaataaatcatcacacaaatacagctgaaaaatatataattagaatattaactatattttcattagtgcgtgctgacgcgttttataaatccgccaaaatgtgtttgcgcgttttataaatccgccaaaatgtgtttgcgcgttttataaatccgccaacataaattagcatgccattatacatataaaatttgttattttattcttatttaaactatcttagtaggaaaataaaacatatttagtgttctgaaaccttgtatttctgtatttccattacctctttatgcaatttattattaattaaaaaaatatttttaatataatcataatgtttcttatataaaatattataatgattttttaaaatcatatatgctgtcggatttataaaacgcgcatggtaataaaataaaaatatgtgcatgggtggcggaatttataaaacgcactagcaccgttgaactgtatctatccagtgatattgattcgtcgtaaatttaaacttacaaacgacaacatgtctttaagcattttttaaaaattttgggtatttagagaaaactcaaatattaaaaaactgaccaaaaaatcagaccaaaaaaccacccgaaaacgaaaaatataaatttaagtaattaaaatttaaaaatatgttttataaagttaataaattattattgttaaaataacccaatttaccataaatacactacaaaaagtgaaataatttttattaaattattgtataatcaaagattgttaaaagtcagggtctaaggaaaaatcaactaaacaatatgtaaaggccagcagaattgcagcttaagccgtggattgtattataaatatacttaatgcaaattgcgcttcgaagcaaattgataattattagggcttccttttttaggtaaatacctaaaattttgcgcactgaatatgttgcgtcgtttatcaataacaacaaatataatcaataataaataaataataaataagtcagaggagaaaagagagacaaattgtgtgtgtggtgaaatgcaaatgatgagatgagaatgaatgaatgaagtccgaagcgaggaaggagggaagagagcggtatttatgggcgatgaaagtggtgacgtgtcaataaacataatgccaagaaaatatgaaatggcaataatataacacctcccctcttacaaaaatcttaatcacgatccctgatctcatgtcgctggccggtgggccttggactcaaaaatcgaactttcttggttgttctttttgatcgtcgcagttccggtgtttgttcttctgtttcttggtgttgatccatctgatcagtccgttcttgtggttgcattcgtcggttgaccactcatgatcagtgccatttgctgccgataacctcactgcgtttgcgtgacgtgtgatgatcttatgtgctaattatgtggattgaattttaagaattaatccattctttgccacaattttaccaaaaagccaaactgttttaccgttttggtaattaacaaactgtacttgatcgcctattttgaactcaatcctttttgctccaattttctgtcaaactgtgttttcattttgtgtgcgttggcattgtttcctcctgtgcgtgtttgactttgatcagggcgcatgagtgaaatgtgagtgcgcaatttgcgacccaaaaacaattctgacggtgatctgttactcaatactgcaattggggtggaacggtatgacaaaagtgatttttttaaaccaatccttatctccattgcatttcttcaattgtcttttgaagaaatccacataccgttcagctgctccgtttgattgcgggtggtacggagatgagaaaatgtgcttgattgaattcctggtacaaaaatttttgaaattttgtgaaaggaattggggcccattgtccgaaacaatcgtttttggaataccaaccctatcaaataaccactgaagttggtcaatgatggcctgtgacgatgattgacggagaagaaaaacttctggccatttcgaaaatgtgtcgatgaccaccaggtaaatgttgccatcactgcatggaccagccaggtcaatgtgaatgcgttcgaaaaccgaagttgttgctggccaaggttggagtggctcttgtttgggtgattgtttggctgcttgttgacattggctgcacccgcgaacaatcgtttcgatgtcggtgtccattgatggccaatagacgaacgatcgtgctaaatttttcatcctgaactatgcctgggtgagccaagtgcagcgccttcagtgtgcgacttcgaagtggcggagggatgacagagcgtccattgaacaccagacaaccntgtgatcaatgaaaagttgtgtcggcctgaaaaatagggtttcatttcggcattaatcccttgattaggccatttggtctgtgtaaaattgatcacttctttaatcaactcatcctcctgttgtgctgttttgatttcgtccaccgtgattggcagttgttcaacttgcgcgttgaaaacatgctcaacgtccgcgtctgcttcggcacataacttagcatggtggtgcggttccaatgcgttgtttagtccggtgctgaagtcgaagcacagccggactttgccattggcttttctgaccgcgacgattggtgctgcccatttgctgtagtcgactttttgaagaactaccaactcaatcattctgtcctattcggcgtccacttcattttgtacaccttgtacaccttgtaaaattacgtcaattgcctaaaggaataaataaataaaaactaaaacaacaggctggcaatatgttaaataattgaaataaaacatggcaaaaataaaattttttctagtaataaaagcacatattataataaataaattcttcaataaaaaaaattggtaatttgaattatattaaaaaacattaaaataatgttttcaattgtaattttatgaacaaattgagaaacttgattaaattacaagacaataaatatttatgtgaaaaaatttatggagcctaaaaaggagaagacccaatttgctggtctgttcaacgaaaagcacgagcgagaaatagaacgtccttgtcttgcatgagctacaatgaaatgtcgatctagcaaataagtcgagaaaaaaagaaaaaataaactaaatagaactcaaaaagtctaaaagaattcgaattctaataaacattaaacaatattattactctagtttattgaataaatgaaaaagttaaatgtaaaacatataaagaaactaaatttaagacgattaaaattgttgtttaattaaactatcaatctatatttgtaatttattcataatgaatgtaaaagaaaataagagccctaacagaaaaataaattatctttttgaaatggaaaaaagctaattcataattcttgaatcctatttttacaccgactaaaaagacaccagccttggaacattgtttctcggtgaagacaccatgtttaaccacattaagatacatgtaaaaaaataattaattaattatatattaatttagcacaaaaaattaattattaaactanattataaatataaaattaacattgaagaaatcaaaaagttatttatgtgttaatgaattaaatataccaccaccaaaataccactttgcaanntacataaatgatatacatatcgaatttttcttatcatttgctttattacnact

SEQ ID NO: 8897 - DNA, 1317 bp, Heterodera glycines
  unsure (1)..(1317): unsure at all n locations
attttggtttgtatcgatgtgcttagtagaaagatttttacgncagagtctgagtcgaagaaaagcgacnacatgattgaagcacttgaaaaagtgttcaaaaaagccggtatgatgcgtaacaaactgtaagtgaagcaggtttgagtttccaagcaaaacggatgattgaatgctggaagcaaaaggacataatcaaaaacataatgtacagtcctagcctgcattcgggtgtggttgaacgggcgaatcgaacactcaaggagcgcttatacaaatattntagcgaaaataacactctccagcttctataacctttaagaatgcttcggcgttaaaaaaactcctatataaagaacaagctgatgacaaggtaatcaaagtaaaggcaaaattcaaatttggcgatattgtaagaattagcaaagagaaaggacaaatttcaaaaggttactaacccaattttactgacgaacttttaaccaaaatcgtcaaatttcgtgtcttgggactcctaaaggttcttaacaattatttacggctgtttttacggttttcagtcactatttctcgattttaagcaactaataatctgttccttattcataaccggttagtttttgcctttcaataactgcaaaatagttcgttccattcgaatctacttgatgagtaaagcacaaaaaaacatattttctaagcatgttttcggtttgcgttgtgaagaaatttggaattttaaaagattatctgggatttttaggccgattcgcgtagtaatttcggaaagaaactaaaattttatgtagcataaaaatgaatcggaaaaatgtaccatcttatttaaacctactagtaaattctttaatgtataaatttattttttatagattttaaatagaaaaaaactattatttaaattattcggataaacatatatgtaaatataactgaaaccaataaaaaatgtaaaaccaaaacaaaattattaatgaatacaaaagtttaaataaaaatagttaacgttgaataaattaataaattaacctttataaccctaatctgaataaatttatataagtgatattcaaaaatctgtatttttatttaagtaaaaaaaaatttatttcaacatgaaagtcaaataaacaaatttattaacctagagatagaaaattacattaaatttcttctaattttaaggtataaattaaataaattctatttcgcatttaattatcactttgttataaatgtttaaaacctggacatagtattattataaattgtacgaggaataaatatttttgtgataaa

SEQ ID NO: 8898 - DNA, 4561 bp, Heterodera glycines
  unsure (1)..(4561): unsure at all n locations
ttgaagagtcgaactttgaaaaagcctggacttggttcttttaataaagcgccaggccaaggaaaaccagtgaaattcacgtcttggcccaagttagggcaacctcttttttgataagattttctcccccccccctggataaatagtttagagggaatttgccattattagcagcaaattcactacctacaataattaacaaattgttcatttcttcagatttgcatcactcacaatcagtctttacttatggaagaaaaacaagcggtaagttttgttttcttgtctatcgctcagaattttggaccgtatttcggcactttttaacaccctaatttcgtgccgtccatcaaaacggagagagcgaactgtgcagaagtttgaactgggcgctaaccaactgagcgcctgaccggtttttggggtataactcatttcatagttgcccgaattgagtgaatttaatatcattcgaaagctttaagtgtcctctattagcctgcaaatttcgttaagtttcaataaagttctggccaaaaataaattcattcaattcgggcaactatggaatgccgggctggcgcccaggcgttaatttaacaaaaattttgctacttttttgaaatttttttgactactctgaaaatttttatgaagagcgaaacgcatgctaaaagcactcattttctagtaatgctgcatttttctgagccaaattggctgagtttttctttgtttcgccatgggagggcggggcgttctccgccactgacctcaacgccgtccatatctccgcgtttagttttcaatcgactcattcatttgtacatttccttttctttattagtttcttatataataaaaacccattttcacgaacaaaaaatttttgcaagagttccccccataaatggctgagtgtgccaaaaaatgcaaagttcaaattccgaccgaattggtcgctgaattggtcgatgttctccgttttgatgtccgttgggccatcgtccgcgtttcagcggcctttgacattttggtttttaaaaaacaaaatgcttttataattgccaaaaaagttgagcaattcatccctttaaaagtattttattttctctaattttagcagacggatctgaacagtgggaaaacggaactcattaaactcgtggccgggcacagtgacgaaaattcgcttaaactccatttaaaaagtgagttcttttgactgcttttgcgccacggcagccgaggatttttgaaaaacctgtagttcaccataaaattttttgcaaatttttttttgaatttctcaggggaggagtttaggctgatacgaggggaaaagactgtgtgtgagaaatgaagtgcacccgtaattcgcggtcaaaattaatcatttaacaaatgcctaggccttagcaatttcttcatgttgaatggcgttgctgtgagtcagtccgttgatgatttgtcctccgtgccaattttcaaaaatgccgttgccgaaatgaccgaccaattgcctcacgatttgaagacacaccggcatctgtgagtggattttttgggtcttattattgcaattgttaacatttaagttttacaacatttcgtacaatcattaactgtacaaaatcgcaactacgcgcctaccggtacgaatgaaaaaagattggagaggaaactaattgtctaattattcgtttagtcttcattttttggaaagcgttaaaaatgcaaattcccacgaagaattctttactcgccctgaacagtccgctggtgtttgtgaatatttgggggaattctttactcgccctggacagcccgctgatgctcgtgaacatttggacggaaaactgagaagcgccaagattaagctgtttaactatgcttacttgtttggtaatcatggtgctctacagtttcacattgaaagtgcgtaacttttgctttacttcccaaaaaactgacttcccagggttttttttgtacaaacattactgttaagcactttggaagtgttttggtaaaggcgaaacagtgaagcgctcggacggtcttcagggcggattaccaatgagctatcctatcttcatgaaggcgtttgagcaattaatcatcgacaaatgcacgtcagaagaaagccgactcgttcgccagctgtaatttattatatgccaaaaacacccttaatcacatttagttgtggagtcattcattgattccttaatcgatcaaagtcgtttgttcaattcgatatctgtgaatctatgcgttgctggtaacgagggactgcccaccggtcagtcgtcatcgaattcgtccgtttttggtgctcagcagaaggaatcgtccgttggtccgtcattcagttcgcccgttgttgatgaacaacagcagcagaaggactcgtctggtgtttcgtcggcacaacagcatggacaaagttggcaaatgcatcgaaatttccaatgattttcaacttttgttctcagagcgagccaacactactgatcagtgccagcatcctccgaagaaagaaagaggcggaaacaaataaagtggaaaggcggcaaaggagggagggatttgtgggtttcgagaaatttatcattggaggcacttttttattgagttttaaatcggcaacggaacggcgtattttgttgtttttggaaaatgttcagttatttatgttcttttaccaatatgcataaagacaatgtttaagaaaaaacatttgtaatcgcagagattctcatgcaaaaaacaagttgcaaatgcccgctgcagtgtcagtctcatcaattagcgcgctaattacccccataaataagtgcactcagtcgcttgacagtgggcgtcaaccgaggcggtccagagaggaggggagggggggggggtatttgggattgcatttgaggggcatactgtaaggcatggactaattgtaagtttatccttttttcaaaatttcaaatgttgccctctcaaaatgagtgtgtacattttctctctccttctctctatcctcttttctttctctcttcatttctctctctctctctcacagtctctctctctctattcttttctctcactctcattaatcactatgggtcaactccactgtgcagagaaaagcctagtactatctcgtcgtttctctttttctttgtaatttctctttctttggcgtactatctcttcattttaattatgtaaaaaacaacatttactttgtgacgtttaacttttttcctgcacgttaaatccacaccaaattttgcatagcgatagagaaaaaaaaattacgaacaacatttgggtataatgaaaaaaatttgaagcccggaattatttaaaaattaaataataataaaaagtatttcttttcctctccttttggcgtactatattcacatctttaacacacaaaaaatatcaaattcgtaaatactaataattttggttgtaaaggaacaaaatcactttgagcatttagaatcaatagaaaaaagaataaatttagcattttggttagaaagagcaggacttgagttataacatgataaaagtttgaaactcccacaactttttttttgagatgacaaattacttaacattcgcttagaaaaagattcatttttagtgaaaaagtgcagttgttacccagcagtggaaaaaaagttattggttaaatagcaaaaaaaaaaaaaggtcttcaggtcgggtcccccccccccccccgaaaaatgtttctagatacgcccctgattattttgtcaacaaatttgatatatatttcccatttttcagcttctcgaaaagaatttgttgtgccttcaattttccatggcagctgaacctccgccatttgactacgacgggttgaacgtaagttttattgcactaacaaatcttatggggattgtcgttggtccgttcctgaagcacgcggccccctgttttggatcgaatgtgtaatcacttcgcaacaatcggttctgttcggtctgaacgggttgaacaccccaaattttgtatggcaccctaacatatgttaaataggaatttgtaatagttgccgagggtaggacccatttttttgaaaaatcaacgaacattcatccaattcgtgtttagcgacaccgaaaaccggaattaggtagtttagtttgtctcctccattgttcgaaaatttttttattattttaagtcaaaactttttaggaggttttatggttgattatcacgaatttgacgtccatttagatcaatttcgaaccttaacccgaatttcaacccaaaaaatcgcaagttcaaatttttcgcattcttttaaaccatttttagacgaaaaatgcgaaactcgaaattttgtaatttcgagtttctgataaaattcgtcgtgttcggggatgaaattgatcgaaaagatgtctttatgcctttaaatatnttctttttttgaaagacgcctgcaaataatntgtatttttttttttcagaacccatgaaggattcctaccatcccacaaatctttccaatagaaag

SEQ ID NO: 8899 - DNA, 1110 bp, Heterodera glycines
  unsure (1)..(1110): unsure at all n locations
ttttttaataaaatannctttctaagattttttcggctcaagtacagtttatgcgtccaatcgacttttatgcgtccaatcgacttttatgcgtccaatcgactcttatgcgtccaatcaattttttatgcgtcccatcattttttatgcgtccaataaaatttttatgcgtccaatcaatttttcattaaaaacctttaaacatttaattgcactaaatccaactaccagctcaagaaaacacatttttctccattcaaaaacaggcaaagttagctttatttttctctcttttcgtagtcaaaaagccgtcatttatctctccatttgccggcaaaaagctgccagccgtcattttctctccattcgtcggcaaaaagctgccagccgtcattttctctccgttcgtcggcaaaaagctgccagccgtcattttctctccgttcgtcggcaaaaagctgccagccgtcattttctctccgttcgtcggcaaaaagctgccagccgtcattttctctccgttcttcaaagtgctatggcaatgtttcgattggctctttttcttttggcctgcgctttaactcatgcaatggaatggcacggctttattattgacaaattcggataccgaagggcgaacccttggcattgttgtggaatatgccctgacaataacaacatctacgataaaggccgatgcgttaacgaatctagctatgaaacggaaaccgaccgttacattcgcaacacaacttacatttatatgactggtaattctgagaagaaatgtgtaatttaaaaaatccgtacaggaatagaaggttgttgctatttttgtgggaaaacgccctcagattacatgtcgtcatgtgcttcatcaatgccaattgacgaatgtccgcttgagcaacaatattgcaagagaaattttgagaaggcgaccggtttttagaattattttcattttgaaacaaaattttgaagtttcacaagttgagccgagcatgcgttgttttgcatgtacagcatttatcagagtgatcagagaagtgaaaagcgaaggcattggatggataaaagaggaattaaggagttactgtcgacttgtcc

SEQ ID NO: 8900 - DNA, 1378 bp, Heterodera glycines
atttttcagacaatgttaggcaccggtctcctttcttttaaattggcctttaaatattccggcatttgggtgattacttcttttccttttcccctttcaaagtgcttcctcatttctcagcttggtcttttcctgctcatttgtgtctgttgcatttgcactttcacgtgccgtcagctcgtcaattgctcacaatttttctgtcagcgaaagggccgcgaaatgatggattatgcaaacggtgagaccggcgggcgggagccgagctcgagttacaattgccgacagaaagaaatgtcaatttaaaacacatttttgaatcctcagaatttcattgcagaaattttgagggcttcggctccctttcatggattactataatgtaaatttttggtctttgtcagtcatgcgaagtgccatcgaatgcggccctccgtggataagcgaacgcggttactttttcaagtgggcgattatttcaaataaaaaccaatttatgagcaattcacagacaattggtcaactcgacaatgttcatttgtcagctcggcttttgctgtgtttattttgtttttatggctgacaatgtcaaacaagtctcttattttttcaaactattttcatttattttcttttgtatttatttggcccaatattttcagttcttcgatgagacatcccaaattcacatttcccaagctggttggatcgctttgctgctcattccaacaatggcgtaatcaaaatgaatatttaaaaaatgattttccaaaatgccattttcaattccccccccccttccccggttaagtctttgcaccattcgacaattgaaagtgttggcaccgcttgcgttggttgccaacttggtctatttgggagcggtgctcatcattctcgaatatatgatcacccatttggacagcatcgacgaattgcccgccgtcggcaatttgtccgatttgcccctcttttttggcactgtcattttcgctttcgaaggcattgccgtcgtacgttttctctccgttcgaattggccaattaagcgcaataattgccaaaaggtactgccaattgaaaaccaaatggaccaaccgcaccatttcatctctccgaacggagttctgaacacttcgtgtctgctcgttctgtgcatttacggcaccgtacggacagtgccattttcttgccattatttacatccgcttttcgctcctttaagatgggcttctacggctatttggcgttcgggaaaaatgtgaaggataccgtaacactgaacttgccatcgacaccgtaagggaatcacttttagaaaacgaaagacggacctttttagcttttaccaaaccatcaaaaatatgctggtcagtcag

SEQ ID NO: 8901 - DNA, 1721 bp, Heterodera glycines
cgaatgcaatggacagtgaagacctttgaactctccatcggatcacaatgaagaaacggaagattgtgattttccatcaaatatttatagcagtctttctgcgttctttttttattggctcattggatgataaatccaataataacatcatttctccggtcataaaaaatttattaaaaagggggataaatcggatacataatgcccattgaactaaattccccaaaggacaattaggggcatgtgaaacaatccgaccaattccttccccctccgtttttgtgaggtttttcatcgccaccctccctcatttctgcgcccattgtcacctcctcggccgttttgttgtcggtatgtcatttgttgggaatacatcggactacgagacattggcgctgacgatgccggcacagcgggttggggtggcgaaagcgactgataacgcacaaattgttgctgtgagagatgggaggaagaggcgcgctgactgtgggagggatcgccgtgcgaatgggcagcggaggaagcagcagccgcgacaatggcctaggatgagataaatggagcattactgtttatttaaaccaattactttgatcgcggcattgacgacttcctgtggcatgccaatgttgttcagattcagtgtctccaattggttgagcatttgactaccagccgcaatcggcgggtgctgttgattgtgagcagagaatggctgatttaaatgttgctgtactgaacctgagatgagtggataaaagtgtaaaataaaatgcgtgatttcacttccaagggtcgaccaatcaattctattagagagaaatgacaaccgaccggaaaacattgggcccgcggttcggctttgctgaatgccgggagtcgatgtgatcagctgatgctttggcattgccatcgacgccatttcatcgaattcccattttgtgtttgtgccataattactatacagttcacttgtagaataactatcctaaaaaacaaagaattaattaccacacattatcgtctttttttcttacatcttcagggacgaaattgtgtgggtggggcggaataaaggaagagtgatggtggacagagtgaacggtcgagtcctggggacgagtgctgtgggcggaagaaatgctgacggaggtgtctttgaagtcgacctggccaattctaaaaaaacatttaaattgaaaactggattttttaccaacttaatcaattccttggcaacgataggcgtcgaaaaagtaacgaaagcgaaggaacggaaaggacgcggaatgtaaacgtcggtgaccgatgagtcggggtcgatcctttgcgcttcttccataaagcgttttttcaattcaatgggcgtgactccttcttggagtcgaccaacaaatatttttgaggaaagcgcattcttaaattttgagataatttagggagagggggggggggagggggtaaaaagcaaacctttgaaaatgggactttcacttgacattcgcgatctccaataatgtgggactgcaaaggaaattgcaacaaaataacggtggcgggggcacgataattccgcccccgcgcggcgggggcgggggtttgctttgaattagattcaaaaaatctcacaaaaaaattaatttttatgaatgatttctttggctccacattcctttattagttgatcgcctcgattctatttattttgacataaattg

SEQ ID NO: 8902 - DNA, 3017 bp, Heterodera glycines
attgcaacaaaataatggaagtcaaaaaacgcaatagaaacacaaactttgtgtttgagcactcgcttctgtgcctccaaatcggccatttggatgaaaccgaagcctcgattggacagatggcccttttgggttttgatctaaataaaaaaattttaatgtaaaagggtttgtgagcagaactctcttatgtcctttatatagaataacaaaatcagcctcacaaacaaatgcaatttattgtgcagaggcaaaaaattgagacccaatgcattttcatgttcactaaatggtacgtagagaaagaacagacctcgcaatggaccactttaccaaacgactcaaagtgcgcacggagctgttcttcgctcagctcgaatggcaatcccatgaccaataggtcgacaattcgtccggttgtgtcttcctcctctcgctcgcgttgagccgtccctaccgcggagggcgtccccaccggcgcctctttgcccatcattcgtttttgctttgtcgcgccctgctgtcgcttcgtgaccccgcttcgcatcgcctcgtttttcgctccgcttcgtctgtccatcgcgtcgatggcgtcgctgtcgcatgaattacacaccgactcatcatcactctcaaccatcaatttacgacgcttcgcattttgatcacctaacaaaatgtcattgccataatttatgttaagcaaacaatagcagatttagcattaacaaatgcattaaaaccctcaattattttcgctgcacataatcaattctatagaacacgttcaagcacttgcgcttgattaaaaagatcttcaaatgcaaattccacggattgtgcacagttgtcaaaaaagcaaacaagcacttatagacaaacaaactttttttgactgcatttttggttccactttcggttggctgttgatattgcgataacacaacaaacactaaaataataaatcagaagcaaacgcaaaaacgtagagaaattgacgcaatcagaataatacataacaacgaataaatttaagaacctttgttagaccatccatccgaaggaggataaaacttagtccccgaggcatcgatcctgtgaatttaatttttgtaaaaaaaaggcaaaaaattgtaatactcacaacaaagcacggtatgcgcccgtctttgaatttttgtactttagcccatgtgcgcccggaaaagcaccgacaagagtctgtagaccaagtgtgttgttgtcttcattgttcgtgggcagttcaattcgttctgcttcctcatcagcacttcgtgcaacaacaacatactcaggctggaaaaaccaactacttaatgcatggacaaaggaagagacctcttgtttagtcgaatccataatcaaggggatgtccaatttataagaattgtttatcgaagcttttatataatatacatgaatacattagtcaaaataacaaattcattcaacttctagcaattcacgagattatcaggatctctttacagaactgcagatcatttagttcctttttaaattggcgtcatacatggcgttttgttttgaaaaagaaaaatatttaaattttatattcttgcactatgggttagagcccggaaatttcaaatttgcggatcctgttgcaggattggaattcaaaaatttttgcaggaccggacccggccggattaatcctgcaaatcctgcattttaaatttgcaggatcccgcgcaggattgcggattcttagaaattttgaaaaaatttcaataaatttccaaaaaaaaatacctgacaagaaattttaggggctggcgggatgcattaaaaggacgactaagatttttcgaaagacggtaaaaagagatcggaaatcaaatctgttaatggtcaataaatttgactattttttgcttttcaaaaatgcttttttttcggcgcaatttttgtcaaaaactaggaacaaaggggtccgtctatgcagataggcgccgtctgaaatttttttttgaaaattttatcaattagttaactgattttgaccaaaaaatgaccaaatgtcacaccttttgactcaattctacaggattaaggtcgatccagtggtgtcgataggcgccgccgggaaatttttttgcaaattctaggtgaaatttgagatgaaaattgaatttattttgattgaattataaatttattcaaaaactttggcattccgtcttttaaaattttcaaagaatgtatgcggatcctgccggatcccgcacaaaaatcaaatttgcggatcctgttgcaggattggaattcaaaattttttgccggaccggatccggccggattaatcctgcaaatcctgcattttccaaaaaattcaggattgcggactgggatcctgcaaaatcctgcgcaggatccggtcctgttccgggctctaatagggacggattaaaaaataaaatagttaaatctaattaaattttagtattttaacaaattaaaaattttttttttaaggatttctagggagcaaaacacgtaaaactttagaaaaaacttaattttggtcatttaaatggttacctatcatttcgtcacttatcgtttcgtcactgttcatttcgtcactgagacataatttttaaaaaacattgacaaatctcaataaaattatatcatataatttgtttaaaattctctaaaaattattcctgggtaagagtactaccggtggtagccccttttcgaaaaatttttttgagattttaaaaaatcacaaaatgatagaaggttttcaaggtcgctgatcacgaatttgaagttgtcctaaaaatgatgacgctctgagaaatagactgggattttctgctgctgctttctgctctaatttttcaaaaatttgacgcaaattgttgtcttaatcaacatagagagatttacgcttaagaccattccctctaatgccatttgcaggcgcttttacatactcagcaacgaaatattacaatcgctgaaat

SEQ ID NO: 8903 - DNA, 3598 bp, Heterodera glycines
  unsure (1)..(3598): unsure at all n locations
caaacttaatcgggcattttaaacaagcacactaattcccgtaacacacattcaaattgnaaaaaagccaacaaagagcgcgtttaaatattcaaaaacagcgcttcaattgggaggtgtaaaaacaacaatttgggccaaagatcaccaaatggcatttttgcattttctcacgccttgtggccattttggtaggtaaaatgggaatgaaagggcaataaaagtgagtgggcacatcgcagaacagaaaatttatgcgtggtttggtttaacatttaaatgcgttaatataattatcagggctcgcaagttgaaacaatattttattagcctaaaaaccagggctgctaattgaaacttttcaaaatagcatttggccaataggaaaatcatcatttggcgtcaaaatcagcattttgataatttaattcaaaatgaaaaaataattgaaaatttttttttacggcgcgctttttccaaaaaacttttggtgaatgggggggggggggtgtccggcggtgccgatagatgccgccgggaaaattttcgaaaacttgaatgcaatttgttaaaagattttcaccaaaaatgaccaatttttgagattttgagccaattttgaggaaagatagacattttgactattttttaacagattttctctgaaattttggttattttacactcaagaaaatgaaataatctcttaattcttttcaaaaacgaattaattcaaatattcgcttcaataaaaatagtcaaataggtcattcaaattttgcatttttttattttcaaatccaaaaataagcacaaaataagcacgtaacgctgaaataagcacaaatcttagaaataagcacacttgcaagccctgtattataatcaacccttaattgtttatttccgattatttttgtttaattgttaaccaattaacagaaagaattcccgtcaaaaatgaattttcatctaaaatataaattataatttttttaatacaatacaatttgtcagtgctcacttgccttttcgtcagtttgggcttagttttcgtgcccaaattgctgttcatttaccactggcccgaacttaccaaggaggagcaacagcaaagcacgcagcgccaattgttggaggtgtcagcgccgaaccgtagcgaacagctacggtatcagcaactgttaaaggaaaatgcggagataaaacgtcaaattgaattggtaaaaaataaaaaaataattctatatattagtacactttccaatatttgaaatttaaatcaaaaaattttcaattttcagaggaaccttcgaattcaagaatgtcgtcggattttggagggacatatcacattgataaatccgctgaacaaagcaaaaaattcgacggtacgcagaagacaaaagcagcaacagaacaacaacaacaacaatgccaacttaggcaacaataaaaatgccaataataataatgataattataaaaatggaagcgaaagaggcaaacgaagcgacaaaaagtgaaattttaatttaatggattgaaaaatattggaaaacgaaagcttaagcacccttcttcggccttgctcaagtgccattggcttggcctgcctcgtcgacttcgagccgatcaccacttcagtcggcatggacccgaccacgaccattacgttgctggagcccacaacaaccgcgtcgggtggcgaggaattcgatgaagcaccacccaattacacaactgaagaatcggaaggtggaggaatagctggagaaaatgtggtggaattcgcatcgccgccacgcattgggaagggcaacgccgggggcgaacagagggcaatcgcacggcacgcggaccgacccccggtggaggcggaggaagagcgggagaggggtggaagagcggcgacgcgaggcggagaagacacaggcgggacaaaaattgggggcaaatggaatgggaaaatgggacaaaagtgcctttttgtaattccaggagtgtgcagcgattatgaagaggaagaagatgaagcggacggagaaggaagcggggagaaggtcgaactgatgtcgacagagtccgacgacgccaattggccaaatggcgatgaggaagaaatactgctttaaacagtgtttatataaggaaataatgtgctacgtatattattttaatttaaaaaattcaaattttctaaagagaaattactagaattcttctgcaagcaaaaaataacatctcatcatttcgcttttcttagttgtccataacacaaatcaaataagagtttcctaaaaactaccaaaacgctgcaaaaatatttatctatttattttaaataaaatttttattttaatgttgtttgccaacctaataaataatagagatttataatagatatattttatatgcaatttatacgccgtttttttgccaatattatcaacaataaaagtttcataaactcttttaatatattgtaattgttgcaaatattaatttaaataagctcaacaacttactaaagttttttggagttttttaaaattcgatattttaaataaacataatcagtaattgtttatatattaatgtattatcgtgtcattcattcagtgcttatcgcccttaattgtcctcttcttccgtccatccgttccttcatttgcggccccaccacaaattgtccaaaatggtgccgctggtcatcgcgtcggcgtacgacccggacccgaaaagccattggggccgcgcctcggacaaaatgttgggcatcagagagaggagaagcagcgggaggaggaggagaagcattggcgaaagcatttggaaagaaaaaatggaattggagatttttgaaaatgcaatttaattgctccaaattcggcctttttaaatatttttgtacgtcggccttttaaattatttttgattatcaaagatcactttttggaccacaatttgagtgatggatgacttcaaaacgcgcagaaccaaagcaatttgcagtaataattttgaaaatttaatctaaagtaattaaaactaatccaaatttggaaatgtgttaacgaaaaaatttaattatagtttcaatagaacgggaattcacaaatgagctgcgagaagaacgaacatttaataaatttaaaattaaataaaagtaataacaaaaagaaactggctttttatcgccaaaaacacaaagccgggaaaatcgttaaatactcgtataatttttttcaaaaaggtggggcgatatggcaccgctggccatttttgaaaactttggtccaatttcttattagattttttccaaaaaatatggtgatatttacaatttttactctttagaatttttaaagaaatagattttgacttaaaaatttccagtttttaaaaaataggaaatttagctgggtccagtggtgccaaaccaaaaataaataaatagaatagataataaaattaataaagcaaatttggaaaagggcctaaatttggtgtatgcagtttaaattaacaagttttaagtaaattcttaattattttatgagaaatgtgggtaaattaataaaattaaatggtagat

SEQ ID NO: 8904 - DNA, 1990 bp, Heterodera glycines
  unsure (1)..(1990): unsure at all n locations
atataaattcatgaaaatgccattcatcagagaacggaagtaaaatggtcaagaccctgaattgtaaatgcgatactttatcaaattaattgccaaatggccacctgtccaatgtcccaaatcgccaatcctccgaggcccatcgtttgggccaacttaagacgaagcgcaatggactttcttgacgggtaataagcaatgccattgtcgctgaaagtcaattactgaaatttaagcatcaaaatgctttgagaacccaaaagtgagccgatgttcgccaacatttgcttcaaaactgagtttggcatcggacgaagaaagcaactcaatgaatctgaaaacaaaaagtcgataataaaggagaaagcataaaaaagtgccgcaacgaatagacataatactgttacagtagtctttaatagggcttccaaccaaatacagtagtaaaccaactgattgcccaaaagggccgtgctttggccattggttcggtcgtaaccgtagaaattgaggcccatcaaaattttggcggcttcttcctcctccccaccaccggcggcagtgatcgcgtagcgaatgttcgcctccacccaatcgatcggagcaacggcagacgcactttagcaaaaggtaataattgggggtaattattaattgaaaatgcactcggagctggggaaatcgtaagtcatcaaattgacataatcaaccgccgaaagcaatcgctgcataacttgcgcattcacaatgccaatttcttgcaaactgcaaaaatatttaaacgatcattttttattatttccaaaaggcacttcgcccccagcggcggagtcagcggcaaaatgaactcgaggccggccctgtggaaatgttctgaccaaaactcgatcaattcgagcaaatatctaaagatgtgaaaagaaatattataaattacatttttaattaaagaaaagtatgcgaaagaaaatattagacatttatctgtgttacaccacaaatatatttggcattttgtctagaaacgtaaaaaaagcaaatttgcgttgtgtgttaatcgcatggataccaagaatcgtgactttcagtttgtcatgaatttttagacttcaccccgatacatattttcttaaggagaaaacaacgattttgagataaatttctgaattttaaaattatctttgtgtgataaaattaatttttaaaaaataaataaatttcggccctatggctaaagcggcaaaatgaactcgaggctggctctgtggaaatgttggaccaaaactcgatcaattcgagtaaatatttaagatgtgagaagaaaatatttcttttcttacgtactgagcagctgtgccccgtgtcatggacataatttgtagccaaatttccataacggcgccattgaaattgtagcgctaaaatattatttaatttttatttaaaattgggaccacgataaaattgacctgcaaaaattcgaccaacgacctcacacaacgatattgggcctgttcttcggtgagaaattgttgaaggtgggcaccggaccatccctcgaaaatgaaacgggggacaattcgaacggcggaattgttgagcagaatctgctcaacccaacctgcgaaaagaggcaaaataatcgatggaccagcaaatttggaaaaagcgctcaaattccataattgttaattttaaataaagaattcttggttatccaacaggtgtactgatttgtcaaaacattttgtttttgttccggcgccaccggaccctatcttaaaatgttttaaatttcaaaacaaaacccaaaaaaatgtcattctggggacaatcttttatgaaaccaagcaaattttcaaattcaccctgcggcaccaatcggcaccgccggaccacaatccctattcttctttaatgctgatttttgtctgccanaatgtcagctttgaaaaatttcaagacctgcttttaatcttttcgacctgca

SEQ ID NO: 8905 - DNA, 2949 bp, Heterodera glycines
taatattgtaaggaagaagctgactgggcggttaaaacgcggaaagcgggggttgatagatcaataaaaagaaagggcggatgtgcctcggtagcttaatggtagagctgcccacggaaagggtgcatgagtgggttcgattcccacccgaggtttaacattttgcccatttcttattattttttcataatattaactactgaaaaatgcttaacatttgtaaaataatttactctgaaaagtaattcaattatattatatattgagcaatagggtgaggatttttaagggaaaataagtccaaaataaggcagtaaataagggcgaaaataaggtcgaaaaagttccaaatttaggagtataatttttttaaattactgttttttataaaaaaatttcaaattaatataagcaattttattcactaattgctattacgaataagatactattcgaaatttttgggatcaaatggtcgattcttagggttgtattttcccgaaattttgaagggcgaaacgccatttgatcaattttatttctttgtcttacttttggcaccatgtaagagcactaatgtgcctttggtttgctcgataaataaataaataaataaaacatttttttgcagccctatctattataattcaaaaaaatgtgaaagtgtgaatgggaacgaacagcaggattaagcatcaaaaacattcaaataacgatttttggcacaaaatcttttacattcgtccaattttaatgaaaaaatagtggcaaaaaaggaaatccaaaaacaaaacaaaaaaaaaatggttgacctgtaagcttaaaaattttaagtaaagagtttctttaattatttaattttttttatattattttttttttctaatcaactgagtaatatgagacatattgttatatttttataaaaatgtaaatattttatgagtgtaaattttaaaaaccatgtaaaattttataaagctagacaaattgacatatatcgatagctcttaatttcaataattaaccaaaacaaaaccatttcaaagtttgtttaccatttaccataaaactttgaactctctatcatctggatttttaattttgacactttaaaattttgcattttttttgaaatatggacaattacaaaagcttttgagggtttgaaaaatgttagatttcaaaaattaaaaaataaatactgttgccatcgacatacaaagcaaacaaattaggaattgtttgaatataatatgaatagctagtctaattgaaaaagaataagttaacattttgccttaaaatgaaatttttaaatatataaaatgcattccaaaattatttcttaatatttaggttttaatacaactttaattattaatattaaagaggtgctttttagaggagtaaatattttcttccacctttggcccttttcgtcccccctttcacaaatcagcacatcttttcaaattatcctactatttccattaaattgtccaattaaccacctttgtgaatacttagcccaagcagtgtctcaaaattagagtccggtaaaaaaatttttcgggaacgggaacgggaaaacgaaaatgaacggggcgggattccataacgggattcccgcctttttcccgcgggaatcccgttcccgccggactctactcaaaatcctttctacaaacgcacttaaaatcatagtttgataaatttagctaaaatgtttgagacataatagatgttgacatttaaagaataaaagtcatgcactcagattcgtgatcagcacatttttttaagcctagaaaaaatatccgacaaattttaacatttttttcgtcgggacaccaattattaatgatagtagtatatagcgtcaaaagcgagcgggttccgagcgggtgtttaccgcacaaacccaaacctacgggaggggtcttttgaaggtgccgcccgctcacaaacccgtggctattggactacatctgaagctgccgcacaatcccaaaaccctatgggaggggcgcagccctttgtagttgccgccccatcaaaactgtgttccaaaccaaacctattttactccctatgaagttgccgcccgtggacatttaccgccaagaaccaaagcctatgggaggggtgaagtcaattgatgttgccgccttgtggatttaaaatttccccaaattgttgcgggtgttttttcactccgcaccgcgcagcgccgcgggaaggtcatcaatcatccacctgtcaccaaagtgacagataatgaaattaattttttctttgcaaattaattccaaatctttttgctcgcacgcaaaccttattggcggttttattttatgaaatcctgagattttttatcaagattttttatcctgaaattaaactatttttgaaaatttgctaaaaccgtgcggttttttgcatatcttcccttcgccgcgcagggccgtcatcaatcatgcacctgtcactaaagtgacaagtaattttcaaaaattcaatttttattttgcaaatttaattccaattcttatttatttattttgaattttaatcaattatttgatctcccgttttccaattctcaattatttttgccacctccccagagccctaaacctcgcgggtttctcgctggtgtttcccgcacaatcccaagcctatgggaggggcacacaaactacaaacttttgaatatgccgccctaaaattccatttccccgaatccgagcgggcgtttaccgcacaaaccggtgtctatgtgaggcgtcaaacttttgaagatgccaccaagatgcaaaaccaattggtgcaggaaatttgaattcgttaaaaaggtgctatttttaaagtatccaaaaccgtgcgggtttttgaatttcctccccgccccgacgatgaggcacaattcaggcgtcgcgcaaatta

SEQ ID NO: 8906 - DNA, 3414 bp, Heterodera glycines
gggcggtattttcttttgaaattgccgctacgtgatacttccccgcaaaatcccgagcctattgaaggggtgtttccctttgaagttaccgccgcgggattttcccctaacccattgaaggggtgaaatccgttgggtgatttatgaacaggttcacaaatcaaagatattgtattagtttaaccctttaaagtcgccgcccacgtaaatccgttttccaaaaccgtacgggtatttttttgtctccatctgcatctccgccggtgtgccatgaagtcgtcctgccgcgcaccgccgcggaaagttaatcaatcattcccctgccacaaatgtgacatgtgaaaataccttcaaccaaaattcaagttcttatacatcatatcccaaatactttgtcgctgttttttgaatgctgttcattaaaatttaataatacgtgtttaaaattccaaatcctagaaaaagagcgaaagtgttctttaactgaacataaagataaagaaattatggtccgactaaaaattttaaaataaaaataataaaataagacgaaaaaattaaacgtaaagataaattaaaaaattgaaattttcaattgttggtgctgcgtaccatatttctttccaaaatcgaaaactatttcgcaaatttgaccaacaatttctgaaaactgccaagcaaaattgattgatggatttattatttcgaatttctcatttattacgcaatatgcacgcgatttacattaaaaaacgagttcaaaatatgggctgtccaaaattttgaaaatttaagcaaaattaattaattatcatcagtcagctcaatgacccaaagataattcaaatcccatttaaaaaaataataaaattgaaaattctgaatgtatgttgtttaaagtcattcgtagcaatttaaaaaataatttttcttgataatttttttgctcccttcaccccttccccataaattgttttttctgttattcatcattatttttagattttggatttagggaagttaaaaataattactcttatgtctttgccacgtaattctcgttgttcttctttctatttcaaatttaattgaattcccaaactcaatggtaggggattttcatctaaagttttcccgctgatataatttatatacaaataaagctctggtaaaagattcccttttaactctttaacaaaaactaactcaaataataattttaaaaaatcaaataaatttctattgcaagccttttcgaatttattatctttgctattaagatatgacttcatatgtttggaattttataaaaaaataaaccaaatgaagcggactgtaatttttgtggaaaagtttgtagcacaaaatggatcaacgaaagcaaggggccagccatcacatggtccataagtaaaaaaccaaaaaagggtgagaacaaacaagaaaaggccgtaagttataacatacctaacgaaaacatgtaatcagaatttttgctttaaaaaacaaacttaatttttagaattacagagaaaaatagacaaaacacaattggattatacttattgaaagctgcctataaaatttgattttgtgttattgaacggtaatttataaactaaaagaatttgaccgcgattcagtccgacgttcaaccaatgtcctgccactttgtttgcaatctgatcgccaatgatcggaattgccacaagcaccgcatggataggtcggatttctttgatttgctttgcctcccgttgtgtgctggtttgctgtcgttttgccagaattgtaatttcctttctttgatttgggctctatccattgttgtgggcaaagttggatggcatttgttgatatcggaggcgaaaggagagccaatgcactgtccttgataagctgcatggttttcaactcttcttcaatttgtccgagcgaaatccgtgcgccacttttctctgcctcctccaacattttcaaacatttttgtctcatgtcatggtgatcagatttggctgttgacgaatccggaaacattcataccggcggacaaataatgaccgggtttcggaaaacaaacccttcaatttgtcaatggactctttccaattgactgtgtccggttgcgttggtctaatgctgtccctgtacttgttatactcttcgtcagagagttttccaagcaaaagcctaactttcgctggctcagcaaatcctttccgtcctcttctatcagaattccaaacctcttgaaccattgctcgaaggtatttcccgactcggagtcgtaatggaattttgaaattcgtccatcgattgagctcgccaaatttgcatggcttaggctcgcagatgttccaccactttgctgggcactcatcatttgttgaatccgcttttcggattttgccaaaacggcatcgagaataagctttaaattgttgaaatccaaataaccacacctggtggctccctacacttgctgagtgttaaggatttttgaagatttgaagataaaaccgcgtattgcggaacctcaccacaattgtgtcttttggtttttagttgaatttaactgctatattagcagacctcacaccgcctgggtgctataggttttcgaagacttgcagtgtcttcggtggagaagattggctgctgactgcgccaaattgttgtgttcttgccaattaacacacaaagaataaacaaatatttattgatcggtcggtggacaatgcaaaaatataataaaaacgaatgaatgagggaagagacaaaaaggaggggaataggggaatgatctccttatgaacacaataaggagggttggggcgtggagaataaagtacaaatatgaaaataattaaaaaggtcaaaacgccaatttaacatccaattattatgaataaaaaatgagcgaaagtttactaaataattggaagacttaaatttccttatttttattttaaaatgaatttctcattgttgaatgaaaatactttaagtggatgtaggctgaatttttttttaccataaacagaattttatgggttttattttgattttttatcttcaaatggaaaaaagttattccagaatttctggaaattttcgaatttccagaaaaaaattcgtaactgccttctgaaaagctattcgggaaaagttaaatagtacaaaaatccacaatatttagccctattttataaattttatttcacctttttatcacatttttaaaaaagatacaaaaataaaagtgattttgggatccgggactaaaggggggtgaccaggatttttgagtgaaaaaatttttcaccaaaaatctagcaaaaacatgtttttaggcgttttttgggccgctctcaatgatacgtgaacagattttacttttgacatcgtcaagac

SEQ ID NO: 8907 - DNA, 2567 bp, Heterodera glycines
  unsure (1)..(2567): unsure at all n locations
ttaattaacnttgaccaagattaaaatcagttaattgaacttatttttttacaagctttgcgacgtgacgggcattcggcgcattcaaatttcggcatttatgagaccaaattcattcgagtcgctttttttttaaattttaaattaaaaaaatatatttaaaatgaaatttggctttacatttgcgcaatgctttgaaggaattctccactcagctgcgactcgtcggtgttcccgacactgacttttgacgcgtggaaagaccacgaggcggagctgaaactgccgatcactgatgaaacaattgccaaagtgtttcagctggcgcagctgaacctcagggagcaacggagaagggaaacgatgaacatcagaaaaagtacggtagcaaatgatggaaaatatactgtagagaattaaattaaaagtacggaagcaaatgaaggaaaaagatgcgataaccaatagtgaaaaaggtatggcataaaaaaaacacaaaatgaaaaaagtatggaattaatttttaagaaattggaaatgatgaagggaattactgttgggtttgctactgtactttcttgttttactgtgtttgctctgatcagatcagtcggtgcttcgcttgggcgatccgttgttcgcctactccaacatgatgagggcaaagaaagttggtgcaagaatttcaataatgatcattaacaaccatgaaaatgatcaggaatcaaagggcatcgccaaagtgtccgaccttttgatcgagtcgactcggatcatcgccagagggtgggccaaaataaaaatgagaaaacatttaaatgattaagagacaaattaccgaatggagtgaaacttccaaatttggatagtggtaagtaagtgttcacaaaaatgatgaatttcatcatttcattggcatttaaattgaatattccatctttggcactgaaatttttttatgtgtcaaatttctcatctttcaaacattgaaaagaatcgttgcaacggcttttgcccgaaattgacgtgtcgtcctttgttgccaatttcaccgcttttctcagcgaagacggaagtgccacgacggaggagtaagtgaagaattaagaatcaaaaagcagcaaattttaatcattgtttatgttactattatttgtaaggttcagacagggcctgggatccggcaaaacgcattggttttataatggaaactctggccgagtttcatttatgggaaaaacataattcctttgcatttttatacattcaactaatcaaaccatttgtattttaattattattgtgttctaattcgtggtatatttgagagataacaataaattgaatcgtccgaaatttttttgaaatttgcccgggcctccctgagcatgggtttacccctttgtttccataatttaacctctaaaaatgattgttttttctttccatcgtcagatgtcttccgcgaatgctcccatgcgaccatttaagcaggtttttgaactcaaaataaaggaaaaacagaaaatgggggcaattgaaacattaagatttcgttcattctccggatggtgcaacaatctcaagtaataagcaaattattaccaaatttgctaattatacaaataatttagacacccattttatggcaattcgttcactcccttgcgccatttgttgccgccggtttatgacgacggtgagacatttaaaatcatattaaaagactaagtagggtaatttgtgacacaatttttaactccatggctaacgaataccgattgttttaattatactaattgaattaattacttttcaggttttgatgcaccgcggaatcgtgccaaaagtggtcagtctcaatttattgggatggagttacgccattcttttatcattggggaataaccaacaaatgtgatcattgatttgaacaaagcaaaaaattaataataatcagttggatgatcaatcatcgggagtctcgagatcaatcaattcttagtataaacaatgattttgattagttatcagtggggggggcatatttaaattttaaaaaacgacgaaaaatatgtaccattttagccaaaaagttgctacgtttttcaggcgttccgttgccctccccccggcgcatttccaacgcggtgcacgtcgaccgcgacttcagccatgccaagttcacacacatggtcatgcagttcggccaactgttggaccacgaactgacccactcgcccatccaccggggaccaaacgacgaaattctgaactgcacgcggtgcgactcgcacgagacaatttcagtgcattgcatgccgatcagagtggagcgcggcgatccggtacggtgcgggggatttgataatttgatttattgaaatttacaaaaaaaaataatcagaattcttattgatgtaaaaaattcgatctaacaaaacttcaacaataatttgactgaatttgatattgcatatttctctattggattaatagcttnncataagtccattataattaagggattgggatttttatgttttccctctttttttcctgtaaaa

SEQ ID NO: 8908 - DNA, 2748 bp, Heterodera glycines
  unsure (1)..(2748): unsure at all n locations
cgatggcattgccncagggcaccaggagaagattgccggtgggcatttatgagaaatcagagccattaataattagccaataaataattaaatgggttcactgctttgaactaattaaaagagctcctttcttatcactgaaaggtcgttgccgcgttttccctgttttgtggcaggcgacgaaaggaacagtcatcaggttgcttaattaaaatattaattaattaaaatatattaaataatgtttaaaaaaactccattgttccagcccggcttaacggcactgcatacaatctttttgcgggaacacaatcgaattgcggaggcacttggccggattaacccgcactggacagacgagcgcatttaccaagtgtttaaatgcgcaaacaattgccctttatttagtgataaaacatgactaaatgggattctaattttatgggtaatttggaattgatcgacagcgattgagttttagtcttttggccacttttccacaactttcaacactaatcataaaatggccattcgatggtcattcattattttggctaataagtgtcaattaaatttggctgtttcaattcaaacattttttgccctatttaattgtctatcaattaaaggaaacgcgacgcattgttgtggcacagcagcaacacattgttttcaacgaatttttgccgaaggtatactgtagtttttatgctgtaaaagaccagttacggtatttcaattataaagaagtgaaaatggtcatggtaataaatttatatttgattttgaaggtgatcggtttggaccttttgcatgaatacgatttggttagtcaacaatcttcttttttattatataaagtttaatatgagttgggtttaaattattatttacgttttcactcctttcaaattccctatttgacagatagcgcaacgttctgattattatacgggatatgatgccaattgtgacccggtcaatttttgcctcggcattttattttgatttttggatttatttttaggcaatttctcatccgtttgccactgctgcatttcgttttgggcacactttgtgagtttaatatgaatatattagtgaaggaaataataaaaaaattcaaaaatggcaaggtaatttgccgtttttttattgaaaaccccataactcacctttaaattctgccagtaataaataaactaatttattttttaaaggattcgtcggatgtttccccgcatgaactcggattatcacaacatgtccgaaccggtcgacttggccaggcattttggcttcgttgaaccgttgtacaatcggacggccggcggtgagtggaagaaaaaaagagaataaacaaaaataaacaaatttgggaaatcattttgttccaacaattttaaacgccctagtcactgggcttttttagactattaacgagacctaaaaagactaagtaattaaacttaattgccattgattgccaaagggttggactcgatgttgctgggaatgctcggcactccgtcgatggcattcgaccggcacattacaaccgcagttcgggatatggtatgaagcacagacagagaaaaagcaataagtgacaccaatcaaattcagttatttgcccgaagggatgagccaacttctggcatggatttggtacgcttttaaatggagccttattagcaatatcattatttaattacaggtcgcaattaatatgcttcgggctagggaccacggcgtacaaccgtacaatgccttcaggttaagagaaaaaagcgatgcactaacaataagacatttcctaagttcgccaacaattaagaagataataaatatttggtttttaaatctaatatatttgtttgatttctaaattaattgtgccaattcaaagaatgccacttatttgccaacattggttttttggcatttacaatattaatgttttttttaaataaatttatacaaattttctttacgcctatcaccaccaaattttctcctcatttgtgccaatttaggcccctttgcggactctcccgtgccgaatccttcacagatttgcgtgacgttatggagccgaatgccattgctgcgcttcaatcggtctatgaaagtgtggatgacattgacttgttcccggggttgaccagcgaacggccgcggaaaggcgcattggtgggcaatgggaggaaaagccaaaaagaattttaaaagaaaatattacaaagcaattgagtattaatccttttattttttgtagattttgcagtttgatggacccgagaaaaaccattttttggggggggaccattttgatgtgtatttttgaatgttttacatttttatttgttttgaccgatgattatgtttacaaaaaagatcgaaaaatgcaaatagtaagggtcctcccttctatggtttttcattggtccactaaactgcaaagacgcctattaattaggtataatttaaaaaattctttctctttacattaaacttaaaattttttgaattgccatataaaataggttttctctcagttttttaaatcagtaataaaataaaaaaaaattaaatttaagaaatataaatgtttatatttgtgtgcttaataattattattgttcggctaagcttggccacacaatgtcctgtctgctggctgaacagttccggaggctgaagaaatgtgaccgtttctattatgaaaatgacaattccgctgcacgg

SEQ ID NO: 8909 - DNA, 3398 bp, Heterodera glycines
atggattaacagtatttaattaaacaattaaaatacttttgtgttgcttagggttttatatttatttttactttttctatctgtatatattttaaaagctaagcaagccacgagctgctttataaagttttcagataggattttcataattttaagtgatgagttattgctgattttctatttttgaataaaattcaagtttttagcattttgaaatattgaaagcaaaattttaaaaatttctggttgtttttgataatttgagatttttcttagttttccaatattttgtttgttttagattatgaaaatgtatatttattttcggtgaagtagcctctcgttttgcacgtgatacaccattttttgctaagccattccagtgcactgtccgaagggtagtccaaatctattgccacttatgtgccactacatatatttgatttttttgaattaatactcaaataaattaaacttaaatcttgaataaatataaaatatttcgccgaaaattaaatctaaatatattaattaattaaaatttgaaaaagtaaaatatattagttaattatttagttagatctttggattatttacaatttaaaatatgcattattcatttagctttttatttgtttttattatcaaagtttttataaaataaataatttaatattttttaaaattaaaaaaagacgtaaatgagataaattatataattaattttggaataaagtaatatatgaaatcatagaaataaaatttattgttcagctgctcatttgtagatttttaggtcttaaattaaaaaaaaaaataataatatatgtatagaaatttttaatatagaaaacttattgaataataatgttatttatgttattcttaattttttttgcctttaaaaaagtttttgatgtatttcattttgttcgttgtgtatttcatattgtggaaaaaattgttattaaaataaataaaatttctccttattattaaacggcccaaccgtagacacactaacttaaaaagcgcacacaaacaaacaaaaaaaagcaaagcaaataaattttttgattaattaatattttaaatttattaatcgataaaatataaaatcattattcatggattaaattgtcaaatccattggatgctaagcgatattgaagggctcttaagtgatgcacaatttggtctggttcggggtttgcaagtgcatcaaatctagtgacaagagtgcgtatggccacatcattattatagtatgtccttcgcctaggttgcaaattcaaaccgcttgttgggtccaactcataagtcctaactttgtcttgagcaattctttcttcctctttcaaaactaaaattaatctaaaaatgtgtactttgtgtcttattttttaaaattcaatagttactttgataatggaggatgcatattttggaattttcttcgcaatgtaagatgaaatgcttccttaattatttttataacaaagcggtttgacacctcaagtttgaggatacctgggcattgtttgttctacataaattatcaataaccgccttggtgatgattccaactcaagacgaatttcgcgttgaagatttgttcaaaaaaatcgcttcttatatggaccgtgagtcacttaaggaaatatgttttttcggtaataattgtataggaaatataaatatagaatagctattaagggaccgatggacaaataaaaagagcaaaatctgacaagcatggactgacaacattgtttttatatgccattcaaaatgacaaaaaacttgacctacttgagtgtctctgattatatttaaattgccagttgggcctttggcaagccattaataaatttaaaatattaattaatcaaaaaatttatttgcttttttttgtttgtttgtgtgcgctttttaagttagtgtgtctacggttgggccgaaacacacgtaattagttgctttttaaccggaagagaccgtactgacgaggcccactcttccaaaaaattttcttaaaaaataatttttttttattcagaaaccgtccgcaaatgtccctccgcaaatgtccgtccgcaaatgtccgtccgcaaatgtccgtccgcaaaagtccgtccgcaaatgtccgtccgcaaatgtccgtccgcaaatgtccgtccgcaaatgtccgtccgcaaaagtccgtccgcaaatgtccgtccgcaaatgtccgtccgcaaatgtctggtagccaaaaaaagagacgccgtttttcgatgagaaagatttgttggatgtgaggtgaggataggagagcgaacattgccaacaaccaacataaattttatttacatacattgatttattttttggtgctggttctatcacgaaaatgcaaaaatatttacaatacaccaggggtgtgatctgtcctgatttatcagatttgtcttgatttgaagggtccaaatctgataaaataataatgtcctgatttgtttgatttttccggcggcacctatcggcaccgccggaccccctcctctcacccatttgtctaaagttattttagaaaaatgcgccgcaaaaaattatttaaaatctgattttttgatcacgaatgcattaaaatttacgatttgctaatcccaaaattgttaattaatgggagatgaaaaaatattatttgataaattgtaaaaataattgatttgtaagcaatttcgcaaaatgtctgatttaaaattgttattaaaataaataaaatttctccttattattaaacggcccaaccgtagacacactaacttaaaaagcgcacacaaacaaacaaaaaaaagcaaagcaaataaattttttgattaattaatattttaaatttattaatcgataaaatataaaatcattattcatggattaaattgtcaaatccattggatgctaagcgatattgaagggctcttaagtgatgcacaatttggtctggttcggggtttgcgagtgcatcaaatctagtgacaagagtgcgtatggccacatcattattatagtatgtccttcgcctaggttgcaaattcaaaccgcttgttgggtccaactcataagtcctaactttgtcttgagcaattctttcttcctctttcaaaactaaaattaatctaaaaatgtgtactttgtgtcttattttttaaaattcaatagttactttgataatggaggatgcatattttggaattttcttcgcaatgtaagatgaaatgcttccttaattatttttataacaaagcggtttgacacctcaagtttgaggatacctgggcattgtttgttctacataaattatcaataaccgccttagtgatgattccaactcaagacgaatttcgcgttgaagattt

SEQ ID NO: 8910 - DNA, 1238 bp, Heterodera glycines
accagggctggccgtgatcacggatcacggaaatcacggggtttttggggtgccgtgatctcggatcacgggtcacggattttttcaaattttccgtgattttgatccgtgattggcattttatatagggaatttttattgagacgaaaataggaaagtggtgtgaagaaatttttgagaaaaataaataaattcttttctgcttaactgctaaaaaccctattttttctctccgtcgcttaaatttaaaacgacaggcctaatcaaaattttcagaaaattttcccaaccctctaagaattttttctaaaattttcccgacttatacataaatagatttttggttaaatttaagaaaaatttgaaaaattttcttaataaattagttaaaaataaaaaattttcattgagatttctataaaaagctctaattttcctcaaaaaattgccaaaaatcgtaaacttagtcattttttggaaaagttcgccgcaaaaaagcggtttatatgtttagttttctttttaatattagcagtattgttagtcttatcctaatttttactaagaaaacaaataaatttaaataaattactctgggaatttttcccgcgattaaattccgttttttaaataaatttaaataaaaaatcattagaaaattttttttataatcacggatcacggatcacggaaatcacggggattttggggtgccgtgatcacggttcacgggtcacggcaaacttcaaaacaaaattatgtccaatatatgcttatttttttagcagttttcaatttttataaaatgaattgacgaaatattttgaattgtttgtttttgattccttaacataatcaatgcaaaatattatagatattattacctattttttacataatttcccaggcacaaaaatattattttatggttatattacacatgttttttatgcactttgatgccttatcctaataaatgaaaatattatacgtatttaccttttttataaaattttccagacgtaaaaatattattttattatatagattatacacatgttttttacgcactatacacttcctatgccgattattaatcaagcgatagcataattatttttcgctataaataatgaaattactttgattaattattgaattataattatttaatttacatggaaaaattcatatttttgtctatgcatattccatttgatttcttcaatttcctcttt

SEQ ID NO: 8911 - DNA, 3635 bp, Heterodera glycines
gcatattccatttgatttcttcaatttccctcttttcaataatattgggaagatgctttttcttatatatttatattatttaataaatattatatttacaacaaattctgagcctataaaaaattgtaatgcattatcactcagatggactgacggtaataaataaagttctttttgcatagctctgtttttaagattaggattaactttcaaaaattaaaaaatttcgacgaaaaaataaattgaattttgataaaaaaaaataattttatgattattgataattaaatgtaatgacatacaattaaacaaagggtaaaattttttctaatcatttaaccccctaattttaatagtttttaaatgttttatttatcgattagaagtgtgcacattctaacgcttcataattaatttaacactaaatagttaaaatgccgaatatttcgttttgttgttccaaaactcgtattttgttaaattatcaaccggtttagatttaaaaattcaattttctgtttgtttggacaaaacatcgaaaaactttaagtttagtttgctttgtgatgcattaaactgttcccatacaaatttatttgctttctttaattacccaatttatttatttttatcttaaaaaaatgatatttcttgtttttaataaatttatatgacattttttacatcacttttttaaggaagtaatgaaagcgatgggaatgacgacacgtggaaaaaatgggagttggcagatgaatttgggaatttatttgtcagagcatttattaagcccatatcgaaagaagaggacagtcaggtaattaggtatttttccctctaataagtgggtttgttcaaaagttattaattaattaaattattgccattgttcggttgctcaaaaatttttcgaataaaatgaattaaaagaactttcaagtttaataatatttacacatatttattaagcttataagatgataaagaatacatttttaaagaaaattattaaattaacagtgatttttaagtttagttcaattaaaaattgcttaacctaatacttatgaaaataatttaaatttcttttatttttagtcaattttcttagcaaattttgtaaaaattcaaaaaaaaaaattcacccattcctacctatcacactaccgatgactttttggactttgataaacacattttctcagtcaaaaattagggtttttgagtaattagttaattaatcaagaaaaagcttttgtctatgtattcattggattggatgtttttgtgggatttgatgaattttttattttttagattttttacggttgtgtgattgattttccaaagcacaatgaacatttcggttttccgaaaagtgttgcaatcaaacaagtgttcttcaggggtgacgaatattataaggcaaaagaaatgttgatccatgaagttgaaatattgaaaatggccgtacaaatggaggccatttacgtgatcaaattaattgattagtaattttttaacaaaaatatgctaaaatttttaataatattttagagaaaaattattataattatttttaaattaaatatatattttttaagcattaccgtaccaaattcactggtcatggtgctggaattgggcgaagaatcgctaaagcatcgcttaaatcggttgaaaattgagtggaaaaaacatgggaatttggatgtaataaattcggatatcaaatccattttcatccaaatggtcattgctttacgtgatttgcatcgatgtgagttggactcacaaaaaataaaattatattattgggataaaaaacttttcatttttaaagtaattattttaatattacatatacatttttaaatattaagtatttttttatattaattaattaccttagtaattctatattatacccaaaattttaaaacgaaaaaaaaacatgataaaaaaattattttctaaaaatgattaaagatttaaaaaataataatttaataatttcagttgcaatccatttggcactgaaatccgaaaattggctttatgtaaaccgaaatggagaaaaaatgttggcactgattgactttcaaacaagcgcactaattcaaacgaatggcacaattgataacagtagcaagatcaagcggaaagaattgaggtaatcatcagttttaaaagttgtaaatattaatttaatatttcgttatgaaactaaacattaattgttagaaatacttaaaaaccctaataaaagtgtttcttgattgcttaattaaaaaataattgtttctttcaactctgccagcctccaaagattttttttaattttgaagaatttcttctctgtaacatttgaagaattgagaaaattttcctgctttttatgttcccgttctcaactctctagtctttaaaatttcgaatcccgtctatctctgtaattataggcaaaaacattttagttacctttagtcaaaaacattggatttagcatttttttcttttgactataaatagcggtgtattattttttaggtcctttatctgtaaaacatttgtcggacgtacccatctgccgcgaacacgacgttttgccagtccggaacacaacaaattttgtgaatctcatggtaaaaataaggtaagtgggatagatgagtttgtataaaatatttaaaactgcaaatataattatttaataaaaaaaatttaaggtttcattttcaaataattaatattaaatttggttaaatttaataaaatttaaacaaaatcattttctgattaagctcgatgttcaaacggacatttggtcacttggcatttcgttgttagagattttggcatatacaccacaaattgatgccgttttcgattttgaattttctgttgaagaaaaaagaaaattcaaaattttgcgaaattcttttgtcgaagaaaatgaaaacaaaaacaaacaatttgccgaaaaagcgaaaatggcagtttcagaatatttccccaattttagtgtgctgattaaggtaaataaatattaattatcaattagcaaactacttaaaaaataaaaccgatttgggaataaaattagattttcattttaaaattaaataataaaagtagtaaaagtttatttttaaataaataagatatgtttaatatgtaattaaaggtattaattaatgagttatgttttctatttaatgccttttatatttttagcaaatgttaacaactgacccaaaaaatcgaccaacagttgatgaactgctaaatgaatttcttgattgaaatttcaaatttttccaacggttaatttttattcactgttaatttagaattttagaattttttttattggttagattatttcttgtataaatgctataaatatatttcaaatttatcagtagcttcttgatgtggtgtgtttgaatatggattcccaattttgaattaaattaaattttatttgtgtgataaaattagaataatcaatttaaattagaaattttatttttaaatttgtttgtcatttataaagcataatttatttctgcttttttaaggttttctcattaaattttttttttcttccaaagtatgtagaaggaagcaat

SEQ ID NO: 8912 - DNA, 2753 bp, Heterodera glycines
ctagagaaaaaagaaaaagaaataaaaaaggaatttaaagcttcttatttcaattatttccaaaaatgaacacaatgccaatgccaaattgtcataataatttgtcacatttcgttctctctccgcccctttttcacctgcgcaattcggccggctgcaaaagcacaagcgcattgccaaaggagaaaagcagcaccaaaagcgttgtgccggccgcactgctcagccggtgaagcaaacggcgaagcgcgagggaaacgtcgccgctaccataactggcggcaagagagttaccgtaccaaagggagtaggcaccgtaaccggtggcagtgccaaggaaaaggaccaatgggagaaggaaagtgaggccaaaggtccaattgaaaggcaacaaacaccttaaaataaaaaacaattaattcattaattaattggagagacgaaagaaattacggttctgcgaattccaatccgacgacaatttgaccctccaaaaggaagcacagaacgcacagcgcaaaaggaattactaaggcaattaagagcaattaaagtcatttggagatacggcgacagatcagttgccatgtgccgcccccccttagccccccgctaattgtcccttattccagccttaattactccctaatccttctcccctccttattccctttgcccattttcaccaattgaaattgcgagcgttgaaaagagtcgcgcgttgcgcgacggcactttcggctgctgttcgttctgacactgcgtcaactcgaggcagacaatgcgcgagtgaatgtgcgcattgagcagtgccaatgcggcggaagcggagagaagcgcaaattgaaaagtgaagaaaagcgcggcggaggaaggccaaagggaagggagcggaagagaaggcgcggaagagggggacaaaagcgaacggagcaaaaagggaacatggaaagcgtggagaagcaattgggcgaagagcaaagcgatcaatgccggatcagaacgcctgggcgagatgtaaaacgacgacggcaaaatgggagacaaaccgatggtaaaaggcggaaatgagcagcagaccgagcacaatgccaagcgaaaggagggcaccgaccaaaggggcgacggtgccaagccaaaagtcgagcaaagactgcgcacggaaaagcgactcctaaagggggtaaaggaaaagcattgggggaaatgggggggggggggagcggaccggaagcaaagcgaaaacggacggagagcggacggaagcggaacggaactcgcaaagcaccgcctgttggcccaggggacggagctcgcgcgaagtgacgcgaacgccagcaacagaccaagcgcgagctgaaggggagacggtgagaaaagggagggcaaaaatgggatgccaatcaattggaacgatcgatcaattggtgggaaaaggaccgatcgatcattggggaaaatgatcaatcaatgaatcgatggaaaaagagtgaacgatcggtgattaattcatgccgtttttggtgcaagcactaatcaataaaaaggtaattaagcatcaaaaactaataaattaagaatgaacttagcacaaaaatcgggaaaatgttcacgacaacgcactttgctgatcaaagaatgcgcatgtcatattttctccgtccacttctccgttggcttccgctcgtctccccacgctttgccgttgcgtctgttgccgtgcgctccgtttgtccgtcctcaatcccaccacaattcgcaatggcaccgcctcccccgtgccatcgtccgcccttttgccttccatctgccgctgatcacttccgtttttgtttttcattgcctccatttctcccttttgtgtccatttgatttccatcattagcaacggactgtgcccatttaattgcggcaaaagcgtcgaattgcgcatgcaaattgccctcgcaacggcgtgcccttcgggatttggagtgccgaaaaagggacggacaaaacatgggccaaattgtaagccatcctgcagggaaacgaaactaaaattagggaggaactgggaatcaattagacattttgttgctgttcgattggtaaatcgtcgccgttttgtgccggggacggcaaaatgtcccacgttcgcatttgaaaccccccggcggcactttgcaaagagaaaggcacctaaatggcatatgatcaattaaaaaataattaatcatttatcattacaggtagtcgacgagcgaattcccgagaatagtctaacaaatgggcgcccatttgcgttgcatttcccccggcaaaagcggacaaattacgagagaccaaagagtcgagcacctaaagaaaagccacactaaaataatgaaaactttcattagtagtccacctggacaacatgttcggcaattttggggtcgaaatgcgccgacggaacggagggatcgaaagcggggaaaaggagaagcgagtcgaggaagcgcagaacggactgaagaccggacaaagtctgttccgcacgttgggcgtagttggcgaggacgccgagatggacgagcacggaactctgaagcggaacaattgcatttaagaaccaaagtctgactcttcctacggttacgtaaccgtacggatgaccaattcagaaatgcaatgccaatttgcctttggcgcccacctgacttttgcagcggccttccgtcgcgccttctttcgcttctgccgccccttttgcgctttccccgccggtgttg

SEQ ID NO: 8913 - DNA, 1534 bp, Heterodera glycines
tgtaagccatcctgcagggaaacgaaaccaaaattagggaggaactgggatcaattagacattttgtgctgttcgattggtaaatcgtcgccgttttgtgccggggacggcaaaatgtcccacgttcgcatttgaaaccccccggcggcactttgcaaagagaaaggcacctaaatggcatatgatcaattaaaaaataattaatcatttatcattacaggtagtcgacgagcgaattcccgagaatagtctaacaaatgggcgcccatttgcgttgcatttcccccggccaaagcggacaaattacgagagaccaaagagtcgagcacctaaagaaaagccacactaaaataatgaaaactttcattagtagtccacctggacaacatgttcggcaattttggggtcgaaatgtgccgacggaacggagggatcgaaagcggggaaaaggagaagcgagtcgaggaagcgcagaacggactgaagaccggacaaagtctgttccgcacgttgggcgtagttggcgaggacgccgagatggacgagcacggaactctgaagcggaacaattgcatttaagaaccaaagtctgactcttcctacggttacgtaaccgtacggatgaccaactcagaaatgccaatttgcctttggcgcccacctgacttttgcagcggccttccgtcgcgccttctttcgcttctgccgccccttttgcgctttccccgccggtgttgtcgtcgtccgcccaccgcgtctcctcccgcgcctcctcccacccgcaccgtcgctccactcgctttccgtcctcgttgtacggacatgggaccgacgcggaccgattgaccgccgtcgtgggccaatcgacgccaccgtaggactcaaaggcacgccgagcggggcaatgttctggaaaagggagaaggcattggcacaatggcactatcggtgaatggactatttaatttggcagtgccaaaagcaacttcggcttacgatattgaaacaaatacagtaatctttaattctagtatattaatgggtgttcatttccaaccgatatgttcgcattgtgggcccgaaaagcccgcgtaacaaaggcaatgccgttgacccagcgaatcgcggtactgtaatgaggcacaattaattaccatgcccaaagcggtgccacttttgccccctttccaacctgttccatttggtgggtgtatgagtaatggcacatcggttgtcccgaattggcggcgcactgtcccaaacagtgaaaatctttggacaaaaggcaaaaattatagccggcggaaggcgatgagcgcgaaactgaccattctccaccacttggaaggcaatttcctctgaaggcgtttctccgtcgccgtccatcacggatactgtagcagtcagtacggtactcaacgggagacgaacctcaaagtttgaatgcaccaattagcgtcaaatgtcattgcgccatgataacgccaacaaaaagactcactcgactcattgtgctggtttctgtcggctccat

SEQ ID NO: 8914 - DNA, 1473 bp, Heterodera glycines
  unsure (1)..(1473): unsure at all n locations
aaaaagtaaatttaaaaataaaaagaggaaataaaaaataattaaaaaagaganataggcgaccttattttgaggacaaagcaagtgaaggacggcaaactgagcagnccgcgaattgttgggcggaagttcagcgaccgtttcgaagaccaaacggacggggtcaaaatcgagcctagggaaagcaaagcaaagcaaataaagcaaagaaaaagtggaaaattaaaattaaatgaattaaataaaattaaataaataataaaattattttaattggtccgtctccccaccgaccagtccaagtcggactccaactgcgcaaagcaggaactctgctcccgaagagcgcggtcaaacgcttcgttcggtgtcccttttgtgcccggaggggcgccttcgaagacgcgcaattcgaaaagctctgaaaagaattgaagaaatttaaagttattcaaataattatcccttaattgcccctcttcaccggcactttccaataaattattatttatttgtttttaggtatttgcatttccccccccccctttttcccattcttccaaaattaatttcccatcagaagtgtgtcgaccctcgacgatgccataaaatcgtaaaatttgccacggaatgatgggaagccgtaaaattatgcacctcagtgcccaaatcgagcagaaatttattagactaattggtgaatgggttttgatgagatttgcaaaaaaactcaaatgaggcgaatgttctttttctgtcgaccttctttaactttttcccgatcattcaactttctcgattcgccgcaattaacagccgtataatttgataattaattaattaattaattaattttatttacctccgccgtttctccgatgtatcctttttttctgctgctgagattggagcccaaaaatgcagacaaaaagcaaaagtgccaaaatgtcacaaatggaaacacaaaaagaggacatttgggacggactaagcgaagggacaaaaaacggacgaaagcgacgcaatttttggaccgatttcgcctcgagggaagcgacgaatgttccccaaaggcatttaataattaaatatttttgacctgaatgataaaaatttaaaaaacgaaaatttgtcaatgaaataaaaaatggaagagaagggaggggaagtgaagaaagaagaggagaagaatggaggaaggggaaggaaaagagagaagagaggaactgaagggaagagaagagaaaggaagagaagggagggaagagaggaagtgaaaataaaagaagagggggaaaagaagaaaagaaaagggataaaaagtgcagagaatggatggagaggggaagggaagaaaagagaagtgacgggaagagaggggatgggaggagaagagaggaagggaaagaaagaggagaaccaggaagagaggaagtgaanaataaagaagagggggaaaagaagaaagaaaag

SEQ ID NO: 8915 - DNA, 1194 bp, Heterodera glycines
  unsure (1)..(1194): unsure at all n locations
cgaaaggaaagaatgggatcgaatcgcagtcnagccgaatccgggcagaatcactttgaggtgcgccgacttttacttgaataaaacaaactttggagtgagcgcaaaggcacattcatttgagagtgaactttgaaattgtgaaaatcattggcatttttggatctttttttgaacataaaaggtaagcatagaatggtttattaatcaaaatttaattttaaaagtattttaatgtaaggcaatcggaaaagacgcgcggcgaataaattgtaaatttgggagggggggggggaagagaacggcacggcacaacacaaaagtccattcaccgacagtccctttaatgggggagggcactttgaaagggcccttcggcacatttccgcctcggggtcaaaagacagtcaaaacgaagcgaaaacagcggaagtctttcgccggtccatcgaaagggccaaaagctcttttcccaacagaggaagcaaaaacggacaggttcagcagagcaaaatgggagacggagaaaaacataggcattaaaaatttattgaactcgtcctctccacgggccatccgttggcacaattggaaaaacgcgccaaatggcgagaaaatggccgaattattccgtgggggtgcactgaatttgaatgggaaaggcattggcattttgtaaaaaaaaaacggcgccaaagggcacaaattgaatttggcgagggatcatcaacgaaccattcattcattcactttttgcctcaggattaaggccaatggcactgtaactgttgaagatggaaatcccaacgcttcgaaatgccaaagggaaggacggaaaccccggggaaagaaaggaaaaagtaataaaccccgagggggggggggaattctttttgaggggattaagcgaatgaccaaccacttcttctccccaccgcacttcatcattccccatttgcccatttcctccactcattcactcatcggccaacactttggcccaattttgcggcaaaaaacaaagtgcgggaattgtgcccggggcaatctgaggaggacaaatttgggcaattagtcgcatttggaaaaggaaaagcgcacgcggatgagaaagggaagggaatgaacggaggaaaaaaggggtaaaaaaagcaaaaggcattccgagtgagaagagaattcggcggggggggg

SEQ ID NO: 8916 - DNA, 6692 bp, Heterodera glycines
  unsure (1)..(6692): unsure at all n locations
aaaaacccgtgaaattcacggttttcgtgaccatgaccgtgattttttttgaaattttggctaaatttttaactgattnntgtttaaaaatgaccaactaaaatctagataaaattattaacatttgtcacagggtttccatttgttttgatttatcagaaatgttctggtttgaatgtattgattgtcaaaatttggttctgattcgttaaacaactcataattttgaaatatttaaagcctttacataaacctcaaatttagcaagacatttcatttcaaaaccgatacttttcatgacgtatttctcacaattaaaatgtgggattctgccgagcgcaaattttaaattgtctataaatcagtgtagcgttaattcttagttcattaaacgataattacttttcgtgtgtcatgaaaagaaatgcggcagttgtcctgcgcaatttgtcaagaatttttgatttaaaaaattatttagctcaatattgtctttaattatggccaatttgagcaactccggcaatgatacggtaattatgtggtaaaaatttttatcacatccaaatttgcagttttatttggccttcaaagatgtccatcccagctggtctctgattggatgcgcactgacttatggaaccattgcattaattggcaccatcttcaatttttctgtgatttttgtcaccatcaaaacaaagtatgagatgattttatttgttcgaaattataattttttataatatttaaattttttggtcactcaatggcacagccaattacctcgtggcactttgctctttttatgaattgattcaacaatttggcatttttctgtttgtgtacaccatattttctggccaaaacttcattaaatgtcgcctggcagcaaaaatattattcattccattgattgcacttggtaattaaaattccctcataaaataaataaataaataaatatctcttcaaaattttaattttagctgcaattgttccgacgatgtttttcactggcgttgaccgactgattggaattgttttttcggaattgtatgaacattaattatttgtgtcgttaattacagtaattttcagtcacgataaccttaaaaagagactgtatttggcactgttaactgtcatttctctgtcctatggtttctgtttctctattccggtgtaccaaaaggcaattgaggatggtgatcagatgaccaccggatcatattttgattttataaaggtttgattttgttttttatattttaaaaattatatatttttagagtgtttcacttataatcacaataactttttggcttataacaatgacttgcatcatttatatttgtcttggaattgtggtctgtatcaaagcttccggtaaacaaatatatttttaagtaacatagggctactgtaatatttcttgatttaaactgaattctaacgccattcaatcaattttattaaaaaacgggaggcaacgcccggagattgggatatatattttttagaaatcacaattgaaaatgttggtatgcattgccagttaatttgcttaattatctatctttttaataggtttgccgtccgctgattcgatcaatcgtcgcacttttcgcgcactttttttcattatcactgtgaatgtcggcggttattggttcactactattgtgttcttgcttttacttcccataatttcttctccaatcacacattggttttgccatgtaattatctcaattcctttgaacattggcgcagcgtcaatcggaccaattttatattttacaaggtctaaaatttattttaaaaatatttaacatttatttgcaattttagtacggattatcggcaggcattccaagcggaatttccattcgttttcagacgaatttcaaatgtaactcaagttattccactgcagaatacacaatcatgagaatttctttgaaaaattaaatgaaatttaaatcttactgatattaatagccactttttaaaagtttgaaatgacatcagtttgtctaattgttgtcaataagtattaaaattacaactaattaatgaatttacatataactcttttgttgaaattatgaaaatttcactgaaaaatttttaaataatttttctttgtccatcattaatttatagataaaaggtaaatttataaattcgaaaataaaggaattaccgataaattttttaaatcctaaataaataaatttaacatttaatgaaaaccttgctaagaaaaagaaaatgttgttaaaataaaaagtgttgccaagcatttactgacggacggaacaatttatcgcaggcattttattattgacaaaatgtggcacgataattgccttaatgaactaagaattattgcttacaataattgtttgaacaatttaaaatatgcgctcgaaagattcccgcattttaattgtctgaattcgtcccgaaaaatacacttacgtaaagggctttaaaataacttttgacaaattgattagggtttttactttttaatttaagtttttgtttttgtgagttccaagaaaattaattaattgaataaaaattccttcattatatttttgattaacttcttggtcaaatcatttgcattgggaattagtatgtaattaaggaaaatttagatttattccggattaacctgaaaatcaattaatctttagcttttttaccatacaaattctatatgaccaacaaattaaaattaattaattgtgaaataaatttgggtttttatcatcaaaaaaaaagcagcagaaaaatggtattttttcataaattggaatatattttcgaaacgtcaaataccttctgagtaaaatttagattttttttttgtaaattttcatttttgaattttaaaggccccggtaagaatgtatttgcaattcaacaaaacccgttcatgccaatgcttcgtcaatttcttctataacaaaaatgccaaatgtgaaccctttggcacaaaattcccaaaatcaaccagcagggtaattaaaaaaagaatctttttttttaatattaaattcattaacaatccattaattaggcaagagcagagtttcgatctcaaaattttgaaaatcctcatttcagccataaaaatcctcatttgccactaaaatacctcaaaaaaatcctaagggaagaaataatgataataaaaattttaacaaaaattggtgcaaatcttttttttgaagtcattatttaaaataacaaatattttatattgataataactagggtttccttttttaggcacaaaaaatcgcgaaataggcattaaataggcacaaaaatcctcaaataggcgctaaaataggcatataaaattttttattaacgctttttaggtaacaaaacactttaaatcttaaatatttcaattgaaattattaaatattttaatgtttttttcgaatatgaacaaatttttaaacccaaaaaatttttattaagaaaaaaatattaagttttgggaccaatttttgaaaattttttcaattcttatggggtgtattttctggaaaaattttttgggtcatttcttagggggtgtatttttcgtttttattgcatttttgttaaggattttttcgaaaatcctaaaataggcacattaggcacaaaaaccacgaaataggcaaaaataggcattataagagtcatcttagacacctcaaaccaagcggaaaacgcgctttttgtgcttatctttgcgtatcaagtgcgcaaaattttaggcatttgcctaaaaatggaagccctaagaattacaaaaattcaaatttagtttaaattttaaaaaaaataataatatttaaaagttgaaaatatatttattttttaaatttaaattttgaaaatcctaagaaaaaactttgtatttttttcgtcattagaaaatagtgtacagactgcattcttttcttaagcaacccctaaaactgatcagaaccgggcatatgcagcagcagggatatgtgcgtacgctctcaaaaatcggcaccgaaatccgaggccgaaaatttttttttgaaaatcggaattccaacggctcaaaaaacctcggcaattgacaatcggaatttcgacggctcaaacaatctcgacaatcggaatccgagtgcccaaaaaatttttgaaatcagcggaaaatcggcattccgacatatccccgactgactggtctgtattgctctgattatttgtgtgatggctgagcttacatttctgtcgttgtccgtgtgccaacgcattttggccaccgccgtggcgaacagtgccgtgatcggtccgaacagtgcgcagccaatagtctgcgcgccaaagtgtgctgcgagcgcaaatgcgctgatcagcagggtgcgaacaaagtgtgcggaggacgcgtcggcacgcggaaacgcgcggaggaggagaccaacgaggatgccaaagatggagccgatcagcagctcggcaggcagccgggtcagcgtgtagatgagtgcatctgtttcggaagattgttttatttggagcagagtgaatcagcggaaaaatggtggtgatcaaacagactcaacagacataggaactgatcagcaataaataaaatgatcaacataatacatgaaaatgcaaaactgatcagttcgttcaatgccaacaattgaaaattaagagagtttttagttttaaaatcccatcatgatttgttttattaaataaaactatggaaaactttttttacaattttccatgagtgagaatgactgatcgatcgattaattaattatggatctgaaatgattaaatagttttttttaaaattgaatcagatccaaaattccaattaacactggatattcgtcattaaccgggtcaggattttaggttttactaaatttttgaagagtataatttattagaaaagtttggggttcgaaatttatcgaaatggatgttatattcgtgatcagcgaccctgaaaaccttctaaaacattttttttctttaaaattaaaattttttttcaaaaaatggaggacaaggcttataaccaaaataccgattttctaagaccacctgcgcggggtgacaggacgccaaaagtggtcaaaaagccggtcagtgcaacgatgttgtcaaatgatgtgctgatttgtggatggattactggtgatcagagtgagtttaagggctgaatttgtgagaccagccgagggcatttttggtgccggacatttaaagtgccgtaattttgtttttatggtttgaccaagctttaggagctttttgtattactcaaaggcttttcacgcgcaaaaaaatgctaaaaaaaagaaaaaaaaaatcgaaaaaatcatgaaaaatagagaaatatttgaaaaataattttttcatttggtatgacaaccccatgagcttaanaatttttcgacatttattttggtcatgaattttgggtgcgcgaaaagccacctggtcaatataatgctgtccagccccgaatcggtgccccgttgttctttgcgaagacgaagaatgatcgggctgatcacggccagggacgaagcgcacaaagcaaacctttgggatcatagatcagtgttaattggtcataaatcttggcagattaagcactaagggctcagtttatggtagaaacttgaaagagtacagtagtaataataccgtaatggctaaaaacaaacccaaaaaggattgaagcaccaagtgggagatggaacaggaaatgcgaggccaacacaatgatcaaacactcaaacagagggcacacaaagccaatgccaaagcacagagtcttgggggggggggcaaaaaacaaattatttgcgcaattaaatcaatattttgaataaattataaataattaattaaccaaaattacccaattaaaaaatggtatttaaaaaatttttcaactaagctaattgaaaaagccttaattttaattatttaatctttttatccaatcaataaagcaattttataaaattttgaatattaaaaatttcaaaaaaaaaaatcggaattaagccccattttttgagagaaaggacctattaagataattgaatatttccaaacttggtgaaatttaaatttggatattaaaattcaaaatccaacataaaattgccggacagtggactgatcaatgccaaacgctgatcggatgatgatcaacagaaaagcgatctcgtagatcagtgttgacagttgataatgcgggaaatagtggaacagtgaacggaatgagaccaaatttgtgaagagaatgccgatcagtattggtcctaaaatgggttttgtgaaattgtgccaaaattggaagaaatgccacacctgtgatgaagggaatgaagaaataggagagaagacggccaagcagcagtgagagagacagaaggatgaacagagaaatgagggatgaagagacaacagggcgggaaagatggtgatcctgatcaggcaccgatcgatggtcgtgatcagccattggttgttgctggtgatcagacaatggtcgatgattttgatcaggggaaaagtctgataggtgatcctgatcaggcactggtcggtgattaagatcatgcgaaaaatctgatggataatcttgatctgcagcg

SEQ ID NO: 8917 - DNA, 1250 bp, Heterodera glycines
aatgggggagaaatggcactgaaattaattaatgcgcttaaatgcattggaggattaaaaaatattgcctgcgtaatgcaaagaattgccttttgcttttaaatccataaatcaatgttattttaatattaaaataatttctatggcttgaataataatatttcatgcatatttactttaatgtattgcaggcgacgcatatgcgtgcgtgcgtatgtcaaagcgtatcaatcaaaaaaaaaagaattattatttttttagatgtttaaaaatggagactgatgatggacggtagcgcttggcaagatgaatgagtgcgtgagagatacttgataaaaattactagagcccggatgggtcggttatcccacatgtgcgccccggacattgcgccccggacattgcgccccggacattgcgccccagatatttgcgcctatgtccaaaatcgggtttaaacttacattcttcaatccaagatggactaaagagctttgaataagcgattgaaagtgattgtatgcgataatttgatcatcaacaagtttttgaaaaaaataatctttgaaacaacagaattattgttcctaataaaccaaaagaacaacttttcttaaatttatgctgtaagatctctaagactgaaaaaatgtatttgaacccgatttagtgcatgggcgcaaatgtctggacatggatgggcccgggcgcccgacagcaggctttgccatgccgggccggccgggccccggtcaatttagaaaaaacaccgggcccggtaaaacgaaatctttttggccggttttgagcggactaaacgggcttcgccagtgactgtcacaaattttaaaatatacaaagcttgaatggaaggtagaatttaaatgatttttgattatttgtacaatttcaattgcttaatttttttaatttttcccgccggtgcctatcggctttaaagtgaatttttgcctttcccagcctgtcaaaaattttgtgagtaatttttttaattaattcgaactaatgatcatttttttacaccaatgaattccgagccctattaacatataattattcataacgtttatctcttcctgtctctctctttaacggtttctctttccgtccctctctcacccttcctttctctcacttctttctttcttttttttctctcttttctcctccctcctacactctctctctctctctcacacactcactctacgtaatctttatttcattct

SEQ ID NO: 8918 - DNA, 4168 bp, Heterodera glycines
aggggaccagagcgtttgggcccccctttttgggccccggggtcgtttgggccccaacccaaaaatagaaaaatgtgcttttttaaaaattaagattctaaaaactaagcctgagggatccctcgccacttggcataagttaggtttaattaacattcgctcattttttacaattttacttattccaaatcctattattttttaatagttaaccaatttgatgtacattctgatttggacatttttcagaaatggctaacccaattgcaaccaaaaaacaaaaagtaaaattgtcttacgaaggccacctttacaccttcgctaaaatgagttctgatgggatgacaaaattttggagatgcgagttcaaaaaatcaatttcacattattttggagtttctccggggaatttctcgcaactatcgaatgaacccgtgaatttctgttaatttttacattttttattgttaaaattattgttgaatttatttttaaaatgtttattttacatttttatgctgaaatttaaaaagttgtttttactgtgatttttcatttttctgtacttggggcccaaacgaccctggggccaaaaacgagggcccaaaaacgggggcccaaacgcccccgactcgggattgagatccaaaagcaaattcccgcgcgagctctcgtcccgccgtgctgctttttacactttaaaatattgtttcctaaaatttagcataaaaatttaatttgaaatgttggatccggagtacgttaaatctcaaatcaaaaaattgggcggtgcttctccagtttttgaacagcaaacaaagaagcggaagcgttcagcaagctccgcttgtatgtaaatattcgtaaaatggaaaaaaccaaattttaaatggacatttaaacattttttttttgtgatttgggttcaaatgaaccacaattaacagtaagaagcaattttctttaaccaaaccttaaaaaattcacattaaattcctatttttgagattaacaaaaaaaatttgtcgaaaaaaagaaaaaaaaattcggcctcataaccttggcccatttttagcttccattgcaacaatctcccattctgtgagcagtgccaaccatcgcaattcgacgggtgccgccaaaaaacagtcgacgatggacaaatggctggtgccgaaaagcaaattggttgccgcggcggcggcgttcacaaaacggagcattggcggcgttggaggccaaggcattggcggtggctgcggtgcaaatgcaaagctaacaaaaagtgccatcgatgccagcggaattggcacggaaatcggcgccgttgatgaggcacaaatggtgaattttcaaggcatttttgtaaaaaaaaatttttctttttacacactatcccataattgtcattttttacattttcggtctttgggttaaccgctttttcgtacttatttataaaagcatccttaattaaaaaagttggtgttttcatcatgaaaaaattaaaaaaaaaatcaatgtttcccctaaaaattaagtggagtgggttatcaatacgaaaaaaccaaaaatttttaatgaaattctagttttcatttaaaacactggcccttccatttcgttaaatttttgagtcatgtaagtcgtgaaaacgaatttcaatggcatgtcatttgtcattgtatagaaagcagcacgaattgctttcccgggacggaacctttgcagaccgacaaaaacattaaaaatggtgaaaatttttcagaaaaaacgagtcagaaagtcgcccagaatttcaccggcgacaattgatcaaaaggtggagacaaaacggcgcaatgtgaagccaatcggaaaagtgacttggctggaccaggtcaaacaaaaaatttcaagatttttttttaaaatttcgttttacaaaaaaaaattgtagttttttttttttttaaatttttcagccttcaacaagtcatgaggacagcagccacagtttgatgccaagttcgagtgccaaatttccatcgaaatcggatgtccaatgggtgccaaattcgtccggtcaaaacatgccgaattcggatgtccaacttgtgcctgattcggatgtccaatttgtgccgaaatcggatggccagcaagtcgtgccgccaaccacgggtggagaacaaccaatgggcacggcgacttctgccgttgcattgctgttgaacgaggcgcccgagccgagcacgtcgaaagcgcgtcgcgaccgactcctccgcgaagtgtttggccaccggaagttccgcagcagtatgcaaatgcaggcaatcaacgcggtgatcggaagtgcgttatatacacaccccatcaagggcctgtgattagaaaaattagaggggaaacccgaaatcgaaaacttttttttttttgctttcccccaattttaggagtaattgcggaaaaatattaattcgcttttaatttttgtgcattttgggtcaaatagaaatatttaagcaatttagcggataatttagttggtaagttttctaagtttgtctgatttgtttaataaaaaagccgataaaaatttccaaaaaaaatttttatttagtttttttaaaactttctctcaaaaataaaaataaaattttttttcaattttcatgccttgcccataaccaacgaggtcgggtggggtgaagaaataatcgaatttgacccaaaaatcttcaaaaattggcacatttttaggcctaaatcttccaatacattgcctgataaaatgccatttccaatttaatccccgactttttgcaaaattccgtgccctctctctcatccatttccattttttctcctcccattcttcagagaccgtcgacgtgttcgtctccttccccaccggggcgggcaagtccctgtgctaccaattgcccgcctgcttccattccggcctcaccattgtgttctccccactgctcgcgctcatccaggaccagctgagcgcgctgcgcgcgcgcggtgtgccgtgcgcgtcgctgaactccacgctgggcacggagcggcgcgcggaaatcatccgggcacgcgcatttttcctctttattttccaccattttttggatgcaaaattgtaaaaaaaaaatcatattttctccgcaaaacaattccgatttccaaaaaatcggatttccgatttccaaaaaatttttaaccctcggatttcccgaaatttttaacttttgccatcaatttgaggacctcgaaagcgacgcgccgcgcattcgcattctctacctgacccccgagtccgccgcgttggacaccattcgttcgctgatcggccgtcttcgcagccgtggacagatcaactatttcgtcgtggtccgtactggttgaccaattaacataatttttcttgccgcctttattttccaaattgcccccacaaatgaccacttatgggaaaacccaaaaaaatgaaaactcccgtaaaaatgctctcctcttctcggggcgggagcagttcgtttcaccttctccgaaagcacgaaaattttttagttttctaaatttcttacaaggaaacatcccgactgtgagtgtttttaaatatcactttaaaacaacttttatcgtgtaggagggtgttgtgtccctgggtttacctaagtcttaaagccatttcaaattatcattttaagagagagggatttattgaaggaagagcattgacaaataattatatgttaaaaaccgggaatagtttcggtcaacaacaacctcagaacattttgggtgggtcaatgcaattggttatttgggaaagaattgccaaaggcaaggaacggcactgactgacccaccgcagacactcgcagcccccgaggcgggaaattgagtggacttatatactggcacaatggggatggactttggataggatgagggatatgacggcaaaaacacaaaggaaatgaaagagaaatggatggcaaatgcaacagcggtgaatgggagaaatggcacgataacattggaaatgagagggataggattggcttgggatgggatgggatgcacagacggacaagtttataacgggattgggtttgggaaagtaggataatttacattatgcacaaaatatgaaattttgaatgctgcggatacagca

SEQ ID NO: 8919 - DNA, 232 bp, Heterodera glycines
ccccccccccccccccccccgaaaaaatttttcataaaaaaattcttagaaatttttagtaagaaaatttcttgaaaaaaaaaattttagaaaattttccagcgattttttcgaaaattttttttaaaaacttggtagttcatcataaaattttgaaaaaatcgctgaagaattttccaaaattttttttgaagaaatttttttactaacaaattccctaaaaattttttta

SEQ ID NO: 8920 - DNA, 4807 bp, Heterodera glycines
agagaaaacatcttcaaggatctttttaacatccacccccaccgggcgctttcagaagaacctaaagacaaagtttaccccttgttttttccttaatttttcagcaatttagaagccttgtctcaaatttgataacgaacaacaacagataaagacggaatattctctccgtatttacccattgttcactgttcctttgcttataaccgaaggtgccgacgcgggcattccgcaaatttgtgacgaaattattgcacatgtcagtgccgaattacagcagcgtcttaacagtgggattagcgaatgggacggcgaagagcgaatggttgcgaaagctgcagaagaccttgttcaggtcgtttttaggcaatcttgaagaatgggttattttttactagtaattcgacgtatttatttcgagccttatacttcatcgattgtgactgttttctaccggaaaaacatgtttccgccggatccttacttttagaattttttgggtcctcatctggttcttaataattttctaaaaaccccatatttaaataaagtccaaaaacgcagacggaattagtgagaggattaactttttataattttttagctcttgtatgacggtccgccaatttcatattcggaatgggaatgcgcacagtgtgggctaaaggagaatctttggcttaaccttaccgatggtgcaataatgtgcggtcgcttttctcaattagctggcatcaaaggcaacggacacgcgaaggcacactttgagtcgacgggctttccattggtcgtcaaattggggaccattgagaacggagacggcgatatttacagctacaatgaggacgtatgatttgcagcattaacatgtttataataccatattagatgaatccgtaactaatttcaattaggggtttagttttaaaccggcctaagaatggacacactttaaattgatttgtgttttattttagtaaaaacggtgtatcggtacaaagcaggcgaagaacaattccttttgttgtgaatttttcgaatttaggcgccggtctgcgacccatggcttggtcaacatctggcacgttttggtctcgacatcaaaaaattccgcaagaccgaaaaaacgactttggaaatagaacttgatgcgaatttaaagtagacatttcgaaatgttctgttttcattccgttattaggcacgaattctcggcaattcaagaagaaggattggagttggtcaatgtgagtgggcctggctacactgggctgatcaacctcggctcttcttgttacatcaattcggtgcattctttttccctttttttgcctgaatgttccttttgaggctctccaagttctgcttattgtccctgactttgtccgtgcgtttactgaagaactgttgctaagaaaacaaccacccgaaataaatgaggatttcgccgctcaattggctaaaattttcgtcgcgatgaaatcgggggattattcgcgagaagacaacaaacatggtgccgaaaaggagaagggcattcgaccgacgacattccgtcggattgtgggccgaaaccaccccgaattttcaactgcaaaacagcaagatgtggaggtgggcaatcattggaagtgccaatggacaaatgtcgttttccacaggaatatgttcgctttctgtttgagaaggtcgacgcgtgctccgacctctcctcggaaaatcccgtcgctgcgttccgatttcgtctggtcactcgtttcctggacgaactttcagattgcgttcgctattctttccgtactgacaacattttatcggttgcaattccaatggacttgtgcaaggaggtgaacattaattcgttatattcatttgagaaccaaaaccttacgttttgtcattcctttttattttcaaatcggcaaaatttgtcctcgtcgtttagtttaacgaatgttaattatgttaatttagtctgacactgttgtgaatggggtcagacgaaagagtgtcactttggagcagtgtttggccgccacatttgaagaggaaatcatcgacgattatttctcacctgttttgaaaatgaaaggccgagcgaaacaacaacaacggatgggcagtttccccgactttttgcttttgcaacttcgcgtgagtaggcattccagggacgagcagcattgttttccagatttaaatttaaaaaaacttaaaattttctaatttataattagatgttttcctgttaaaaagggattttttcaaaagaatttgatttttattttttatatttgtaaaaaataattttaaaatccacgtctttcaataaccattttttgtagatttttcttcatgaaaaatcctctaattgtaagagttagaaaaataaaaaatttatatttgttttttaatttactggtgcggaaacgaattgcttaaacatgtgttaattgtttttaattttttagagattcgcatttgattggattctcggtacgcagcataaattggacgtggacgtgcatgtttcggacgaattggacattaacgcgttcttttcaactggagaattacagccgaacgaaaaggcacaattagaaaaaccatggaaattaaaataaagattaaaattgctttgttctaacagagtttgcctgttgacgacacttcagccgtcataaaggagcgcttatggcaagagccgaaccatgaaattgtggccaaggcaagcagtgattattacttttgtaattttgataatttataatcagttgctttcgatgggtttcactgaaaacgcagctaaaaaagcggcgcttttcacaaagaacgaatcagcggaatcggccattaattggattcttcaggtgcctctttgccccccccccctaacattccttaacaataaaatacgaaaaggcacgaaatgctgctttttgaaaaaatttaaagcatgagaatttcacccgaatgtttatgaatgatttatttttagcattctgacgacactgatgtaaacgatccgcatccgatgttaacgaaacaaagcactccgccactgacatccaaccaaggtaaacagacaagaggaacacatggacaaattaaatctaacaaataaggagtactcaattaatggtctaattgcatttttaggccagaacgcgtctcagaaagttcgtcacggcaaaggtcattaccgactgcgcgccttcatttcgcacattgggtcgacgccaaattctggccattatgtcgcacacgtaaaggcagacaatggccagtggtgagttcgcagagttcggtctggactttggtccaggctatacattaaacaaggggggggggttcaaccaaaattttggcgaacgggtccggcggctctgtaaatcgacgacccattttttgctttcgaaccgctttattagtgcctaaaaattaggttttttgcgattacgaattaattttttaacgaaatagggattttttgggggccggttggttgcaattcctaaattttctatcggttacttgataatattctttgacaggcacatttttaatgacgaaaaagtggccaaatctcaacatcctccgaagactcttggctatctttacctgttccaacgggccacctgaacagtcaaataaatgctcttttgatatgcttttttgttgttattgaattttatttggcatcgttttattgactcaatttttgttttaattggacttgttttctcaaaatgttaaaaaaggtgtgacaaatattgtttttttaaataatctggaaaataaattcgttgtagatttgtttatttattgtttgctttgtctaatttaattaaaaaagcactctcagatgggcattgtcactttggtcctccgtttacccctccggcggtgtttccttttgattcttccgttggcctttttgtcctgcctttttctgttcttcgtcatttcccctatcagtatcagaattattcatcagaaaggtgatttccttttgcctttacaaatgtgtttggtattaaaatgccaataatcactaaaaatgccaattgttacggtgtttttcccgtccgtttctttcgctacgaccgtttgggtccgttcggcaatttcacaaacgtcgcattgcgacagcgcgtcggatgcgtcgacccttccaatggtacctttggcgtttgtctgtccatttgttgtttttgtttgaaggtgttccgatgagtgtccaatgggacaaagttccctatttctatcccatccaaataatccaatttgggctgggacaatacaatttggacagaaaaggtaagacggaaatgtggacaaaaggaaatgaccaacggaaaaaaaggggcggaagtgattgtccgaccattggccaacagagcgacaaatgccatgggcacggaaaatgccaacggaacgatggcattgggcgacggcgcgacaggtgacagaagggaaaggcgaaaaggggcaggcaaacgtaaactgacagaatgaagtgaagaatcgtgtaccccccatccgaaaattaaattattacggcctctttttcggttcgaccgcccctccccccccccccctttcacttttcattttgttcgtttgaaagtccgtgtcaaactattccgtcgactgccacttttgcttttttctttgaaaacgcatcgaatggacagcgaatttgtgttggaattggaaaaacgccggagggaaggcggaacgatggaaatggcactgttttttaagcattcggaagcaaagggatgcgtgtggagtgatgagagca

SEQ ID NO: 8921 - DNA, 842 bp, Heterodera glycines
atttatgtgacaaaaggcgttgaaaaatgttatgtgcccgaaaaaacggactcaaaataaatgcggcgacacaaagggaattgtgcggaaatcaaacgaacggtaaaaagcatttgaattgaggaaactgctgaaaatggggggaatcctgcagatttagcgaccgacgaaggctttcttccgaaatcgctgctcttcaaaggcccttgtcagcttcggctgcactctctccgacaacaaaacagcgcccaccccgaactgttccaaaaagtggccgattggcttctttcgacgcaggacgaaaaagggggatggtagtcaaaacacaatgagccaatttgaaccgcggttaaggccagtgcccgtgaggagggtaattgccgagggaagacaccgactcgtgttgaacttcggctggcaaagtgccatggcacagggtcagcaaccaattcgaacagaaagaaaatccatgcattttcaggcctagccctctcttttctgactcgcgcttacgccatggcaaaaaatggagagaaagagcgctttttgctgtccgctcaaaaagcgatggggccgttcgaattggtcggccgatgaatggttcccttctctgtgcattccctttaagccttcggaaaagggcggagtgctgagcaccgtttgcgatttgccctggttcgaagagtatccgacgcttccggggacagggtaaaaccgaacggaacggacacttcccacaaatgacccttgatagagtgctcaacgggtttatgtacgcccttttcggcctcttcgacttcgctaaggtagtaaaaagtcccgggcatgtttgtccgcggtct

SEQ ID NO: 8922 - DNA, 2489 bp, Heterodera glycines
ttttcatcttcgatttttatcgacgcaaaacacatgaaaaattcgtttattattggaggactacgccctaagaggagctatgcaaccaatccgatcttcgcgacgatccgtttgttgaatgagattacaatcgaattccacccccccccccctcccgcctttgtccgcttactattccattcaaataaagaattgtaacgcaatcttttacatgaatttcataaaagaaatatacggtgaaaacatcaaaaaatatagatgggcatcatatgagtcacaaagtcagctcaatcagtactgaatgaatggagcaccactgccggtcggaatgcgctgcagaaagttcggtggctcatacattgggttatactaacaaataagaatgatcgaattggtttagaagataaaatcattagaaaacaactcacaacggcctgctgctgttttggattacgacggtatgattgttgaggttttccacgaaattgagaatgcgtaccacgggaaggctgttgaacgatgacgtattgggtagaggcaggctgccggcgctgacggcggggagaaaatttctgaagagaaaatatttggttacctacatctctacaaactcgtaccataaattgaggtcctgcttgcacgggttggtcaagaatgaattgttgtttgcctcgactgcgatttggcataacgggggtagtgatggcctgccgccctcgaaactgctgacgaatcggtagctgctggttaacaaactgagtctggagttgttgcacagtagtcgcacgacgcaatgcattgacgtgttgacgaacactcatcgatgaaaaggacggaaaacggcgtttcggtgattgattctgtacaagtaggacaggctgctgttgttgcataggattgatgcggaaacgtcgcttcggaaccctaaacaaactgattaaatttactcagttttatattactttttcacatgaaccccttttcttacattttcatcgtctgaggaactaacgcagcatcggacgcataacgaattggaccacgcccacggacaactcgttgaacaaaaacgggctgctgttgcggttgtacggcaacaattcgctggcgttgacgagtgatcacccgagaacggggactgactttgttgagcataattgtgcggacacgacgggcagaattagcgataaaacgctggaatgaaaataagataaaataataggaaaaacgaacaaaccatgccacggggcgaaacattcgatttgttaagagctttctgagaaattggatgttgttgatttttttaacacaaaattgctctcttcccataccataccttgacgagtttattcactaaattctttgtagcggaaattacggctctgttcttcgcagcgaaattttttctcatgacaacaacacggttagactttctcaaagggcgaccacggcgaacattaattccaacgcgtttaagtccaaacttcttccaaataaaatttaagtaatgaatgacaggagggttaaaaacaaaccttggtctgattctgcccattgatttgctttcggatgaatggctttcccttcgcaatattgccgcgaatcaatcgctttccagtcatttgagtctttcgcccattaattgaagcctggttggtcttgctcttatttgctttgatgatctcgtcttaaatgtgacattttgtaagatacttaaaagaaaaattacccaagctcatttccaacttgcaagcagtggccattatgtcctaaaatgcgatgaaacatgaccacgattcgagcatgtgcgctagagccattatttgacgcgtattgcgtttccgctcgccagtaagtggcaagcatttggaatgtttctgctctgggtcttcgcagttttgaaagccattttgttgttgtcacattcaccaactggctttgcgacataattagccgcacgagatcagaacctcccgcccgagcgacttttaaacataaatcctgaaaatcgaccgcctccccattttggcaggattctgtcaaacattaaggttaaaagaaaactatgggtaaacattcaaacggatgaattgaagacaaatgaatgtgaaaccaaaacaccaaacaaaggattatctaacgacccaaacgcttactgaacaaaaaaaaattgatttttcaattagaaacttaaattagaaaacatcggtgacttaccctttttgtgtcaattttgtcgatgaagacaacagaataaagaatattgtcgcaagtattttatccaaatatgttttaaaataagtttttgttaccgctaatagctttcgaaatcacacataacaaaggtttaatcgattcacttgaaaagagagagaaatggcagtggttaatgaaggaaatgggaatgcaatggaagattgggaactaaaggggtgctgcctgcctgacaaaatgagaagatagaagaaaattagggcggtattagaaag

SEQ ID NO: 8923 - DNA, 891 bp, Heterodera glycines
  unsure (1)..(891): unsure at all n locations
tcccgttgatcaagagggaagtcgatctgctgataaagaatctgctcaaggccgactgattgaagctttacaggcgattctcgcataaattatttatattttcttctttcctgtccttccttttggcatctgtgaagaactgtccttttaccccattaaaagcttaggcccatttttggcacatgaaattactaagtcacggaaaccaaatcaaaaattggcaaaagtttgttgttctcttactatcgtgtctaaatctgaaactccatgtaaattttcttttatacattcactctctttttctgactgatcatcgtttatttcattttttgtttgaatgatcatcttttctctccgtgaactattggataaaggaagttgttgatttgttgagaaatttcattcgtgtaacgattaaatattcgctttcgttaggtttcgtctcatataatttcttttgaatgcccaatggatgttgagtgccatgctccgacaccctctacttcggcctcaaatttgaatgaacccgaaatactagccaatttggcagcttttgaatccaattttgtttccgtaagtttgtccaatttaaacatgcgttatttgtgatttccttgaatataattgctatgcttccgcagttcctaagttcaattttcaggtcatctctgaacaactcggcacggacattttgccatccagcagcagtgccgtcgctttgcatgtctcttcccttattcgtaacgtcctgcgattggctcggaagttccaacggagtgcccgacggaaatggctttcttcggaggacgtcgaggcggcgttggcttattacggacacaccgtaatttgattcatttggccaacactgaattatccattanagtcacttat

SEQ ID NO: 8924 - DNA, 1777 bp, Heterodera glycines
taaaaacccgaaattctgcagaattctgtagcaatttccctcagttcctgccgcgcactatcaagaagttgggcaatgccatagagaacaatggcgtgtaggtagcacacgtccatactgactacaatctgttcaacgggcaaagggacgatacatcgttcatgagaactgaaaaaccgaagaaaaagatagaggggtaacggaaaatgggtcggtcggttagatcacctcggcccccgaaggctatatgacattagcaaaggtctttaacatccatctcctatattctctatatttattaaaaattctgttaagttatttcgtagacccatcacggccccgccgccccccccccaaaaaacctgtttttgttcctaaaaaattagcccaaaatctcaaaatttggtcatttttagacaaaatctgcaaacaaatagcaataaaataaaaaaaaattccccgtcgccgcctatcggcgcagccgggctctcccccttgttcccaaaaattgtttaaaaaacgcgccacaaaaaatgtgattaaaaagcaaaaaagaaaggttgtcaatttaaaccaagatattgtataggaagtgagtttacaagaaagggcaaatttttagaaaatttcgcgaatgttcttatcaaattcaattaaaatttccaaaaattttcccggcggtgcctatcggcaccgctggacctcactatatcattatttttgaagatttgaccccaaagtgacaaaaaagtgattttttcatagaaacactaaattcctgctttttggccaggcgctgaaaattttgaaaattaacactggagaaagaaatttttaagccggaagagcaaaaaaaaaaacttcgggtgccctccccgaaaatttttctggatactggttatgcgtttgtcccctctttcaggcgttatcgtctcccccacattcacactcgggtcatccgcgcgctttcccgtgccttctccgacacttcatgtcctttgcccactttgtatggctccgcctacgccctttgtcagcttgggatggatgtgagagaagcttagtgatgatttttgtgccttttttgttgtcagaccatccaacggattgtccttccgaacattgatttcatttggcaagcgattgaccgagtgaaaaccgacaaattgtacagcagcgaacggtcgttggcttcccacttcaacatcaaaatggtggtcagtttttttgttgcttaatttatatcaataaatagatttatactttttgtctttttttaaagttccatcaattttttttgtccaggaaaagttggtcgcctttgccgctgattcgaactgtgatttgcggttgtcttctcgtcaagacttttcggaccatttcggtggtttcggcgacgaggtttttgccacactgcaacagaagcacagcaacaacagttcgtccttttgtaataacaacaacaatagcagcggaggtggcgacggagttcggcaataatcgagcgaaaggaattggcattgacggtgaatacgcagttgggcgacgacactcgccattttgttttgttgtaaatgttacgatgactcactgtttgtttgtttttttttgtttatttattggtcatcggatttgttttgcctctttccctttacaatttatgctcgttttgtttttttccattattgtgtttctcctctccccaacttccattgtctctcaatgccagcctaaacaagcagcagccgtacactgtctccaccaatctcgtttctct

SEQ ID NO: 8925 - DNA, 1803 bp, Heterodera glycines
ttctatacaattgaaattatcactttcgctttgttacattgaacattttttgaaaaataagactcaaatacaaaaagattttgtctctggctgtcaatttctggacaaatggtctgagtggtaaaaagggaaggttctggtcggtttcaagcgtcccattctcattttaagtaaaatgccatgcaattttgagttccttctccctataatcgcgaatgagttaaatttggcgcaagtttcaaattgacagttttcgaatttatcaaaaagcaaatgggggacccttttgtttgtctagccctgtgaacttttcctaggggttttaggggtcgctgatcacggacctaacctctatttcgaccaattcggagtattaacggagttagaaacgaaaattcgaaaaattaattttcgaacttttgttcgagtttgagttagggattcgaaattggttaaaatgggtgaagattcgtgatcaacgacccctaaaacccctgagaacaataaatatcagatccgagcgcctaaattaccaaagaaaaaagcatttttctcttttaagtgtgtctctttctttgccctttcttcgctttgtttgcctttggcacaatcggcgcattcattcgtcaattagcactttttcctccgctgtgcttttgctggcaaatgttttgttcgctttgagtgccgtgaccgatcttcgcccccgccaattgcgcgtccggaaaacgaattattgagcagagagagagagagagaggggtcgccttttgtgctaattgccccgggcacaatcggccggtcaaattgtcaagtgcccctcttccccccggggggccattaatttcccccaattaatttggccgaagggaaagggacaaaagcctttccggacgaagtgcgaagatggaaagttctgtgatcatcagcagaaggacaatacaacaatggcccagtgaatgcttttttgtctgctctcgaattcgcccccccccccctcacttttctcgactataaaagcgaatgcgcttcgaccgatgtttgtcccactcaatcatatcatttgatcgttcactgcggactgaattcggaagctgagtcatcaatcactttgtcacggcaccatcgcaaatggcgtcgttctcccatcggtcgccgcttggcctccgccgtttgtttcttccgctgattttgctggtgccattttcccattcgttttccccgttggtttttggggttgattattcggcccgccctttagctttgcatttccaaatgcccaggcgtttctcccgtgccgcgccgggccctccgcccgacatgccgccaccaccaatgtcggcagctgttgcgcctgttcttcggccgccctcagctgcgtccatgtggggtgccattccggatcctccctccgctccgcttccgccgccacgcagcactttgctcagtgagttcgctgtggacgcgcgtgttggtgacccgccagtacctccgccgccaccaccgccacaaccggaaccaccaccaccgccagagccaccacagccggaaccgcctcaaccgccccctcctccgccgcctccccctccgacaccaccaccaccgccacacccggggatagaaactgcatgtgcaaacagtgattctcatccaaaacaatcttttatattcttcaagaaaaagtacggctacggctatcagaaattcggaggacctccgacatacgctcttccgccgcctcaaactgcggcgacacattttcttaatattttttcagaatgacccaagtgttttttgactaaa

SEQ ID NO: 8926 - DNA, 3055 bp, Heterodera glycines
aatcagatagttaaactttctaaatgggtgattacaatttgtttgatcatgttaatcagtaatcacgcattcaaaaaatctcagtcttggcgcccacgcattcattagacgcctttttaaatgccaaaatgcctaatttagtcctctgccggaggctacgaatcggacgagcattcgttgggcagctgctcagccgaagttgcagcaatcaacgcggcggatcagcagcgccggcggcgccacaaccaacaacagcagcagcaggcgaagaaaaaggcaccggcggcgccggcacttcagcaaaaggtgggggaggaaatcagtgatcactgatcagtcgagaattgtgattaggcaaaaaatccggattaaaatagcaaaactgttatcccattgtcaggcggtcgcaactgttgccgccactgcgtcggccgtgtcctccaaagcggcaccgcaacatcagcagcagcaacaactgtacgccaagcaagcaaacgtcaacggcaccgctgctgatcgaccgatgctgccacaaattgttgccgctccgtcgtgcgcgacttcaagaccgcaaccatttcggccccaaccgcaacttggcgtgctgccgcccgcgttaattgctgctgccgcgtcgacaagcggttatggtgatcagcaacaaatgctgcaaaaagtgccgtccattgaacagttgcggttgatgcgtagcagtcaagagcgggctggatctcaggtgaagcagcaaatcagtgggggcgtgatcaatcttggacagatttatgttattgattgatcagaatggcattgagagagagaatagaggtagagagagagggagagagagagagggaggagagagagaatagaggtagagagagagggagagagagagagggaggagagagagaggagagagagagagggaggagagagagaggagagagagagagggaggagaaagaggggagagagagagagaggaacaacctaattatctgatcagccaatgtagtaatgtttcacaaataccccactagcccaatgattaattttccatttatcagttaccattatcaatttatattatctcattgatcagtcaaccccagtgatcagtttttctattgatcattggatcagttacccttcgataagtaacccctttgatcagtgtcccattgatcgtcattgatcagttaccccattgatcagttaactctgcgctccgtttttccaggactaccacagcatggccagctcagtacactcccaggacggtttccggccggcggccagctgtctgtccacgctttcgctgcaacgcatcggactgatgggcggcagcagcggaagcggtgcctttcactcctacacgcccaccacagcgcagcaaaaacagtcctccgtgccatttcagccccaaccacaacagcaccaattgaagggctccattcagtcgttgcccgactctgcactttgcacagctgctgctgctgccggactgaaaggtgcgcctgcccggcatttttttgtctcgggacggcaccacaggcagcgcgggcatggcacaaaccatggctgattgcgagaccggtgcacccctcaaaacggcgacgcaaaaaaattaaaatttttaaaaatctcaaaaaaattcttaaaattttttgaagttttttggaaaacctaaatattactgaagataaaaatttatatttcccgagaaaaacgaacgaaaaaattccctgaaaattttttgttttgtttcttgaaaatttcgtaataagtttttttgaattaggttaggtaacgaaaaatccggttttttaataattttttccattccaattccatttttttgcggcaaccttttgccctgtccgggcgctgagacttttcttagcgctgaatgcctgaaaatcttaagaatttctcgcctttatgatgacaccgacaaagacgagacaatagattctcgaggaaatattatttttgttgctttaggctatggtgccgctgtttactcccggcagcagccgtcttcgtttggcaccggcaccaccgtcatggcacagcaacaacagcagaagcagccggtgaacggcattaccacaaaccatcgccaatttgccacacttgcgcgtatggactcgtccaacagccggcccaaacagggcgctggtggtggttcatctacagcaacaaaggctgcagcaacatcaaattgtctccgaccgacagcgcaacggcttctgccaacggcggtaacaacaacagcaacaaccgcgcctgctgaccacgcgtcggcaattgacgcgctggtggccgagctggagctgaacacggcggacacagtgcgttttaaaagaactcggattggacacaccccgacacatccggggccaaattatcggggattcgcgctgggtctgactgtccccttcctttgtttcaactgatcagtagggatgcgatttttagatttttacatatttttttcctgagatccccgtggcctgaaacgcacgaaaaacatgtttttttgggctgttgttaagctacttttcgagttattagcacctattttctaggtttttatttttagcacctaaaaaacctaaaaaaaattttaaaaacttattttcacctattttggcattttgcccaaaatttgttaacaaaaatacaataaaaggaaaaatagacccctaagaatcgacccaattttttttcaaaaaatataccccgaagaatcgaattgaaaattttcaaaaatataccctgagaaatgaaaatttctcaaaaattcatctacaaaatttatttgtttaattttttgacgagaattgttgattttgaaaattatgtatctcattaatgatttggcgtaatatttttgccttttgaagaaaattttcgattttacacccctaaattcgaaactttttggcacctattttcccatttttagcacctattttggggtttttttataacttaaaacctacctattttggcagtttttagcacctaaaaatcgcatccctactgatca

SEQ ID NO: 8927 - DNA, 3824 bp, Heterodera glycines
ctactgatcagcatcaattgattgattggcacaagaaaattgaccagcagttggtccaatcagtattgatcaaaagcagtagagtgtctgtttccatttagtgttctgtttgttttttttgataattgttgttggtattgtccaaatattgatcaatgctgatgacagctaaactgatctgtctgaaggtgatcagcaagtttgatcacaatcactcaactgataagggggggggggatcatcagtcaaaacggtcaaatcattgatctggtgatcatcagtgaatgaatgacaagggataaacttaatctcgtcggaaactcattcattagcactaaatgctcggagcgggacgggatcccgcgcgggatttttcgggattcccagcttgcaatcccctaattttttggaaattgcgggattaatcccatgagttccaatcccaaagcgggatctgcaaattaaaaacggtctctacgcccatttttaagtcgttcgcatcggccgaaaaacgccgttccttccccaccatgcagacggaagtggccacacggacgaaggcggccaaaattggcggcactaccgtagtcacacggcaacaactaccatcccacaacttcactaatcggtgtgcactgttttattacgataatccctgggtatagaggtgggattttctgatcaaaaaaaccatggattcgaagcacggagtcagcaatttctcaaacagctccactaagcattaggaaaatgccggtttggccactacggtattttgtaccaacgtcagtaggcgcccgacggggggagactgactgtaaacaaagtcattttcaggcctgcgcagcaagagaatggcagcagtaacagaagcaagccgttggaaaagctgaacgaactgatctccatggacgatgagtcatcgacgacgaggcggcacagaacggcacaacagcagcagcaacaatcggctgattcatcggcaccggcaccgtcggcgggtggaaatcggccatttgaaactatcaaccaggagaagctgaacccgtccaaagtggacgcaatggcacggatgttcaatggcaagcagcagcagcaatcggcaactaccgccgcaacatccacaaagccattcacaagcggtggatcagccggcaataatgccacatccgatcatcaggggtgggccacgcgtcgcgcggcaacaatcggaggccgtgctgcggcaccggcggtgccatcctggtccgtcggttcgacgacggcacgggcatggcggcaatgtgccgccattgcttacaaatggacaccacgcgccaccggtgacggccacgacggcacggcagcataaccaacaacagcactcggcgttgaagaagcagtacacgctgcccgcaatggcatccgtggcggccgctgctgccacaatggcaccgctgtcgtcacgaatttatcggggcaacggtgcggcagctggactgcttgaactcggcgggacggccggtcgatgccgaacaaatggcactgggaggacaacaactgcggcggcaaagcgtgatggcgccggcacaccaacggtggtggacgacgaccatggcggcggcacggcggctggcccaaatcggcaagaagggaatggcattggcatttgtgccggcagcaccggccgaagcaacttctacgacaatgtgcaggtggcgtttgccaaatgaatgggcatcgagtttcaaaatcattttgtcgggaccgggaaagtcccgactcgcgactttggcatttgtatgcctttctctgttttatcattttgtaaatcattttcatagagtgccgcgcggaacggacgctgcggcggcgggcgaacatcgccggctggctacagcttcagcaacgactccgtgtcgttgtgcagtcagtcggacgcggcactacctccggcgacgagcaaaggcggcacaaatgctgccagcaatggcacgggcggcggagcgggtggccgcatcggacagctgatcagaaagttgggcagcagcgttggcggaggcggcggaagcggtgccaaagtgccgtccagcgccacctcaaccctctcgttgaacagggtgagccccagccaagccaatcggccatgatttgatcaaaatgggttcagccaaatcaatcatcccacccggatcgccaaaagagataaataaacccatgttaaagcatatgatcaaataatgcataaaagtgatctctgatcaatcaactaattgatgaatcgatatggaaatcactttaaattttttgctagaccccgtctgatcatcaacaatgatcaaattgtataggtctaaatcaattagaccaatttaaattggtttgctcggtttaatcatcaagcaatgatcaattgttgtctgatcaactttaattagtgaccatcccgttttgctcatcgatcacttacttgatcaggtgttctccaatgaaatgtcatcgtcgtgtgtcggcggcacagcaccgcgcgacgacgccgacggcaaaaatcgcacatcaaaggccgccgccgccacttcgtgcgctgctgccaccgttggcaccaacggaaacggcacattgacaaaaagcacaagtctgagcggggatccgtggcgttaccaagtgatgatggcggaacatcagcagcagcagcagcagaacggaggtggtcggagaatggaggaacatcaatgtaaacatcaatcagtctttcttgcgatttccgatcactgatcattattcattaattggcccctcgattcgagaccaagactgaacccgagattagataattgacccctaagagtcgagacaaaaagcccaaaaatccgagaaatttctcgccccgagaaacgttcaaccaagttgttgtcatcttttcggctaagtgccaacttgccctttcaagatttgatcagctcggcctttctgataaatgccgattgaccggttcccgaaatccgagaaatttctcgacctaagaaccggagccaatagaaaatcatccgatcggttcttgccatcctttggctgtgtgccaacttgccctttcaaaatttgatcagattggcttttaggtttttcgcataaatgccggttgatcgataagtccctgaaaatcccgatcactctgatatacttcatcacaaaacaaatcatatgtaaatccagtgatcaaaaaaggcttataatttgcagccaagcaacttcaccaccacaacaacaaccgcaacaaaacggcggcatcggaaaccgtttgaagcagaccattttcgggagtgccatccgtcgtcgggtgccaacctaattagaccaaaaaacgagagatgccgaccggaccaccgatctgatcaaccagccagtgatcgatgatcagctgccgaggtgccgcaatgatcgacgatcaaacaaacaatcagtcatcaattaattaattaattgcccttccccaattgattgccatccattcatgattattttattaaaattgcataataagcgcccaaaaaatctgccaaagccaaattttgttgctccccctttttgcactcatcaaaactgctgatcaattagtcatttcgttatcattatcaccactatcattagcatcatcgtcacaaattatgtgattgtttttgcatacagtatctgacgacgatggtgaatgtcgtgcattttgtacagtatccctccaaaaaaccaaaaacaattttttatattaaaatatattttgtatggaatatgcctatgtattgtaacaatatcatcatctgctcaactcaaccattggtggaaatgaagtg

SEQ ID NO: 8928 - DNA, 6196 bp, Heterodera glycines
acggaaatcaaaataaaattaaccggattcaaaatttaaaaatagtgtttgttaatatttgtttctttttgcctgtatccgagtgaacagttcaccggccggtcatacattccatgaccatcaaaaggcacggaatgccattgtaattgttctaaataagaaagcagcaattggatggatgagaatggcaaaaccagccgcacctcgtaaatgtcgtaaacattcacaatgttcgcgtgcccactggccacaaagtgcaattcggcctcgcgctttgccttcggaatgtcccgcagaattttcaatgcgaatttcttcccgtccgtccgatgttcgcattccaccacttttccgttgattccgaccccaagaaccttaaaaatacggatgccattatttattaacctcaaaacaatcagattttgggatggattcgtcaattatttctaaatgccatttttgtgaatttgttgaaaatgccacccaaacacacaataaactcacattgttgccaattttgtaatcggctttaatcggattggttttatatttcataaccactgcaaattgatgagttgactattaaaagattaaagattagcccggttggtcctttttaaaggttagaatttttataaatcacgtcatttcaaaacaaaatttggtgtttggccaaagtttctctgctttagcttttatttttctatgcccggcctcccatccatatataattatttttaaattatgattggttggttcaatcttttttgggaaccaacttcgccaaattaccacccgccgaccaaaaaaacaagaccacttccgtcccaaaaatgttttaaataaattttacggaaagataattaagataaatcatttgtcagtggaatttatttaattttaatacaataatggcgtgtatacaataaaatcaaggcacaaaaagggaccaaaatagattttgaaatatcagcaaagtaagacgaagtgatattaagtggatatttgaatgtttaataaaaaaatgaaaaataaataataaaataaattaggtaaatattatgggaaaagtgaggagagatttaagtgcgaaaaaacttccaaagtttgaacactcacagacttttgtgaaaacgacaaatttgagggtccggtgaagagatttcgcggaaaacaattatcaacaaacaaacagccacaaaaagggcgaagatgacgagggcacaccaccacgcgtacttttcccattccaatttgcgaaagttgcgtaaaagcacaatgccaagcaacagaccagtcacaaagccgccaatgtgagaaacataggaaaccttggaaagttttataaacacgggcgaattgttggataaaattcatttgtgccaatttatttcgtcccccttttccccatttgtcatgccttttcctcaccctatttggcatgtcgctaaagtaccgctggtaaacggcaatcacaacatcggccgtaaccaaagtagaaagaatggaagcacggacccaattgaattgcatttcgctccaattaatgatgacattggcaatatgcgcagaaagtagagtgtaactgaacttagaatcaatgaaaatgaatgtgaatcatgctttttcaaattattttaaaaagattcaatttaactctcttttcttacactcctccggacgcgccggccaaatatacttctctgtcagtgacaaaaaagagcaaagcgccgctcatcacaccagcgaggtacaaaaagccaactcggccgtatttgtggaccaattccaacggaacccctaatagaatttgcacgacgagattggtgagcaaatgtacaaaactgtaagaaagaaaacacttaaacaaagtgtctcctataaaatgttaaaaaaactcacccgacatgtacaaacactaaaaatgcaaataattgtgcttcaattgaaacggcgaaaactgactgtatgtaaagtatcgccagatttgccattttaagcacgggttcagaatcagcggagactgagtgggtgtacatttggtaggcaaaaagcggtcgtttccgcaataatggaactcatgataaacatagagaccaatttggacaatcgagattaaaaccttgtattaaataatgatttgtaactgataaattaaaatattataccatgaaaatgggcggaggaatgcaattgaactcgagcaaatagcgggaagcctcagtttgttggcttcgcggaaggaccgaacgagcggcgtacaaaatcacacgcttcaaacgcattcctttcgcataagccatctgataatggaaggatgaagcgaagggtggaagaaaggaaaaggccaaagcacaccaatcgagtaaattcgggaaagtccacaaaactatcgccatttgcatcaacatcggaaagcaacgcattcgcctcctcccgcgaaagaccgaaatgtgaagcactgttccggatagaaaatttaaactcggcgacagggacgaaaccatcattgcccaagtcgaactacacgcaaaataaaaagtcagagcaataaaaggacgacaaaaacccaaccgatcgaaataattcgtaccaatcctgacactcctgaaacgattcacattgaaatttgtcaggcactgattgtgagattggatgcatttggcaacaaaccctaaagaacgaagaaatagtaaaacgaacaaaatgggagataattttacaggaataatttactgtttaaaaaatgagctaattttaaacagaattatcgacaaaaatcaatcatattcatcgtcgtaatcttcttcttgcgtatgtttctgcatttctccgtttgtatatggcctctttctttgagtagcatttttgtccgtcatcaagagattggacacagattcaggatcaaaattgtttattgcattgaatttcgacgatccattttgtctgggccgctcttccatctttaaaaaatattttacaaaggcaaaaaggaaataaaaaaaatcacatggactgcttggtcttcgttgttcggatcatctccgatgtatatgtaattgggctgcagttgacagaaacggtcattcggtaaacggagtccataattttgacgtatcggatgtaaaggcagtgcatttttttctgcggctaattccgacacaaaagcttttggtgggcgatcattactgtgcttttcatcttaaaagatagaaaaaaagctgagatcgataaaagcacaaaaatttaccaaatgttttgatcgcaaggtcaacgtcgcttctgtccacctgtttcttgccactaaactcggaaacagaacgagcatcgacgagaatctccttggtcaatgagtaagaaatatcacacaactgaaagtggttaacgtggataatattgggtagatctttaataactaacttgtaagactaattgcggttcgtactctttgattcccaattcgtggaacatttttttgattgtttccgcacattgaggtatttttgaggcggaataactttcacttggtttacatgtattattgctagatgaactaacagttgccattgccaccatcaaatgaagtttgaattctaagtggacattttgttttgacaaaaagtttatgtttaaaaatcatgaaaatattatctggagtcgagagtattcagatcatgaatctgaccaatttttaccaatccctaacccgaactcgaacacaaaaatcgaaaatcctattttttcaattgattctgaattgaatgaaaagatgttaaaataaattaaaaatttaaattttttctttcgccaatgcgcttacaaaaaaatttggctcgacactaattgactatggccatggccatgaatgacatcaaccacactaaattttaagcttttcgcctactaccatttttaagttcaataattattaattaatatgttaggagaagaaaaattaataaaaatttcgctagacaaataatatgcccattgactattctgcttggagtaacatcgaagtgtcggatgacgaagatgacacgcatccaaacgttgacaccgcttcattgttccgctggcgtcatcaggctcgtgtagagcgagaggcggagatgaaacaggccaaaaaggaggtgaaggaggaacaatcgaacgtgcgcaacaaaatgcaggtttaatgaatgactcgaacaaactgatatttaaaggatacaaattcggcactattaccgttattcccctttaggaaattgaggaaaagttgaaaagcgctaaacttgaggagaaggagcgcatcagtttggaactcgagttgaacaccatccgtactcaggaggaggagttccggaagaaggaaaaggagttggaggaaaaggaaaaacatcagccatggaatgtggacacgatcgcaaaggaagcgtggagcaaaacgatcgtcaacaaaccgaaggagggcaaggaacagccgaagaagggcacgaccagcaaaagcgaagaagacgaagagatcaaccgaatgcagaaatacttcaaagtcagtaaacgcagtgcacccattcatttttcaattccaaaattagatgaaacattttttctgtttgtttgagtataatgccctttctgccaaacttaggacaatgaaacacttttgcaccaactttgtgtcttggatggttttgacaaaatagaagaattcctgctggagcatcctcagctcgccagtgagtacgccaccaattttctgactgttgaagcactcaattatgctatcgatgcgaatgtgagtttgtaattttttagtttttttaatatattttttgtttttattattaaatcacttccaaaatattttttttgcgaaaattctttttttttttggctaataataaacagctggtttttattaaacatttttttatactgccattattttcgaaggatttctttaaaaacaaacaaacattatgattaaggagataaacatgggtcgggttgcggagaattacataatgattcaatacgaattggaattggccaaatcgctgcacgcgatggccaccaataccaatgtgataaagaacttcttcaaaaagtttgtttctgtttatttttctttcataatggcttaaataatcgtttatttacattcagaattcgtatcgcggaacaaaattatatgaaaatgttcacggacgaagtggaagcattcaaagaccgtctgagaaaacgcgcgcgggacaaaagggaggcgatgctaagcgaaacggaggtggaggagaagaaaaagcgtgtggcccagtcgccaggagggcttgacccgcaagaagtgttcgactcactgcctgcggtgagttattctatgagatggaatgaggaagcagtccaaaattagaaatttgcagcgattttcatttaatggaaccacctgaactattcaaaaagtgcatatattatataccactaataggtcagggccgttttgtattctgaatttttaattttacgtgctaacaagggcaataaacctacaaattatggggccgcaaaaatcggaattttattgtctgatggcgcccattttccaaatacaaaacaaaatgttcaaaagcagaaaatgcatgtgctatccttgatctggttactggcgagttgggagattttttcttagtaatgaaacttgaattttaggaaatgcaagaagcgttcgaaacgcagagcatgtcaaagatatttgaagtggcgaagagcatggactccgaggtgttcaagtaccatttggatcgctgcactgcctccggactttggattccaaacgcaaaggaagccgagggacatggacaagaggaggaggagaagaaggaaacggaggagaaatgaccgatactcaactcaaagatatggtaaaccatgagaatacgtttaagtcgacttataatatttaattatttatgaccatttaaatgcaaataaagatattttcccataaattcttttacatttatcagcttgtttctttaaaatagcttttctcgttgaaacttagccatagctgatggacaatgtccgccatatggatttgtcctgtgtttgagtcgatcagtcgaaggacgagaattccatgcaatttcagaaatttgtaaacaaaaacttttctatgggaaggcttgggcggatgtttgaagctgaaagttgggga

SEQ ID NO: 8929 - DNA, 3391 bp, Heterodera glycines
atgtggactaaaaacccataataattttttaaaaattcaaaaaaaaatctccaaccaattcgattaatttgaatcacttcacagcctaggtagcgaagctccgaaagcgcgaagcgctttttcccagctaaatagccgacggttcacgcacccgctagttaatatatacgttatattgacaaggagtttcgtttgcaaaaacaaaatctcccggccgaaggccgggagcgccctgaaaatagtggaagggtcttacaactttttgaggcgcatctgggaaaactatagaaaaaaattcagcgcggacgactgagtcccggggaccgatttctcactttttcttgcgtttgaaggcccctaactttttttctaaaacccgaatcaaaaaatgtctgctgtgagggggctaagttgaagtgttttttaaaaaacaaaaaaaattccaagcctctatctgcaattggaaaggctgtaggttcgtggactttttcagtaccaactttgtccagttcagtcccggttgaataactcattagggtttgatctgggcggggagttaccagcagacttattgtagagttttgaaagccctgatttttcacaaatttaaaaaattcgaaaattttcaaaatttttcgagttaggcctaaaaaacggttttcgggttttttaattttatgattttttaacgaattttcccagaaaaacggagaccacttccaaaacatagtttttcaagctctatcgactggtatttttttcggaaaaatttcggtttttttccggaaatagaaaaaatttttggcctgagcgggacatttgagtcccgggcctataactcgtcagggatcggttttagccaaaaattgccttagaacatttttgtagagcattttaaatgctatcgaatggtgtactatatgaaaggaaattttcaaaaattttcgagctaggccccctagaaattttcaaaaattttttttgggttgaaaaagagggtgaaaaatatttttctggggtaaattagggtcctgagcacaaatatgatgtttattttaagtttcagattttttggaattttttaaaaattcgaaaatatttttaatttttttggtccttggaaatttgggttaaaatttgaaaattcataactcaatgaaggactgctcaatttaagtgaattaaagctttaaaaatagcaaaaaatcgggagaattttatgggatttatttgggatttctatcttctaaagaaaaaaagttattccagaaattctggaaattttagatttttcagaaaaaaattcagaactcccttctgaaaagtcattctgtaaaagtaaaatactacaaaaattcgcaatttttttctctataatataaattttattttacatttttatctcttttttgcgaattgttataaaaataaaagtggatttttggtttcgggaccaaaggggggtgaccaggatttttgggtggaaaaattttttcaccgaaaatattccaaaaacatgtctataggggtattttatgacgctgatcacgaatacgtgatcagtttttacttttgacatcgatcaaacatcagaatccttgtgtgaggggggattctgaggcatctttaggcggggggggggtcttaaagagtttcgtataggatgaagttccggaacccagcggcgttcattcaaaataattggcgattggattttcgcaagaagcataaaaatttgcatttcaccatgaaatagtcagttttacgccaaaaaacgatcatatctgttaaatatacgccatttaagaatcattaaacatgtttttttggtttaccccttaaaccaggggtgtgatcaaaaaattttcaaaataagaacattaaggccaaaaaataagattttagtgtcaaaaataagaacattttgcaaaattgcttcaaatcgttatttttacaatttattcgatcaaaaatgtatcaaatagtatatttttgtctcccattaacgattttaacaattttggggaggaaattagcaaatcataaaatttagtgcattcgggataaaaaaaatcagatttttaacaattttttgcggcgcatttttccaaaaaacttttgggaagtgcgaggggagggggtccggcgatgccgataggcgccgccggaaaaattttgtaattttaatgcgatttgctaacagttttttgtcaaaaaataacaatattttctcattttaattgttaaaattgtgattgaattcccaccgaaaagggaataattttgaaaattagaagaaaaaataactactttttgggaacaaggggggagatggtccggtggcgccgataggcgccgccgggaaaaattttgtaattttaatgtgatttgctaacagttttttgtcaaaaaataaccaaattttgcgcaaaccttatattttcttgataaaatagtgacattctgccataaaatttcaaaattttgaatatatttaagaataaaataagaacaatagcccgaaataaggacaaatcttacaaataaggacatttttattttgtaagatttggaccctccaaataaggacaaatcttataaataaggacagatccgagccctggtttaacggcaccgggaaaaggccgtttcggcgccgacgtttaggtgccagggttggttcggcccaggttgtttcggagcaaaaccaaaataaaaacattcaaaattcacgattcaaaatttttttaaagtaatttctacttaaaattctcaaaaattaaatccaattttcatgaaaaggcacttttttgtgtatgtaaaatcgctgtgcaggttcttggtctgggccgaaacgtcggagcctaaagaatgaatacaaactcagaggtggcattaagcatcaaccagactagcttttttttaaaaatttttcatgtcatttcaaatatttttccaattttttggtttacttttcattgcccaatttttcctaaaaaataaatattctttagcccatcaatttacaaaatccgctggtggcaaatgtggcatgtgttgagccgttaagacaatgggcccagcaattgttggaccggcagcgcgatttggaacgccaaatggagtgcggtggggtgggccggaaacggcacggcggtggcgccaaaggcagtcgcccgaccgcgttgaatacgagacgctcaacatcgtatcaatcaatggccgatttatacggtagagaggagactgtagcaacagttatatcacaatgtttataaaaaagtatcgaagaatttgagaacgaacaagaagaatactctatccatttttggtattttcccacatcagggtcacttttgcgcggccattttgacgtggagttttggcgtcc

SEQ ID NO: 8930 - DNA, 2591 bp, Heterodera glycines
ttgtaaagcaatgtctgcggtttcgaaaaaatggccattttaattttccatctcattttggattttttagaaatttttgaatagaaccctctccgatcacttttattgtacgggtcaaaacttgctttgatcggttgaaaatttattaaaagcagtttttctggccaaatcaagtccggagaatccaaatctggcctcagatttgatctctgaattttctctggcattgtactgctccatgtcgttgacaagaagttgaagcagtacagggtcatagaacagcaactgactaaatctgaggcgatattcggattctccgggtttggtttgcccatgaaaacatcaatttcattttattaggtcctttcagaacaatgttgtacaaagtgtgtgctgaatcttggcacttttgagcacccattttcagacaggacaactttaaaaaaataacccgtcggtcttggtgactctttttcagcttgtcagatagccccaactttgcgctacaaaacaataatttgttttgtacctttagccttttcttggccaataaatcagtggttgaatttggccacttttttaagtagaccgatcaatttatttgagtcaaactatcttgaatttaatcaatagatcatttttaaattctcaaaaatggcagaagattgtggagaatcagtggagatactttgagtgatttatgggtttcgttttgatttgttataaattttaataaagaatttctcccagctatgacagaacttagtttccaccccaatatcatcattttctctgaattttgtcgacctgttcgccatttggtcgagcgcttcatggtgctgagcaattcgaagactgtcagtccgaattttgtgcgcggagttgacatggtttcttttttggcttctccttgatcaggcgcttcatctgatttcgtttcgtctcagcatcataaagcgatgaagcttaaccatggtgatgttcttttaggcccaaaatgccggtcatcaaattgttgtcgcccaatttggctgtagctggtcaattgcgttgttcgcacctgaatcagctaccatattttctgtttttgattaatcggaagcctgaaaataatgaaacaaaaagcaaaagacaaagcgctcctcagtttgtttcgccacctttgaattgaacagactcacaattttattcatcatcgctcgaagcgacgttcaaattgttgctggtcgaagtgcctttcacctgttgttctgcgtcagtcctcttaacattcagtacgccgtcttcatttgcagaactctcaaatatttccttgaacagttggcatttcctattagaatctgaaatttattttttttttgggaagaaaatgacataataaagtaaaaccaacattttcccaattcatcagccttttaatcatcattttattattgcttttttgatcggaatttctcgaaattatgaaatgagaccgtgatttgaaacagataaaatgttatttttcttggatttttaatttcaatgtcttaaacttttggtatggaaatggcctaaatgccttggtatggaaacggccggtatggaaatggcggtatggaaacggcagtatggaactgaccccaaccctatttttgacagagtctaaaaatttaagcagccatttggttaaaataagaacatatttccttagctaataatcaattagtaaaatgagtgtgttttccttgttagaaggagccaattaaactgtttttgctattcagctgcctcaatgttaccgacgccggcggagcccgcatttggtgcgggcgccatcggcagcggtggcacttgctcagcccggggtgccgcagcgacggacaccggcacaacactggcggaggccagtgccacgttggccgcgctgcacccacaagtgcagcggaatttggccgaaattgaatacgattggtcagtttgcagtacgcaaatataaactttcggaggacttgctgactcttcgccaaaatttgaatttatgaaaaaaaatgatggatagactctaacaataggcgccgcttatgaatagggcccggatttataagtttttccttattttttctgcggctttaactcgacgagaaatgcacgaaaaacacattttttgttggaaaattttgcgttttaacgcccttattcgaccttagaaatccttattttgggtgttcgcccttaaaaagctacttaaaaagttgcggctattcaaaatccaatgaagggacccttttggtttgccaaattattttgacctaataaatcgtcgtgaaaacttattcgcaaggcttttcgtggttgttgatcacaaatttgacatcaattttgaccaattccgagtccctaacccgaattcgaaaaaagtcgtaaatttattacggaatttctatttttttttgttcaaaattagattaggaattcagaaatggtcaaaaatgatgtctgattcttggtcaccatggttgggccggcacgtttgggcaccagcaagcttttccaatataacttttttctttgtcatccaaatccaaccttttttggtatcttcgaagcat

SEQ ID NO: 8931 - DNA, 1124 bp, Heterodera glycines
  unsure (1)..(1124): unsure at all n locations
cgggagtgtgttggctggccagcagttccacccatgttcttcacagcgcttgaccggcaggctgaagacgnacaanaatatttaaaacgccgcagaaaaacggacggagggggagggccgaccgganatncagcaaancgccagncnctgngaacaaattgcggcggttgatgagtgtatgtgctcgcctgcacaattcgctccaccaaaacacgacagaaacgaattggaggcatctgaattcaaaacggtcgtgatcaatttatgaatatggggattacattatgatggtgaagtacaaattcgggggttaaaagtttgctgtggtacccggcaccggcacgagtgccctcctcctgctccaatttcagcacaatgttcaccacaaatttccgaatggtttgacgcccaatggacgagtcgcggttaaacgagtccaaagtgtacagcgtttcgtataaaaaagtcattggctgcgctaaattcaaattaaattgtatatttactattatttcaatgatttatacggtggagacggtagagagggccgaaattgcgtagaaaagagtccaacactttcgggccaatatccacctccaaagcacgttggaaaatgacatcaattagctaaaacttttccataacttcaatgcacattttgcatttggacaactgaccggaaggatccgatcggccaaatggccgtaataaataggcaaattcataaggtctctttgttgttccggagactgttgaaaagtcgagtccattgtttttcgatacaactcagtgtacgaatattctgggtatttctgtaaaaaataaagtagaaattcctatggccaacaatcactttgctaaagtcggcgatttggataaagaattcctcggagtttgcgctcgttgtgttcgaatgggcgggcgcaaaggaatggcacgcgtgcagtcgatcgtagaaagaggagagtttgttgtcgaggagggcggccaacagaaagagcgaagtgcgaatggacgagtcatcggacgggtggagggccaacgagagaaggaaacgctccacggagacgaactgatggacgaaaagcatgtcgttgagcaccccaacccatctgttgacggaa

SEQ ID NO: 8932 - DNA, 3983 bp, Heterodera glycines
  unsure (1)..(3983): unsure at all n locations
acgccaatgcaattaaatgctaaatgtcataccctcaagtcaatttgctgcagtgaaagtgattcgtcggtaagcatccccgacggcgcttgtgacgcgtccccttggcacttccaaaccaaatagtccaccaaagcgtttgttgaccggtgcacgtcgcggttgctttgcagagaaagaagtttgtagcaaagggccgggaaattgggcgcactttggtgggactgcttgccggggggcaattggggatggaaattggtgaattcgtggaggcagcgaaagattgagacgagcaatgacggagaagtcggatgacagggcggtgagtccaactgaaactcggaagagggatgtggattgatggttgtgtgtgaactgctcaaaccccaaaaaattcagcgtccaagtgcatcagtcgttgtgcttcctggaaggagatgttctgcagttcgaccatctcttgtgcctgttgtgccgattgcatttgctccaattgcggcaggtcactatcatttggcacaattgaacggataatgttgggcggaaaccatcggagttccgacagaggccaacgctgaccaagatcttgcgagctgaactggaggtggtcggcgccgagcagtttgacagcgcgaaagacagccagcagaaagagacggtaatactccggcatggccatcaacggattgggcagcgttttgcccatcaacagttgggaaaagttgagcagatcttgtggccacgtgcattgcacaaagcgttggatggtctgttcaagaagggcacacagttgcaacgtattggaggagggacacggggcagtggagataggactccgtactaacgcctcaagcacctgtgggacatggaacaatgcagtggaaaagtgaccgtatatatgacttggtaaagaaaacgggaacgcatttcgatgctccacttccagccaaagacaatgttttggaggcgaaagttgtgcagctccaataaaaccttgaatttgagaacaaaccaagtgaatttggtgtgaaataattgcacggaccgctaagaaatcaattcggacggggtaaagtttctgttcactttcattcgttggaacgttggtggcataatgaagagcggagacaatgtgcgtgtaaaagacggcgccattaaggtcgatctgacatggttaatagtggaaaaaaccgaaaaactgaccaattccgtgctcaacaaaagtcgtgccaaactttccacgagtgccggggttggcaatctgaaaaattccgtaaaaagacaacaaaatggagtaacattggtggaccaccttattaatgcaaaattaggtgtcgcatctttatggaataattggctgtagagacgaaatgttgactgttaatttgcaaattgngcatggaaagtaagtgagtccagaaaagtcagtccaatgcacgcaaattctgttcagttcgccgtccgccggggcaaaacccaacacttttcgggtggatgaggctaaaaacagttagaggaaaagctaaaagagcctttgtataaatagcacttgctgttgatgaacaatgctctggccaagaatccgaaacaccgcggagctgacgtgttcctcgaacacctcgcgattgttgctgtacgaattggcaatgaccgccagaagggccaacgttttgtccagcggtttgcttgcatccaactgtttttctggataaaataaataatttgacgatattttcgttgagtttaaaccgatgaaatcgatgagtggcttcagtttttccggtggctgaggctgactttcttccgaagtggacgcaatgggaaaagcgactgggtgcaccaaattgatccaaatggcggccggagcaaaaaatcggacataaaattgacaaagagtcagtcaaagcaatggccaatatgagaaaaaccatattcagagggttttccgtggaacaggtggtagcccaattcatgttcttgtcagtgtacaaaaccttaagagcaattagagtgaaaaccaaattattgccaatttgtgaccaaattacgttaaaaatatccaaaaccaattcccgattctgtgcgcccaacccaacgacggagagtatttgtgccccgcattggccattttgttgctgctgctgttggaccaaattcttctcgcgataacgggcgtaggcaaccaattggagcagaatccacatcaactcgtccttcgctcgcaaatactattaaatggagaaataaataaatgaacaaattggaaaattgggcgacgatacttgacaacttctcaactgtggcagcaacattttcaacagctcactgaagttgaaaataaattaagaaaatgtaataaattgacacaaaatatttgacctcaatgtgcagttttgcatgtacagagcatgagtgaccaagtgggaaaggtgcagccaattgtactggttgaccggcgccagcacgggctgttccgagtcctccatggcgcacatcgcctccaaaatgagcagttgaatgacctcatcacattggatacgggagcacggagtctgtgaagttgacgaacggagaatgtgcttaattggagaggagagtgaacaaaactcactaaaaactggcgattacgttcaaattgtcttggccatggggctgtttgaagagaatatactgcaagtaggtttgtggggtggtattttcactgaaaatatgatttaattggaatgaaaatacaatttattcgaaaagttctgtttcaaaaacccaatggattgttagttgagtgaatcgaatcacctgctgtacggcaagtgcgtcttgaagtaaagtttgcattgcttttcgtctaatttccacgcactgcacgtcggagaactccaagagaaggagggcgaagcgggcacgggccacatccaggaacggccgagcatggaaccaatttcggcgaggggccgaaacgaagcgatcatttcgcggattttccaagaaacgcgctaatgatgggaaagataaagaattttaatagagaattgggtcattaccggtaaaaaatgaatggatgtgtggcacgggtccatgcgactgatttcgttgatgaaaaaaagagccggacaataatttttgcttctgtcaatcaagtcgatcactaactgaacacacaattaatcactcataaatatccttatccaatagagttcacttctcattttgagccacctcttcaatcggtgccaaattcctctgctgatattcggtcaattggcactgcattttgtccaacttttccaccaacaactgcttgagcaagtcgcgcatgtttttgtagtccaattggtccatgcttttccgtacaaatcttatcttttgcggattaagcggaattttcatgcgaaagtcgatgctggcgaccaacaactgacaagtcaatctgaaaacgtggtgatggtaatttccaaatcgatgattttgccatcttttctcacaaaagtgtgatgactttctcctcatatgctgccatgattattttggtgatgatgcgatccaatgcgttcagatgggtcttttccgtgctcaacagaccaatcagagagaggcacgcctgctccaactccacgggctgtttgtttcggtcggtctcagagggctcataaaagttgaaaacggtgtttttgcgcatcaaaccgcggaccaccgaccaatgattggaggagcatgcacgcctgcacacagaccaattcgtcctccaaattcaccgtccgtcgcctcttttgcatcaacggctcgaacatattctttaacgcatttggcctcacgtgattcagcaccaaccatttgagcttctccgcctcattaccaatgcaaagaaagttgaaattggacgaagtggcggaggaagaggaagaagcctcaattggggaatgaaagggaagagcggacgaagaggacaaagtggaatcatccatctgacaataaaacagcaaaat

SEQ ID NO: 8933 - DNA, 1935 bp, Heterodera glycines
  unsure (1)..(1935): unsure at all n locations
tgtaaattgaccaataataacccacctcctgaagagcagtggccgcttgggtctccaccgggtgagagttccatgttatttcgcttatcacttcncggatcaagcgtcggaacggctgccggggcatcaaattgtctgtggatttttggtacctccgaatctctttaagtgccctaaaagattaagtttgattgatgtcgtgtttgtcctcactcattttttaaaaagatttaaatttaaaaataagtcaagtcattttgattgttatttcttttttattttttaaaaatgtctaaagggtcgattattttggctatttgtgatttttgtcaatccaaatgaaaagagctctccatttgtggtttaggaaacaaaaaagttaaggtacatgaaacccaaacattatttaatttaccttaaataaaaaagaaaaacaaattacttctcccctggtcggtaccgctttcgccgttgttcttcctttttgttgattttttttttcatgatatgaatagccggccgagaaaaactaaaaaaaaatctttttttaatcatacgcaacgaattatttacaggcaaaaaaaagtaaacataaatttgtattttatttgcataaaaaatatgttgatcattttggtgttcctttttatggatgttattttcatgatatggcgaggatttttagaagcgaaatcccccagaagagatgccttaactaggagtgaaaaaagtcgaaaaaaccatgttgtttttccaaagataaaaaaaactgagaaaatttaggactttcaaaaacaaaaataaggaaaaaatacaaaacgccaaacaaaggaacagttcgaaaaaaaatttcatttcttcccaaatattgatagacagaaaaaaaatggaaaaaagcatcctagaagcttcaaaataacctagactagaaaatgcaaaaaaggaagaaaatactgtaaaattttttttttatgtttttcatgaatccacaatatatatttttttggtgaaaatattaactcaagtatttttcagagaattacataacgggtaaaatatcgctgaattgttttttttcattataatggatgtggatgtaattgtcaagaaattcaagttagtattttggcctgcacaagagtttcggaacgtaccggaagattttgatgaaaagactcgaaaatttgtcgaggtttaatctcaagtcatcaaatttatattacctaattcaatactttaggatgctttgtcctgtaaatatctcatcgagactctcaaacttcaaattggtgtcgaaacagcgcaacggatgggcgaggaggaatacgacgcgcgagtggaatactcattgaacttggagattagtgaagggaaaaacgcccatttaatgaccaaggcggacgaggagagcattcggcagaacaaccatttgctttacatgttaaacttcttcattgtgttcataaatgagcgtgttaaactgacggagcacgcattcacttgcgcattaatgctaaacacaaaggaattctttgatgttcaattttggtacagttgtacaaaatgttcgtctgttctcaaccaatttgctttagttcggctaacatggagattcccacgaaatgcttttcattcgtcagtttggttgaccgtgaccaaccacttgttcatcgaactgttcaacttgttgaggatcctaaccgaatcatggatcgtttctacaatcgcacaataagtggacctccaacacttagcgattttgagcatgacaaaagacaattggtcatccgttttccatttgtcgacagacaaagtaaaaaactaaaggaattgtaaattcaattctcaaaaaaaacgaatttgactgttaagagcgtgaaactggcattgaagaggcaaantacgtggtttcattactgtgagatacaatccatc

SEQ ID NO: 8934 - DNA, 1578 bp, Heterodera glycines
  unsure (1)..(1578): unsure at all n locations
aacattttcttccattttatgtttcttatttggtctccgttttttaagtatgtgcgaagaggtgaacgagtcctcggtttttcgagtccaatttgacctcgaacgaagggtatgttcatttgtttaacacccctctgtacttatccttttgtttagtaactttatgcgctgaacatgaatctgacgttcatttttgcaagttaatagctaaaaacggacgtccgattcgttttaagtgcataaaattaccatagactcagtttaaaattttattttcccttttcttacggtcagtctgaggactattgccaactgatcaatcgtcttgcaatggctaccgaacgttccgtggaatttcgcacttttgcccccgaaaaaatcctacgcttccgcgcttatgttgagtcgcctttgatcaatgagcaatgtcgccaaatgtgtgaaaacaacttcaaattgatgtacatgattgctgcacttctgtcccgggggacggtggtcaaagactatttgctggccaccgaattggaccgtgacagatttgtgggacggtgcgcaaacgatttccaaagggacagagcggtgaatttaaataatttttggatttgtttaaatttttacaacattttacaggtcacattggatgtgttggagcaggtgctggctgagattgacaagcgcttggattgtttgcacccgtccctaatttacgattggatattcaaaagagtcaaccgaagtgccgacgcaatgcgacaaatccacgacgaaaacaccaaggagggttatgttcgcatcagaaaagtccgtctcatcagtttttgacttataatcatactttttgaggtgctcatcacaccgtcacggatgctttttgttgcgcctgaacttttgatgggcaacagagtgttgcgcatggaccctaagaaatatcccctggacaaattcttgcgtgtcgttttccgagacgacgacgggcgaccggtccatgcgacgaatgttggttcgatgctcatcgaccgattcattggctcgaaattgcgcaatagcataaccgttgccggtaactgtttacaataaaagccaacattattctaatattttgtttaaggccgcactttcaattattttggttcgtcaaattcgcaaatgcgcgacaacggctgttatttcatcagtgcttctgtggaagagatcagagagtttcgtaccaaattgggctccttcaaaattcagtcagctcctaaaatgatgtctcggctggcgcaatgcttcacacaagcgagggttagcaagcgaaatttaaaaaaaaatagagattgtgatgggagttttgtttttaggaaaccgggattgagttggaacgccgtttctacgccacatcttttgattatttgggtgggcgggacagcaaagacgagccttattgcttctcagacggagttggtcgaatcagtttcgaaaccgcgcgngaattgagccgcgaattgaaattggaagactgcactccctcgtgntaccaagtgaattcattncatttttanatattgaaaacacataattttcagatccgattcc

SEQ ID NO: 8935 - DNA, 1172 bp, Heterodera glycines
tatcgggcgaattgggaacgcctttctcattaactcagatttgtttggcatcaaaagtgaagtctgctaccgggtacaaaaaaaatatttaaagacaaatttacacaataaatcatttagattgcctgtaagcacatggaggcggtcgatttcccaaagactggtgtccctccgaaaccgctaaccaccaaatgggagactgttaacccagaaaacgaagatgcacccgccaagcctacagcaattcctcccgagcgagctgaacgttctccggactttatggagaagaacaatgaacccatgcatgtttctgtttatttgaccaataatctattggtgaaaattcaggtacatcagttctcgattgaatggtcaactttacaggtttcactcgacaaatatttcttacaatttcacccatttatatcattacttacagacgagccagagaaattgacgacattttgaccattgcatctttcgacgatgagttcaccgcggtggaagtggaccaattgttgcaatggccaggctgtgaagataaggaaatattggaagtggcagtgcagcaatacgaagcttactcggccaatattcaggtcggtttatttggaaacatttcgttgaattttttatttatatattcagaatattttggactgttacgggataaaaactgagggcgaactgttctctggtcatttcaccgctttgcgaaatcgaatcagcgagaaggacagtgacgacatggtgggtatttttggggggtttatcgttgtattccctttgttttttagtctttttacaacacgactaatgcgattgaacagcaactgttcagtgtgtttggcaaattcagacgtcagtttttcgaacttctattggaaggccaacagaaccgttacgaggaagtgacggtgccggtgtatcgttacgtgcgcaccaatggggcaaaggtgttgggtgtttggttattcggttattatgattagatttgtttaggaagtttttcgtcgcatttgtcacgatccgtccgatgcttacaaaaagttggcttgcgcttactacaaaatttcatatggtaccttgtcaattttaatgatatttttcggtttaattgattaatttctttccattagattccacggttcgtcgattactttcatttccgt

SEQ ID NO: 8936 - DNA, 2325 bp, Heterodera glycines
ttagatccacgggttcgtcgattacttcattttccgtggttggcttgggatgtgttgaacgttgtgcgacggaccaactcagtccgctccaatttgaatgccgatcagcgcttctcttttgacccgctttgtgaccggatcaatgttcatgttgaagaatacattcaccaccggaaaaagcaatttaggtcaaaattgggaccataactgttaattctctacttaatttttgcctaaattccaggattttaaacgaatttatccgccatccagagaaagcctcacctgaagaaataaagggttatcaaactgttcagctttattgcaacaaatacaaaggtgattttaggttttattaagacacaaataagtagttttgtcttaggtcttgacaaattaatgtttttcgctaaaaaatgggctgcgctgaaaggtcttttggaggaaagcagtccgttgaaggatttgcacatttgcattttggtcattcaatacggactgaaccatttgccctgcgaagcgattgaatcgtcgcccaattggcttgaatttgtttgtttaaatttcattgtcagcctttttatgcaacatttgtaagattgactcttctactcattgcaaaaaaggcccccaaggcatctcaatcaacttggagcgacaacatggcggcgtggggaagaagtttttgcgttttttggagtttttggcatcccgtcagttcactttgctgccttttgtggatttcaatgaacccggaattggtttctcttctgtgctccagcagaatcaattgttgcctcttcacaaggtgccactgttggtgaattatataagcaaagaatttgttattcaggcggcacttcactgttaccatcaaattgcgtttacttttcgtttcgagggattgccaggcaccaaagaccaacgggacaaaaacacgagtccagtgcagcaagtggtcggcttttactttaacatcatatttttataattagatccatatttatcccatatactagtaattttatttaccgtttttcagcgtgagggtgagccgttcataatcgaagtgcccgcatcgcgccagcaacaagtgatccacaaccaggacttgttgaacaaactgtgcgagaagactggctgcactaatattgtattccgtgacttgcccaaatataaaggtgcacaaattgggaataaacccatgtatttatcaaatagagttgttgtttagattatgacactgttcgactttatgtgtcatcgaccggaacaatggaagcgctgaattcattgcgcgaacttttggctgtgcgagcaccgcttaatcttcagggcgattgtcggcaaattttcactcagatggccgagcaggtatttcgctacatcatcatgtgttggttcgacaactccctttttagcttttcgatcgcctgatcagtctttgaggggcatttaaatttgaacggattaccgtgtttgaccactttccgtgatgaaattcagaattctttacattcttatattattctgtattctgttgctattttttgccgggtccagcattttctcatcaatgcctcaattttttcgtattctagagaatatacatatgtaattcatattcaatatttgatcgggtattcggtattttattcaatttgatctctttttattcaataggtgaaaatacctaatcacattgacgattgataaaagacaaacaaaacaaatatgggtaatttgtgggtggaatgggaattaatggacacttaagattaatggcatttaaatttaaaatgcaaaaagagtctcggaatcgatcgtcagtttccagttatgccgtagcactgtcaacgtggtgcatgtgtttctcttcatagactcactgattaaaataacaaacgcacaaccgactgagccatgcagcacaaaaaagaaattttgaatagaaagttaagacttgcgttttacttggtttaaatatcccactttttaaatttttgttctattatttgaatctacttgtttaccttttaaaaatgctaattggagcatttattatttatttggtcttaataatttgctgtaaaattttactagataatttgttaattactgcaatggacagaaaaagcaacgaaagtggcgaggacgacacatctcatgctgatgatgagcaacagcaacaaatttctgctcctcaaaattcgttggatgtcaaaagagaaaacatttcggataaaagaagcgaagaaaatggagcaattgaggaggaagctaggaggtggacgagctcataaaatttgacgaggaacgggagga

SEQ ID NO: 8937 - DNA, 5316 bp, Heterodera glycines
  unsure (1)..(5316): unsure at all n locations
ttggattttgctcnnccataattgtttgagtacnccaaacggacactgaaaaaaatcgatttttttatntcataaatatttttntagaaagtgctctaaagcgcaccaaattttatttacaagttaattttagcactctgatgctttagtatcaaaaaggaagatggagaaaaattttttcaaaaatttttccttatattttggttatatcgttttgcttttgatggggtgcttggaacagtggaatcatgcgcacccgtccgatctggcaagttaagcaacgattgctgactagccaaaaggttcggtgccgtgatgaaacgaaccagcactgcttaccccgcggcacccggcacggtcccccgaaggaatggatttaattaaattctctccttcggggatttttttccattaggtcgtccgttagcgttcgattgctctagtcaatttttcaaaatttttgttgaaatatttgtcgtgctctgaaggcccccgcgggggggggggcgaaggcccaccacgaggccgcgaagaggccgagtgagtaccttcggtgcaggaaaattattaaattttaaaaattttttaattgctttttaaatatgccaaaaaatgtaggcttaacttttttagtgaaaattcgatcactcatattttttgctaattgagcagaagcgtaccaaactttgcagggatactcccacaataaaaaaatataatatggaaagacagacttttgactagacaaggcgccaaaaaatttgctttgactgggccgcaaatgtgatgcccacaaatataagtcccacaaattaaaataattcggaaacaaatatgaaaaattattttgaagcaattcaaaattagataaaattaaagccaaattgagatatatttaaataataccttccgataacagaaaggcacagctttagtccatttctaaattaaactgatccaaaatccgcaatgaatgctaactgtttaacaaagtgacacacttcaaacattggcaacgtctcttggctacatgcattcgcacaaatataaatttaaaaatttccaccgataagacatcttcgagcgaaagagttgaattttaaaaaagcaacatatagacaatacaatttaatcttaaaataatcataatataagtaaaatagataaaaactaatatttcaacagtcctaattaaatttatcgttttaaaagttcttcaatttttcaagttgtcattattctatttaatgttctaataaaaatttcacagaaaagataacaattaaattaaaaagtgtgttttgagtttatatcagtttttttatatattaattttggatattcacatgtttgtcatatgtgcgctaattacaatagatatggcgacaaaataacaataaaaaaaataatcagaataatttaaattataaacacaatttttattaaagtaacaggaatatcaactttcctattcaaaaaaaacttttaaaagaattgaattaattgcataaaatacattgcacagttgaagaagttccagcatggagcagcaaattgtgccgcacgcattgctccattagttataaaatgttaaaaaaattcatacatgcattgaccaatttggcacatattttcataattttgggtaattgtgaaagaataattggaaaaataactcttctggtagtaaaaacttatttaacataatttacttttttgttgtgcccgcctgggcttgggccacctgttgaaagcacctccacggatttcgcccttcccttctcttcccaatctttctatctctctctctctctctctctctgttttctctttatttctctttctatctctctctcgtgcattactctttctctgattgctccatcccaaaatgttgctattgtccccgcccccgcccctttccccaatcgctctaatcagatttaaggggagtgatgttgggatttgagtcagttgttgatcactcggccattttgatcattcaccatttcccttgccttttgctacacattctggtcaataaaccttttgttattggcttgacattttggggagcagcattttgggggagggatgcgctctcccacatttcaggttctgcctgaaatgctgggagggcccaacatccctcgcgtatttccccgcttattatggcgctcctgggtggatgtggaccattacaccgtaccattcccatatatatatatttgttttgtttttatttttcgctcattttcacatttatcaaattccaattaatttaattttttttctcattttaatccctttttgtccacaatgcaaataaaaaaataaaataaaataaaataaaaataataataaatataaaatacatttcacatcatttgttctaattaccatatatactgcatttccaaatttaattattgactaccgtaaaaatccattttccacagttttctaatacaccaattcttccaatttccaacgaatttttcctctcttcgccatatttaattcgaaaatactcaaactataaccagcaaattttcaattagcaaagtactaattcattaactaaaaattaacaaatcaattcaacaaattatttatttaacaaatgtgtaatttaataaaaaaattaacaaataatcggcaaatgcttactaaagaccactaacaatagtggcctcatcaaacacagaaatgcgcttacggtcagtgagacggcggtgacactggtcacagtgaccaacagttttaaccggcacaggacggttacagcgaccaacaagcaagacggacaaaacaaaaagcacaaggacaaggacaaaattcaacacaacagaggtgtggaaggcccacgctggccaaatcggatcgtcagtacagtgcggcatgtcatcggcacacagaatgggctcctcccactcttctaagccaaaacagcgccgactgcaattgtggcccgaacagctgacgcgccacagttcgagctcctcgatttctgttaaatcgcttaataacacatgctaaaaatccctttccccctcgcctctcttctctcattttttccttttctctctctctttctcttacaccatttcccaatttatcgtaccgtacattcgctatcccatttgaagtgacagccgccccatttttgagcctggaggttggtattgatagtaaggaatttggccaggaaaaccccaaattggtcccggaaatccctgctggattgttggctgagttacagcaggttgtggaattgcttgttgtactatgattggctgttgagctggaagtggctgagggcgggcaagtgaatgcattgcttgttgctgtatggcagcaccaccaccatttactccagttcgcgcattattttgcatgacattttgagttttttgggcattttgcgcaggtacatgttggacgagtaattcaggagtgatgcggttttcaatgggggttgaggttcttggtacaatacgtggtgaaagagtgtgagttatgcgatggccatcaaaattttcgtttctcaccaaccattcctctctaccaacgttgaatcccaaattttgaaaacacaatctcaaacctccgcgttgtggttccaaattttcatcgaccactgcctcattctgcctctgctgctcatttcgtacacccgctggttccacatttaaaagtgcatcggaatttgttccgagtccaagtttcggtgtgatgctgaaatttctccctcaatcaaagaattctcaaaaaccccattgttagcggtgttaatcggtcggttttcaaaattttctcgctcttcctcgtcaatcagcgcctgttgattcaatgcttcttgttgcctccgaagtctttgtctcgtcagtggtggagaattaggaaacattgtaacgtttatcaacacgagataaattgagaatttccaaatttaaagcagcacgagctttttacaaaaaaaaattcaatttggcgaagcacaacacgagtgcttttggcgagaagaaagttgtaagctcggacaaaaatccgaatggagtcaacccgacacgagggttatcaaaaatttttgtttggatttttcacaacaaattttacgaccgatgtttcccttcaattgaaaatgccactaagccagacctttgtcgtccaggagcgccatgttggaaagtcaaaccaattcttcttcttttggaattaactttaacacaatgcgagaagaccaaattggaaaatgtctgagaatcggagaatacctgcttttgaataaacacgacaaataaataatttatgtgaacaagaataatgaaaaacaattccaaataaaagacaaagcacaaacgaaagaaaatccaataattaaaatccacggccaaattaatatccacaattaccgaataaacaccagcaagcgaatcatcaaatcaaaagaattgaggtcatttcaaataaacaaaacgccaatcaaatataaaaataaaaagaagggtccaaataaatccaataccacaaaaggtaaataaaaaatcaaggttaaaaacaaaaatgctataataaattttgaaaaaagtattagtattaacatgctatactgtttgttcatgaatatttatttctattaaaaagccaatttgtggtttaatagtaatttttattttgatgaatttcaccaataaataacaattttttagagataaaaagttgaacaaatttttaataaataactgtacactttcgatagcaacaaaaaattcgacaaataaaaaagtgtttattttaaattattattttttcatgttttttaaaatataagctttcatttttcatgaatttaaaaaaaaaaatgtatttttttttaaattttaaatacccggttttaccggacaccttgagccggtttaaaaatgagaacacggaccagacccggcttttctggacccggcataggtaattagcaaataataattaattgattaattaaatatcaatcaaaaaatacttgaagaataatattatttataatttgaaataaaattaaaaaaatgtatatacaagaaattgtattaaataacaatatataatttaataatttagtttttttggttgtaaaaataatgaacatgaatactcaatcagaataatgaaattgaaaaaataaaaattttatgtaaatattgcaagaataaataataaattagtaaatatgtttcaaacctgaaaatataaacaaattttacaaacaaatttaggctttcagtgaaatacaaaaccgggtgcaaaagcgagaaaataaaa

SEQ ID NO: 8938 - DNA, 5059 bp, Heterodera glycines
ctgagtttttccggaacaacgatgaacaattggaagactattttgttggggactttgggcgaagtcggtttttggcatgaaaaggattaattgtttttttttgtagtcaacacgaacaattatcagcagccatttcgacggcgcagaagagaggcgacttcggcaattcgcaacaaatacaaataaagaacagaagattaattggataattatttaaatcaactttttgtgtttgaagtttttctttgcttctgatgtctaaatgttattttctttaaaattcaccgcaatttatttgctgattaaaattggtttgttccataaatatccatataaatgtgaatgcttgaaatagtcgctgcttaaaatctttgttttagatgatggccaacataaatgaagataatacggagtctgaattggtgtccattttgccatcacttggaccgttcgactcgtcttttggcattttgtctgattgttgttatggtcaactgatcttgcttgggttcgtttaaatggtctatgtaacgaatgcatttaaaaatttatttaattatctttacgcgtattttatttgtcctttttgggtcaatagtagttcgtataatggcagttcgtacaataggatggatgtccgtacaatgtattgttattttgatgaaaagtatgtgtcactatcggaacccgtcagtttgaccttcacggttcggccccagcacttcttcccactatagctttttattttttttattgagaaaaattgaaaatttcgactttttttcttgtgtaacttttttggtaattgtctaatctcggagcaatagcttagaaaaagcttctaaacatgttaagctttcaaataataccaacaatgttggatttgcttgataacgaaaaaagttatagccaaaaacttgggctcgtacgaaaccgaccccgacctggggccgaaccgtgggggctaaactgacgtagactggtcactatatcacatatcttttaaaatttgattattgtacgaaacgccaaattgaaacattgtacgaactggcttttgtacgaaactccattgtacgaactgcctttgtacgaactgccatgaccccgtcctttttggttaaaggtacggcggtgtctccgaaacatacagtaaccatcggagcactatgaacggtaatttatcaccaaaaaagcgaaaaatattattggcagccacagactcttcaggtcgaaaacattttgtcaaaatgtttttcaaacgacggaaggaaccaaatggaattcgaaaggggtcggcgatgacattgagcagaggagcgaacgaagcgccggcagtaaaggacgccacacggcacaccgtttcatattcatacggaaaatcgggcacagtactggtggaatatttgcctgactcgagtcgcgacatgtttcaagtgggcccatggggggagaacggagagagtaaaccaaagaatggacaatcatttcgccaatgtcctctttgaggagggatatttactaaataaaacgctttcgcattttatttttcggatttgccattcattctctgggtacgtctccgtgtgctttttcctctctcaaaaccaccaaattcgcttttcaggtcggacgctcttctgaggaccaaattgactttacgattgtggacacttggctggccatcggttcctcaaatgtttcctccccggccgggaacagtgcgcgtcatcttcgcgacgatgtcaacggacaaaagtccatctcttccacaatttcgcgctacgcctgcagaattttggcagatcgtgaccgtccaaataaggccttcatttttgcggctggtttcaattcatccaaaaatgtcctagtgaaataagccactcaaattttgcgaatttttcagatatttttgggagaaaaagcgacaaaatggcaaaaagcgaacggtgaattcgatggtttgacaacaaatggcgtattaattttgcatccaaatctgtgcaataaaagtgccgaccatgatcagatagtaataaacaggctaatttccaccagtcttgcttttgaattcagaaagttttcaacgaacgtttattgtggcgcgaaggtatcttaattcgattgtttattggaacgggaatcatgctaattagtctcccctatcgaatcggtcccctttctcgcccatctatgtggggggggattgggatactgaaagcacttgatgctatttgttaagtttctgttgatggtgacatttataatcttcgcgagactcggtcatccatgcaaaagggcactttggccatgaatgaaactaacgagcttcaggttcggatgtctcattgtcaacatatcaattcgaaatgggcattttttcaggatgggactctcatcgatttgtgcggcgccacccttttgtggaggtcggccgaagggctgaggcgctgtccgtcccgggaagcgttggagcgtcgtctggacgaactgaatgccgggaagccgcaatgtccggtcaatctgaacacgctggtggtccccagaagaaagcatccgaagaacagctcttcaagcaaacagccatacgtactctgctggggttgcggttgttcgtttgaattgttgtgcctttttaggtgtatttcgggtgtggacacgttcaaggcaaacacacttggggaggtgagtcggcattatgccagtttgtctaattgtttttaacaatatctaataatagtcaacaaatgcgggtcaataacgacattccgttgtcccatttgtatggtcgactcaaaaggggtcgccaaactcgtcatgggaatggagtcggtcttccatttggactccgactgcctcaaatacgccttcaacccatgcgggcatgttgcctctttccgcaccgtcaggtgacattctctccctctccttggtacactgtaacactcgtttttcagtttctggtcaagaattccgcttccccacgggacgagtagcttcttccccgtctgtcctttctgcacttctctgctttctgccgaaaaaccattcgttcgtttaatctttcaggacaattgtggtgagtgattgtatggtcccctccccctcctttcccatgtgtcgtcaattgtttttgaaattccattcgtttatttctattccactttcaacttgtccgcttctttaatgacctccctgttttatatgaccagcttattcagtacgatttcacggcatcttttaccaaagttcgcagattcaacgcattgtcagtgggaccgaaaccaatagaaggcataaagcaaaatttaaaaccccaaaattaaatagacaccaaattccgacttttttatcaaaaattaagcggtggtcccactacagagcaattgatgtacgtaaagtgtaaatcattttttctactttcatttcatccaattaaaataaaaacccattattgtattctgaaaatctgttgatatctaaagctatagttttgtgtatttaataaagtatgccctaaaaagacgctctaaatctgtccttcttatcatattagcaaaatgatactttatggcttatatataatttttgtcggggatagtaattccagacaaaacaaaaccataagcttacgtccgaataacacagtttaaatacaagcaaaaaacaataagtgaattaataaatattatgggccgaaacttcgttttcttacatttagacgacattgtgtatatgagggttaggattatttatatttgccaaataattgaaacagttcgaaaaatgtcaattggttttgttcaattttattatcaaaattaaaaaatcatataaatcttaaccctgatcatgtaaaacaaaattatggtcggagtaataatgaaagggattttgtggtgctttgaattattacgaagtttcacttgaagctgagttttttcatacagtacgacagcccattttcttcccattcgcgcctggttacccaaaattcctgaaaatttagtttgttaaaaaaaacttcggtacttataagcactggcctcgtcccggtcgcgcatcaaatgggccaaaacagcgccacccaaaaacaccatgtgtttcctccgtggaatcgcctcgatttttgatttgaatttctaagaattggcagttttctccccctcagtcctcttcctatcaacttacctgaaatgaatcagtgttccctttcagcacacgttcaaggtaaagctgcttaagttctcgttcaagtcgcgatggaaatccgggatacattgtggtcccgccggaaaggacaatgtgtttgtagaactccagccgagtgtctgaaatatttgccagtgtcattcaaagccgtttgttttgaccgatgtccgctgattgtatgacattgaaaagaagttcggacagtccgagtttctccacattgacaaggtgtggctggaaaagcacttcgggcgcctcaaaacgttcactgccgagttttatcatgcgtccatctgggagctggatttaggggagataaatttaggaagagaaaaatgaagaaaagtgtgcgaacggtgtaagattcggtgaggacggtcgtttccagggccaaccgctgctcctgctccacgtcgtagctgaaaataccgggaaatacgcgaagggaaagtcatccgccgttcactgacgccacgtaacaatgcttctccttcagctgccgcactgtttcaaagtcagccgagtgattgaaggcatagccacggagcagaagcaactgtagaaggacaaagagtgagcaaagggaaagtggagaggtggagggagaagagacagagacggactgagagagcgaaggagagatggggggggaagagagagagtggagcagaagagagggtgaaagaggggaatggagagaagacgaaagagagaggggaaggaagaaatagggcgaaagacatgaacggatggaggaagagagagacgaagggaagtactaagcattgcttgtggaaaaacctttatcaaatagcgagtgatatctctgcctgcaacgtccaatcgt

SEQ ID NO: 8939 - DNA, 5415 bp, Heterodera glycines
tttactaggctcgcccgtggacggtgttcggcaaaagaccgtagccgtactctgcatcataatcggtgctgcaaatttatatgtttgggtcttgttttagcaaaatgctgccaaactttccgtttttcgttcgagaaaaccgatatatttctggcaaaatccaaaatttattagacgctttttcattcattgtctatggcttatgtcatttaaccaatggtaaaatggtaaatgaatttgccatcctctgcatgtattgtattaattttatcaattgtatttttctttatatttcagaaactttacccgaattcgatttttctttcattgggttggacaaaattgaaataatggtaaacaaatatatgttaatataaatttaaatatattattttatttcttataataaatttaataatttattttccaccgttttcatattgaatttggtgctgtcaaaacgttttgtaattttctcgaaaaatgggacatgcgctaaatcggaaagtgtttcaaggaataaaaaatgtgctaaaaaatgaaacgaaaagaagcaaattgatcacagagatggaggaatgcgacggtaattatcatcaattaattaactaattattttaaagaaaaaggcaataaaatattttattgggtttagggcttgacaaaattgaacaattgcaaacaaaagaaagctatgaacttcttaggatggtggtaagtgtggcacgatttttactcaaaaaaccaccaaaaatggaggcttaggtgctaaaacagccaaaaaaacgaaaaggcttcctaaacgatttatgagatatttttttaaacgcacaaattaaaaaaaaacactttttgatataaaaaaaaatcgagctgtattttctgttggccattgtttaagttacagtgcttttcggatccctaggggctcttaaaaatttttaatttaagaataaaatcgtctacttggtgaagaaagggaatctttataattaatgtgccttgattttgcttatttttaatcggaacaattcggactgaaatttggttcaataaatatatgtatttagcccagggatgcgatctgttctgatttatcagaaatgttctgatttgaagggtccaaatctgataaaataaaaatgttctgatttgtcagaaatgttctgattttggggtagcgaccaaaatttgttctgatttcttaaacaaactcataattttaaaacctcaaaccctagagaagtgtctttcaaactctgccatttttgctattgtgcactcttttgccgaaaacagacgatcccaatgagttttttgaaaagcgaaccttctgacccaaaacacctcaaaccctagagaagtgtcgttcaaactctgccatttttgctattgtgcactcttttgccgaaaacagacgatcccaatgatttttttgaaaagcaaaccttctgactcaaaacacctcaaaccctagagaagtgtctttcaaactctgccatttttgctattgtgcactcttttgccgaaaacagacgatcccaatgatttttttgaaaagcgaaccttctgacccaaaacacctcaaaccctagagaagtgtcgttcaaactctgccatttttgctattgtgcactcttttgccgaaaacagacgatcccaatgatttttttgaaaagcaaaccttctgacccaaaacacctcaaaccctagagaagtgtcgttcaaactctgccatttttgctattgtgcactcttttgccgaaaacagacgatcccaatgatttttttgaaaagcgaaccttctgacccaaaacacctcaaaccctagagaagtgtcgttcaaactctgccatttttgctattgtgcactcttttgccgaaaacagacgatcccatgatttttttgaaaagcaaaccttctgacccaaaacaccttaaacaagtaattaattaattgaatataaatgtgtaaaataataataataataaatctatttaaaattagcttaaaattctcatttctgaatcgcaccgctctactctggttaaaaaatactacaatttaccaaataaaaaatattaattataaaaaaattgtcccattgaaacatctattcaactacagtgtaaaaagaatggtggtatttttgtatgatcaaaaattgtctcccgaattgtcttcatcagcagcttcctcgtccgtttcctcttcatcgacgttttcttgtcgcatctgccgatcattggattgatttaattaatgccttttttgtcattaacttaattacttttttgctctcaattaacgcccatcgtcgttttgtggtgggctcttctgctgcagctgctgttgaaccgttaccgccgccacggataaaattgttcatataatcgtcattgtcatcatcatcatcgtcatccaattcttcatcatcctccatttcaatgattcgtccacctcctagcccatcctcgtcctcttcctcatcctcctcatcgtcgtcggacagtcccaacccagtcatgttgccgaaaacgcgcacttctgtttgcggaaattgagattttacagaaaaaagaacaaccgccatagggacattgtctttacgcattaacgggaaaccgtgtcctagcaaagccgggatcgggatcccgggaaagtcccggccttcccatccaggctctaattactttatttcaacacattttaaatattgtactggaataaaaaatttgtgtccaatttttccacccacctcctggtcgtcgttgtcgcccattttgtccatactcctccaatccgtcgtctgcagcttggttcagctcatcaatgtgcagcggaatgccagcaattcttaaaaagtggctagacaaaccaattgaatgattggccaaattattggggccagaaatttcattaagcgcctacaatggagccgcctgttcgctttccatgcgcatttttcccaccatttcgcgcattgaacgttcagcctccagtgcctgctcgcgctccgcgtgctcagattgtactagacgactttgcaacgcatgcaaattgcggaacagtatcacatactaaaaatcagttcaaaatttggcatttggccaaagtacggtaattggccaactgtaccacagcgtagcgaacgcgcagctgtgcctcgtaacgttcgtactcgtccaaatagggaggacggaatgcctgcagtttggccaaccgcttctgcagttgatccatttcgcgccgacgccgttcaatctttcggcccaactcctgttcgtccgactcgatgttttggagccgttccttcacttcttcaatgcgttgttcggttgtttgaatgcgttcccgaagttccgtttccacctatgcaacagaatgtacccactgttctacgaggtcggtttactggggaggggaggaggcgggcacagtatttctcggtgagggtcaacgggccacggtacggtttttttggttataattcatttcacagttatccgaattgagcgaacttggttttgggtccggctggacatttgtctgatattttttgggtccggccggggccattgtctgatattataaaaattccaattttaaacattccccaatttctttcttttttccccctaaattaacgggaaatacgtgtttaaataggctctaaatgggaaaaagatggtgaaagtgttcaattgcacctgcgctgcgttcagcggtctgcccagtgctttagtgcgcacttcctgaacatttggtacatttatacactgagaatgccttggtttctcacttttgcaaatatttcctcccgaagcagttcatacagagaagctgccgtctttggcaattctgtggccaatttgatgatttgatggagctcttgacgcttaagcatccatcattcatttcattgtttaaaaaccaagcgaaatttaaaattataaaaacgcgaccttggcattcacttgcgagcgaagcacattgatctgtaccgggaagggaataaagataagtctttttgcttgtagatttttcaatcattttttgtttgtactaaaattttccaatagcaaattgattatgcgccgctacaaaataaaattgttttagagtgatttggacactggcagttcgggatggtcccttgtcagcttgagcattgtgatcaagattttttctaaaaaatcgctgaaagttttacaataattttttgaattgttaagattttttgaaaattaaagaaaaaatttggtgaaagaggaatgctattgaacccagctcaattagccacctgtaatgtgcctcccccgtcctccgctgcctttcctccgctcccctcggttccgttgctccgtttctgttccttcacactttcataaagcattctcaacacgggcagcagctcgcgaattgcatgcccatccgcttggtacaaatattttgggttcaaccgaacatgcgccttttgaagcagtgtgagcacaacctgtgcaggtgtaaaaatgatttatccattaatccataaaaattatttgttttaagtgttttccatgggttggcaataattttgtttgtatttagtgttgtgatttgtatttttcttctgataaatactgtattttagttttgggaagatgcattttgtgattttcaaaaacatttatttgtgatgtttggcttttataaaagtgtaattcttgttctgatttgtatggaaacacctttgatgttttagcttttcagaaacaagttttgcaatgtttgactttttggtcattgatgtttgctttttcagaaacataatgttttgttttttggaaacatcatttaatgttcttttcggaaacgatattgtattatttggtgtttttattggaaacattctttgatgttttagcttttaagaaacttgaattgcaatgtttgactttttggaaatttctttgatgttttggcttttcagaaacaagttttgcaatgtttgactttttggtcattgatgtttgctttttcagaaacataatgttttgttttttggaaacatcatttaatgttcttttcggaaacgatattgtattatttggtgtttttattggaaacattctttgatgttttagcttttcaaaaacttgttttgcaatgtttgactttttgcaaatttctttgatgttttagcttttcagaaacgagttttcaatgtttgtctttttggtcattgatgttttgcaaatatttattgcagggttcccatccgtccttgaaatgcaaggacgtccttgaaattgggccctctttcttgaaaataaaaaatgtccttggatgccaaggacgtccttgaaaatgaacatttagaaaagttttaaaaaaattcaaagaaatttgagaaatctttgtaattttca

SEQ ID NO: 8940 - DNA, 2540 bp, Heterodera glycines
aatatgcggtcggggtcgtttttccgccgccgttttcgctgccaggaggttttcgcgccgtcattctaaattttttaattatatggcaaattatgcaaagaatggtcaatttttttattggtgtttttgtctattaatcataaaaaaaatcaattcaatttactttattttataaaattagtcaaagatggttaaaaaaattataaattgtataaattttttgcctttatcccacgaatatgccattcttagtcggtgtattttcactcccgcacccccgcggggggcgaaggtcgcgggggtctgagtcacgggggtgtgggtgaggccaaaaaacctgtcctgtcctgactgggggacgggggcggggctcgaaccctcgttattaggaaactatcggaattaaatttaaaaagttttacatttacttactgtaataaatataaaaataaataaataatttataatgtgtgggttgaaccaaggcaaaaatcaaagaaagagtggaggtttaaccacaaggctaagtttctcgttttttaagaaacacagacgccataaaaagacgaaaatacaaaaaacacaatcaaaattcctgttaaaaagcaacataaatagtcaaattttatgcactgggcccgttaacaaatttcactgccaatctctctcctcaaccctcggactccttcgaaaaatcttgccgatccattcattacccccttttaataccctaacaattttttaaagaatcttttattcttgggatctagcaaattttagctggtgatttgcgggtttaatccagcggaccttgccccgcgaaaaatattcagttgaaatcactcaacgggacccgcaaattttaaattccaggggccttaatatttatacaaaaagtcaaaaagtattttgcgttttgagaattgtaaaggcaaatttgtttattatttttatatcaaaattatttcgttaattattcatttcactttctctaccatcatcacagctcgatcagataaaatgtgaagcaaaaaaaatatttgtgcatttttacaaattaacattctttggtattagtcagctttggtgggaattgaattcatttggctttcggaaaaataattattttattttaaaaatcatatgagttggttgacaaatgttcgttattattacattcattttccattaaaaaaaattttaacgaaatcaaacaacgaatataaccagtaggtctccactttgcaaagacaaacaaaatttcaatttttcgaaaatataaacttagtcatcgtagaagccaaatggataggcttcttccatgcttatcctcaacgtaccaatagcgaaagaaatttcaggatttgctgaaaatttttttcaaagacattataatgacacttattggagcactggacatgattctttttgcctacggggttattaccctgttcggacattgctcaggtaattgaccaaatttttttattatttcataagcaagtataaaagtatttaaattgaaaggattgaagtgcaaatccggcgctgctatggacgtgacgggctattcgccatacataaatgccacaaccgaacaatgcaaatttgatcggcgatattgtttggttgcctactgttttgctggtgaatgaattttgaatattgcacagtagtgatcggatatgtggtggacccattttcgtgtgacttttgtcacaattcccgtgaaccgaccgatctaaaatttttaccgtatgctaaggaattgataaaatcagtacaaatatgataattcatgtcatgtcacaacatgtccttaatttatttttcactctcttcaatcttttcggctcttattatcattttttcagtttcttttataaaaaaagacaggcgcttgaaaaatttgaaaatctgagtttataataatttttcgactgaatattcggcttgtcattggcatctactttgtcttaatatttttagaactcagctcgatttgtaaaaatttcagttttatctgtttacgggaagatcacgaaaaatggtgtgtccttttgtaaaatacgatacagtaagactgactatatgtaacaataggtgacgtggaggccagaattttgtacgttcaacagggtcagatcatgtcccccgtatactggtgttgtgccaaatccgtttttagcgaagcaaaattttcacgagaaatcaaaaacagctaaactcctcagcttgagaccaaatcagtatcgagaatattcccatgagagttgagctgagactccaaaagttactcgtgaattcatgacaagagtcaaaacaagcggatcagcccgtttttaaattaattacaaattgatttagagggcaatccgtctttcgcagtcacttattggcaatgtcattggatcaaagaaatcgaatactgtcccatttttttccaaaacgttatgaaaaatgagcttaatttgacaaattctcattgcacatgcgagtatggcaagccgaatgaggacatggccaatgacaaatctccg

SEQ ID NO: 8941 - DNA, 1132 bp, Heterodera glycines
catgaaaagctttgaaaatttgtgggttttgccattgaagcaaattttttttaatttttttgatagaaatataaaaattcttttaataataatttcatatagacatagtgtcagttcactgaaggattttcattcactctcagattgtccttaattaacggactatcctcttctggtggattgtccttaattaacgcccctctctcactcccccgaaataggcaaagctaaggcgaagcccccctacttattgtcaattagtatcctttttgattttctaaagcagattaattgttttctctggcttttttttgcattttgagtcgactttcataaaaatccagttctagtctttttgtcgaccttttcaaatcattcctttttcttcttgtcaatgttcatttttatattggatgttttcttcctatctttgtcctccttcttctggtccgtttgattacttccttttgtcttctttttgaatttgtccctttcactccccaaaagtcgcaccacggaatcgagcacccatgcgttcttaagaaagtggttttctttttcggcacgggtttcgcaaggaggttcgcgcaggctctttctacgcagaatgtttcggcgcgaccagaatttaatttttaatttttatattaaaaatatttttaatttgttaggtggtagatattggttcagtccataggagtttttctggattaaaaaggctgaaaaagaacgctatgaacttttttttcactgctggcgtcataacccacatatttatattatacaatagttcttaatgggctctccaagttggacattttttaggtttctgaaaaatagactcagtttctcgaaaagaatgaaattttataaacatattcattcagtattgaaaagaaaaatcttagtttcaaaaaaatattcaaaaaataaaattttgtagtaaaaaagaacattttttaaaaatgaatgcgcagcaattgcacataaattttcaagtaaattaatatcaaacattactcataatcattttacgcaaattggactgcaaattagcaaactgtacatttggggcaagttttttagctgtcaagcattgaaatgagaaataatttgcaaaaggaatgatcag

SEQ ID NO: 8942 - DNA, 1759 bp, Heterodera glycines
  unsure (1)..(1759): unsure at all n locations
aacccccngggcgatttcagtcccaattcaaaaaccaatctcttcttttcaaaaatggcacacaactcaaacaacaaacacaccaaaaacaggtgatgaatgtggtgccacaaccagcagcactgtggagctgaacaaagcgccgacgctgatgagcaaaatcatcaagcaaccgttgggactgactcggaaggttcaggtgtggccttcttcaccaaaaagcacacattttgccaactgagcaccaccgatcgcacgcgccaaacagggccatcagcaacacacactgttcgagactgaatttgttggtgctctaaacaacttcctcgcgattgccactctggcattctcagtctcggacagtgtgtttgtgtgtggcccgttggcgccggcactttttcgttccgtactcacacgccgcacacaaactgtcaaaagcgcctctttcatgttaaagcgttaaaacgaatccttcgctttctccaatcgctgggagctgctcgagacttagggaaaatatttaggactcagaaataagtaccgtatgcgtcatttaaaagattcggtattaaaaactatgcttagagcattgcgtacgtatgaaagtctactctcgggactgaaattgagtgtcgagactctcgagcagctgctgtattcgctgctttcttaccgtatcacacatcctcttgacccctctttcccaatggcttacgcaatcacaattttgttcattctgagcgctacaaatttgagtactacttatgccatctccccatcaacttagttatctgatgagtcattcatttgccaaaacctgttggtcctcacaaaaaaacaactaaactaaaacagcgttcctccggcacttttgttgcgaccgactcatcgggcggcgctcagatggctcgccagctcacagatggcactggtggtgccaccaccaagcgtggttccgcctcctcactgctcaacctggtcagcgctcatcaccgtggtggcgaaaagcgctcattccggcacccctctgtcgtgcagagcaccagcgccaattccaccgccgccgcgctgttggacgcgcagccggcggtgaccgccgccggctcgtcagccaagaagcggagcggtggtagcggcactggcgctggcggcagtgttaataatgcgttggagcggctggcacgtgccggcggtggcggcagtgttaacaatgcgttgattgagcggatggcacgtgccggcggtggcggaacggctggcaacagcaaaaaggcatgaatgattagcctgatgacgcttgtctgtgcgtattgcgtgtgttgtgtctggcggctttccatgcttgtgccattgaatgaatgcgtgttgaatagtgccaaccgccgcgatggacacgatcataaatcatgagcagtgaatgaatgatgctaaaatcccctaatttggcatttatcttcccttgccgtgacttgtgcattttttgcttttaaccttccgtgccgtgccaacgaatgtataattatttcatttctttattttacccattggcattcaaaaaagtgcaaggaccaaagaaccgaagtggttattcgccaaaatgccaatgttgtcccttgatcagcttattggcactttgtcccctgcattaatatgtcttattgtcgctccttattttcttggcattggcatttntctttagtttgcctgnatttctttntgtttgcctgtttctgctgttgcctattttgctcattttttt

SEQ ID NO: 8943 - DNA, 4601 bp, Heterodera glycines
atccgtatttatcgtatcgctccttcccaaatgtgaattatgtccttcttttcccctgctggtgttgctttgtactgtcagggcgttaataccgtattatatatgccaccaatcacctaccgtactctcagtttttgtttgtagattctctctcccccacagcgggtagtctctctttttgtgatcggtgatctccccttttccccggcttttcctccttttatgtgttgctttgatcagcaccgattgatcacttacgtgttaaaaattggcccgccccttttaagccggcactgtccaaggaggaggaagagctcctgttcaagatggtcagtgatcaggaggaggtttcttctgatcaccgctttcatgtgcccaaacccttcattttctcccactgatcagattcaagaaacgtaccgttacccgggcgcaacaatcaacatccatccgttgctttcatcgttggtcaactatacacatcccatcaaattttcaggtgttttttttgggctaaatgtgcgaaaacccctgaaaatcccaatccccccccccccccctcaggacggaaaatccattttttattgggcgatggctcttcaaaatgccattttaggcggggaagggtgatttgaaagttcatttaaaatttatttaaatgtagatggtaaaaatcttaaattgcatttatgtcaatgaacttgggaaaaaaattatattcacttaaaattaaaaattattttttttcccgtttcaggctttgatgtggctgaacagaacgatttgcactttcatatgtcgtccttttcggtacaaacagttttaagttgggggtcattagtaagacggggattttagttatttaaatattttttctacagctttattttgatgagaaatatacgaaaaaaaacatcatttttagcggtaaatgtggttcattttaattatacattatgcaaaactagagtgccacgggaccgggaattttgggcaaacccgggaccgggaccttttcgggttgaaaaccttttcgggttgaaaaatcgggaatttttggctgggaaaaccgggaaaaagccgggactagtcccggtcccggtcaaaaccgggaccttggtactcagttgtccgctaccaggtcccggtcccgtggcactctatgcaaaacataaaaaaaacatattgaacggttttcataaataaaatattaaaaaaatgttttatttttatcaatacatttgtaaatattttgatattttaactttttatcaatattctcataaaaatattttggcattttcgaattttttgagaaattccttaactaaagtgtaataaaaagagaaaaaatacagtccctaagaattgagttttttgaaaaaaaattcaatttttataaaataaatctcagccttagtcatttgcatagcaattaaaagtgattaattataaaattaattagccaacttttacatattaatccttttttaaaggaaagcaccggacttggactgcttaagcagagtgcactggaatttgtcaactacaacaagcgccagctgagcagaatttaccctaaaggtgcacgggtggactccagcaattttcttccccaggtaaacaaacaaaacacaattgtgtgccattagtgaaaaatcagtctcgagagtctcgactcgatcgtttttttttgcgcatattttggcagtttatacaaaatttgttttcgaattcacgaggaactaactgtctattaaagctcaatttttaagattgaaaattatttatgttgtataaaaaaatagttgaaacattgatttatctgatattaccaatttaattaagttaattcccttaatttaatttaataagacaatttaaatagggaaataaaaatatatattaattatttttatgtatatttaattgagcggtttatggcttcgattcccatttattttagtttaatcaccatcgattaattaatcaatcaattaattaattaatcattccccgggctcagattttttggaacgccggctgtcaaatggtggcactcaatttccaaacgccggatgtgtgcatgcagctgaaccagggcaaatttgaatacaacggccaatgcgggtgcgcgttgtttcgcccatttttttgggaaatattacgggaaattttaaaattttaaaaattggcttaatttttgcttgaaattttttctacccctccccccgttcattttaatttttcttttattttgaattccattttccctttttcaaggtatttgctaaagccggattttatgcggcgtccggaccgtacatttgacccattttccgagtcgcccgtgggtgagtttgtgccaaagcaactaattacagaattaaatacctaccgtatttgttaagaattagcttatttggggacggggacaccttagtccacgccttttcaagcccagtcaaaatgccaaaaatttataagccccccccccaacttttagatggcgtcattgcggcacattgttccgttagggtaagcagcagctgcctcagcaaaaattgtcccctaaatattttccgtttttttcagataatttcgggccaattcctttgtgagcgtaaaacgggtacctatgtggaggtggaaatgtaagaaaaaaaaattttcgatgcctaattaattattttcaaaaaatttttttgcataggtacggcttgccgacggacaccatccgcaaggagcacaggacaaaattggtgccagcaaacgggctcaatcccatctacaacgaagaagtgcggtgaaattaatgggcacactgacctccgctcttttttcttgaagggcctagttgaaatggattttattttgaaaaaaaaagtaatttacaattttcctcaaaattttatattttccaaatttttcgcccatctaaaaaatacaaaatttttcttcgtgcgccaagactcattacagatgagagtttcggaacaaacatcattattcccccctcccctggggggggggggggggatgaatcgtcggcgaatagggaaagatggaaaattaatgaaaaatcaaataaattttaaaatattattttacataattaaatccgctggtttgattaatttgactttgtttgatcacttttaattttgatcactaactaaactgatcattttccctaattaactctcctccccccaaatatttcagccatttgtgttccgcaaagtgatccttcccgaactcgcggtgcttcgtttcgctgtgtatgacgagaacggcaaacagttgggccaacgcattttgccgttggacggcctccagtccggctaccggcacatttcgttgcgaacggagcacaaccaagcgagcacgttgcccacattgtttgtgcatttgcaactgaaaacctatgtgccggacgaactgagtgtaattataaaaaaaaaaattggaaaattatgttaattttttgaaaattttttcaggggttggtcgacgcattggccgacccgaggcaagtttttaaggcttgtttgtcttaaaaaattctgaaatttttgaaaatcagaaaaatggaagcctaattttagggctaactttttctttgttttttttttgagtccactctaactttgctagatatttgaacacttttagaggagttatttatgaatgtttgggatttaatttttcaaaaaattattttaaaataataatttaaaaaatgcaaaaagtggcacaatttccaagggcttaaaattagcaaatgccaattaattccgctttgtttttccgcatgtaaaattttaaataatttcaatgaaaaaaaaaatcaagaaaaaaacaaaaattcatagagaaactaaaatctttttcggacttagaaacggcggattaatgggggataaactgactattaaaatttcccttttattaattagttcctaattacttatatgtccagggcatatttgtcggcacaagaaaagcgggaagaggcactgcagcagatgtgcgtggacgagctggacattgtggacgatgttgtgccgtcctccaatcagtcccagccgcaacagcaacagcttggcgtcggcgcccgccgggaccgaatcggcggcgccggcgcggacggcgtgccgttcgactcgaacaactctatccgacgtcttcagaatggttccacccgggaccatcagcagcagcaacagcagatgaacagcgtgcagactacgggcacaataattgagtgagtacggcataatataaaactgtataacaatgattgagataaatgggggaaggtgacatggtaaaattaagacaagatgaggcacacaataattttctgtacaatgacgatatggcacaaaacgatacgatataaaacatacaaaacaaatacgatacacattacgaaacaatactatacatatatgatacagtacacggtacaatatacaaaacgatacgatataaaacatacaaaacaaatacgatacacattacgaaacaatactatacatatatgatacagtacacggtacaatatacaaaacgatacgatatgacattactctaca

SEQ ID NO: 8944 - DNA, 5545 bp, Heterodera glycines
tacgacggcactagagggtcaattcatcgttttttggctgctttgatttggtcagccgattcttttcccgatcagtgtccatgatccatgatgatccatgtcttctctccatcccatttcgctgttccttttctcagcttgtcctccacccgtccgcctccatgtcgggcttgttcaccgacttggaatccacccggcgtggactgctcgcatttgtgggccaactgaaggcgggcaaagggctgacgcttgtggccgaatgtgtggaggggaaattcgcccaaatggcgggcggcgaattggacacaatccgacaggtcgacaaacaacactgtcaatgcaatttttggcattgcagagctcggtctcgaatgcacagtgtatgccagggatggcacggaattctgatttctggcattttttgcaaggaattccgatttccaaaaaatttttggacctcggaattacgttttctgattttcaaaaaattttggggcctcggaatgccatccctggtgtgtgccatttttggtatctttagacaaaaaaagaattaatttgccgaaaaatattttttgttccaaattttcatcgagtttttgggagcactaatctaatgagcaaattaattattaattaattacccattattatttttgccacagaatttgcacgacgaagtgaaggcgagtcgcatccgcggcttctgcgacgtgttggtggccgaccagtacatccagggcgtctcccatctgatccaaacctcggggctgggcggacttcggcacaacaggtggccaatggccagaaattggccaaataattttgaaaattaaaaaaaaaacactaattggtttttcagcgtcgtttgtgcatggcctcaaaattggtcggcctctggtccggtaacattttttgactgctattttttaaaattattaattccttttacaaaataaattaaaatttgtgccaattttccaattttaggtgccaaaaaaaccagattttataggaaattttgcttgattggggtgcctaaaatttctcattttaaaattttaaattggttccgtccgttttattttttaattcttttattgcgtgaaatattaaattctcaattttaaaatacgttttctgtacacttttcagggcaaaaacccaatgttggaggccaaccgatttgccgaattggtgcggaccatcgcggccgcgggctgtgccgttttggtgccaaaatatgccagtgcctttcccagccacggggaccgactcacggggaccatcgacatttattgggtggtgaaaagaaaaaaaaagccattttaggaagaaaaaaccaacgcattttcataatttaggtggtccacgacgggggcctgctgatgctgatcccatttctgctcatcaaacataaggttggccaatggcaccgattttcggcacttttttattaaaaaatttggcattttgggaatgtttttcgagttaaaacgaattttacggagacaaatcttatttgtaatcagtcattttaataatttctatttgaaatattttaattgctttttaatggctttccgaacggatttttaaaaaaacacaaaaaaattcggatgaccacggtgggactcgaacccacaatctcctgattagaagtcaggcgccttgtccattaggccacgcggccccacgctgacgggcgttcccattaagcaaaagacagtggaataaatgtgagaaagtgtgtgcattaaaaattggaaaatgtgcgcagcggcggaaaaggaaaagcggcggcgcaaaatgtgaacaaacaaattcagacatggaaaaacacgacggtgcgactgttcacttttgcacagccggaggacaacactttgcaaatgaaaagagtgggcaaatttaagaaaagcattgaaatttaattaattttttgggccgggggaatttgcgccaaaaatttaacgaaatgccatccttttaaattgaaacttttgaagcgggaacgaataaaagccatggcatatttttggaatgtttttgtgccccgttttcatttggaaaattcgcaaatttcggttcaaaatcgatggcaccaattttatcgtttaattcgctaattgatcaccaggctcgtaatcagaatttgaaggcctttttttgccgatgtccaaattatttttacatttggaatttctttggtcaaactttcaaaaaattgagcaatattcgttctggaaaatcccaccccttggcatatatttttggcactgtttccatgtcaattccctccccttttggcatttctttttgacttttggcactgttccctccccccgtgccaattcctaaaacttcacaaatttgggcaggacttggaacgctttctgtaccatttgcgcattgaggcgcaagtgttcgttttggaaattgactccaccgaaattgagccgtacgtttaccaacggacgctgaaaattgaggagagagtgaaactgttgagagaaatgggcaccaaaagcaatgagagagtggcggacattcaggtgaaaacagagagtgggagagaaaaagaggagaaattggaatttaaaatttaataattaaacttaaatggaaataatctaaaataatcaaaatttaattctattttctaagcaaaatgtttaaggaaaaaaactatgatagaaaaaatatttaattgaatttgaatttttaaatatattttatagactaaaattaaaatttattaaaaatatatttaaaatattataagcaatagattcaatgaagtccctcatttgtcaggtgacgatggacgaggcggtgttggagcggaagtactcgcggcccgactcggcccggcgacgctcctcaaccgttgatccggacgcgccatcgcaagactcggccaaggtgggcgagaattggccaaatctcggcctctaagacttgggaatgaccactcggaaatcttggtcccgagtctcggcacaacgctcccgtgccaatcccggcatcccttgtctcggtgaagttctctattatcgacttcaatttggatgccggtgcgattctcgaccaaaaccttgcgcactaatcccgacgcaatctcggtgccgggtctcgaccaaagactgcactcttattccgacataattacccggtgccgagtctagaccaaaaatttacccctaatcccggcacaattatccggtgccgagtctcaacctttgcgcccttaatcccgacacataggccggtacggagtctcgaccaaaacttttcgccccctaatcccgacacaattggccggtgccaaagtctcgaatttggtgcaaatttaaggcgaacactctgtgggcggtgcacgaagaatctgaggaggagggaaagcaacagcaaaggcagcagccgaggagcatagagcaaagccaagcggcgagaacggcaccagcgaatgacgacgacgacaatggcacaaatgggagcaaagtgcgcttcatcgacaattcagtggaggtgaaaaagcgcataaggatactgcagaacacagaccaaaaaagagggtggggggatactgtaaaaacttaggcttttggcttgtgcctttagttttaagacttttttttttaattggtgcatctcaaatgagcaatatatttcaattagggcacggcgggaatggcatttccgtcgggaattgcagcaattttgttgtgccaacaattattcctgatcaactcaaaatcacacacagatccatcggccctcgttggactctgccgacagtttgttgccgtcgcctgttaaagtgccacctcgggcgacgacaacaaataacacactgacagtgaacaatgatgctaatggggtgcaaaaagcatttaaatttatttatttaaattgacgcgccgccatttcagtcccaacccgtcccttcgacggtggcacgaatgcacacggctatgaagctgaaccagcacatgcgggagctgagcgcggacgcgcagctgctcattgtcaatttgccgggcccgccggaagttggccaacacgacgcttactgtaagaagacagtgcctattgtaaaactgtgtttgccaaatctcatctccccccccccatctcgcgtagtctcgagagtgccattctcgtgttaatctcgagagaaccattctcgcattagcctcgcgaattccattctcgcattagcctcgcgaatgccattctcgcgttagtctcgcgaatgccattttcgcgttaatctcgcgaattacattctggcgttaatctcgagtgccattctagcgttctcggcctgtgctgtgcctcaatcatcatccatccgtttttcagacatggaattcatcgaagccttgacggaaggcattcgtcgtgtgctgttggtgcgcgggacgggctccgaagtggtcaccatttactcatagcgcgcggcacagtctgccgccggtcgtccccggccaattcagcccgatcacctccgatcaatcaatcagtcaatcaatcaataagcaatcaatcactcagttcacacacaaaacacacatctcaaatggcctcaacaaattttgaccccccaaattcccccctcaccaatttttttcattcgtttctcattttttagtcctgcgcaagtaaatggattttattagctctataaaatgccaaattttcgccaattttgaaatttttcgcatgaaattcgtttcccattttttggcggttacattttgtccatttttttgcgcaacttttttttatgatgcccttttgtttcattctctttctttttttggttcaccaattttgagggtgctactaaatacacaacaacgcattacttctcttcttcttttgctttctttgcatttatttccccattttgttacggtactatttactgtttttgcaatattgttttgttacggtaggcacttttcgcgtgttcacataaatgactctcccaaattcgcagcagtttatttaacacggttttgttacttatttttacatttcctcccccacttttttcgagaatttctttcgcccagtgtaatttttattgcaaattttaattatttcatttaatttttgaatattttggcaatgatttttgtcgtacgatgaatttcttcttttctttttattttcggcttcttttcatctcaaaattgcctccggcactttggcgttttgtcgctccgccgcattttcctcctcccgccgacggcaaatctgtgcccaaaggctgtccaatgcaaaaagcatcgtggttgtgtcctaattaattcaaacaaaattaaattaattgggttcggagctaattggaatgccatacttattttttaaaatttaattagaaaaataatcattttttagaatttattttaattattttgttgggagtgaaagaacagcaaatttggcatttaattgtgactctgaaaattgcattttcgattaaaacttttaaatttttaaaattcgtttccaatttcaccgttatcacatg

SEQ ID NO: 8945 - DNA, 1750 bp, Heterodera glycines
  unsure (1)..(1750): unsure at all n locations
cagccataggatttgaaaaaaaagaaattttaaaaaatgtcaactttcgtgagtntaattatcataaatatattatagcaaaaccataatgccgaagttgtccaacaacaacagcaacagtcacaaatggcacatctgcttgcaacaacaccgcagcagctgcagctgaacaccttccagttggtgttcaagtcgttgaagcagcgcgacgaatggagggatgtgttgtggaaggccatgtacgtccgtgttatatatagactgtgtcctctaagcctatttctaattaaatttcaaactcagactatgacaatttttgaaacattttcacatttttttgaaaaaaaaatggaaaattcataaaattattgcttgcaataaaataaaaatttaatttacaaaattatttccgatcgctcttggctcatttttcgagttcaatcatttttcagcgaaacttgtaatccacgagcggcacatacaaaagggcattcactgttcttcaagacgtacaacggcgtgacaatttgtgccatttgcaaaatgttattgcgcggccaattcttccagggctatcattgctcgggtaaaaataaaacaaatttggaatgctaaaaaatgattaaaaaaattaaaaacacttagacaaatatggattggaaaactggaaaattaaaaaaaaatagccttggaaaatttaaatttaatattaaactcaatcccctgaaaacactaaaaaatcaaatttgacaatcatcatttcatattcaattacaagctttcgaaattacattatttatttgaatttaatttttgcattttttaatatatttatcaattttaaaatatttttcttttagcagtttgaagaaattagcctaatttttataatttttatgcgccgtaatttgtagtaatcaaatccagggctcccccatttgtccctaatttcaaaataccctacattttcggctttcatccattgatcaactactaattcgcattaaaaattaacactggcatcgcatatcggcatcgcccggacccactttcctatagaaattttcaaaaatttaatccaaaaacatcctgaaaatttgttggcatttctttaaaattctattttttgtgcaaattttcccaggcggcacttttcggcacgccgctctcctctcgaaaaaatgataaattgcctcattacgcttacaggctgtaatcgtgacatgcatcgcgagtgcgcctgcttgaaggagtgcacattgttggcacaacaacaaaacaacggcactcataacggcaacggcacgggcacgggcagcacaagcagtagcagttgctgctccaacggcggtgggacctatcagcggtacaggacgaagagagcgtcgatgtcgtcgatcacacgaaattgtaagatcttaattattcggtacaaaatatatggtactacagtattgagttattcgagttttttgattcgaatcgaactctcggtgtaaattccttggtctctcggagtgattcttgatagaaatttcgaattcgaatttcaaaaatgagaaagttttatgtgttttttgaaattcggtcaaccacttacggcgttaattctgaatgatcgacttacgcgtgtttgggtatttcaaaaataattcaatgctcagactcgggaaattcctttaaatttcaaaccggaatacctattaaaaaaattgttagaaagtttttatcaactaaaaaaaattctgaa

SEQ ID NO: 8946 - DNA, 1950 bp, Heterodera glycines
  unsure (1)..(1950): unsure at all n locations
tagtgctttgatgaatctaaaaagtctcaattatntaattattatatttattngcagaataataaatcacaacttggcccaagcttaatcaattnnaccaatctttcatatttcgaaaattaaaaaaaaaaaaaatttttgaaattaactgagaaacagagaaatattttctatattaaaatatttttttaaataaatatttaaaataatcatgtttttttggcaatatttagctgccacgtcacagtcgagcttcgagttgttctctgaatgatgtgatcccattccaaatccgtccccccaaattgtcatatcaaataatgggcaccaatcgccaaatgtgccgaacctatttgttaccaagtaaatagatcaattctaattttctaaaattctttgatagatttggattttttgaaaacctttgaaaattgtaaaaaataagttaaaaaattattgaaggaaattggaataaaaaaatttaattttttattagaaaaatcattttaagacattcagaaaatttaaataattgtgataaaaaaaaatttttttttgaatccaatgaatttttttgagaattttttagttttaggggaaatttttaaaaaattttgcatttatatgtctcaaattccattatatattttcgggtttgataaataaatctttaattttcgggcatttttcccagcgcaatcgtcgatttccacaaaaacaatccgaatgttgtggaacaaccatggtattttggcgtcatggaccgtgccgagtcgcgacggttactgtacggcacggcggacggcacatttcttgtccggtggagtgccgaagtgcaaaaatatgctctttcaatcagtgtcgatggttcggtaaagcacatgcggctggagtataatgcggaaatgaaaaagttattaattatattaaatttaaaaaattgtaaaatgccaatcatatttggcttgccaaaaattgaacggcaaaattttaaacggcacatttttttttttgttaacttagccaaagtatgaaaatacggttttttggacatttgggcctagacttttcgtattttagggtcaattttgggtttcgcgtctagaaaaaaaaaataataattctggacagcccatattctacgtactttttcccgccataagggccagaaaaacccaaagttttaggctttttcataattttttttatcctcaattcagataccatttgaacgatatgcgctttttcaacacaatgcttgtaagtttggttggaaaaggtttttcgtgaatttaaaattaaaatttttttgtttttgtcaggacctgatcaactattttcgtgtaaataatctcagcgaggccattcatggcttggatgttgttctccggggcaccccgctcaagggcaccctttaccgcgcggtggcgccatttgaacggtttttggcaaaaaaatgaaaatcaaaaataccccctaaattatcctcccgatttttcagtaccaatggcagggcaggttacatcacactgaggcctggtgatctggtcacactgttggacaccgccgatgatgacaagggctggtggaggggttctgtcagcaatgcaaacggtggcacacgggtgggtaaaattttatgccattctggcaccaataaatgggcaaaatttcattcagactttaaaatttgtttgttaataaaagaatatatatatatatatatatatatatttactaacggcgctgaatcgccgatcggcgatgaactttgcgattttaagcctttttgttattgaaaaataaatatttatagggggcctgcggtgtccattggcgtcgccagggaaaaattttggaattttatttcttgttagtaaatgaaattaaaaacataattattatatttttttaaatcatacatgataataggcttataatttatctaaa

SEQ ID NO: 8947 - DNA, 2603 bp, Heterodera glycines
ggcactgctcacgaggaggccaaagtgtcacgcttttgatcagtttttcatctgcagctgatttggacacatctcttctgatcagtgttgggggctgtagtgtgaaatttttcagttagtagagttaattggggctaattaattgcaaataattggttttatttttagaccaagaaacccaattagtcatggtcagagatgggtctgatcaaattatttggacagaaaggcatttctgatcacaatatatgccactttttttcttcataagttaagttaccaacgcaataaaaattgtaacatcgacaaattacctattttatcaaatcacgcaaactgatcaaaagcattgatcatagagagaaaggatgtccaaatcagtttttaggatgactcatattccttatgtgtaagtgccaaactttcgttttatcaccaaataaatgtttaattttcagctgctatttgaacattcaaaatgccattttcacccttttttctagaatctaccttaccattttttggcctttttatacaaatatatattctttaaaaaacaaattaattccataacaaaaaagttatatttataattacttttggcttccatgacaaattccttcccaaataaaattccattttttcattcgatcttttttctaatagatgccatttttgtgttcacatattctttttttatcatacactagagaacggataaattaatctgatcattaaataatcaacaaattttggttcttgatcaaataccggaaaattatgacggttttacattgaatcgaaatttagtcatataaatctcgcaaaaattatgaaaaattccaaaattctgaagctcatcaggtgaccgattttctctcgatttctctagtgtattttttttcatctgatcaaattaatctttttttcataattgttttttaaattttattttgtgtgattcgaatttgaccttctgccggagcattataatttttctataataataatttttgtgatttaacaaattatttccatgccttcacaaaacgactacaaatttatgtcttgagatcggacttaatctgatattaattaattttttatctcaaaaaaagttatttttttgattttttcacacatttttaattgtccaaaattaaaaaaaaaaaaaaattaagtccgatctccaaataaacttttatacattaaagatataataataattgctcgaaaatttgtgaaaatttcatgaacaattaaaaagttgtaattacgcattttgtcccattacgcatttgccttaaatgattttttataccaaatttttaatcaattaaatgaaagcaataaaaatttattttttatttttataatttgttgaacaaattaaaaatattgatccacatttatttcttgttttctgtgaatgtgaatgtgcattctgccgaaccaacaaagaaagaacagttaatttgaatcgtatgatcattttaatgactgaccttcaaattaatttttgaaattaataaaaataataaaaaataattttatttatattttatagaattcacttttttttaaattgcctttttatacattccgaattcttgctcaacaaatgtttcggcaaccaacttctaattctgctgcactcattttgctccagcttcaccataaatcagttaatttgttggggcaaatgggaaaacgttgtaaaattttattttttattttttttaatttttagaaggccccaaattgttggcaccaattcacattgtcggcacagatttcgaccagcgcttatagaaataatgccaaaatttttgagagtgctgcggatgccgttcgggacatacccagcggcgccacacttttggttgggggttagtcagtatttgaattggaattcaagaaatagcgaccggaccaggcatgcacactaactatgcttgtgggtttaagttggcctggtccggcctgggcctgaaaatttcggcacgatgaaaattttaaaaaatcgaaattttcaattaaacgaaaattctgacgcatttccattaaaagtattctttccttttttggctttgggctctgtggcattcccgagcatctgattgatgcggttgctggcagtggcgtgcgcgaattgacttgtgtcagtaacaacgccggcattgatggtgttgggcttggcattttgttgcgcaacggccaggtctctcggaattaaattttcaaaaataaaattcgagtatttcaaattggattaagaaaattttgtgaattttctctccgataacatttcccaatttgttcgatccctaagccatatttaatcaggggtcgaaaatcgggaccccgttcggtgaatggccaaaactttattcgaacaaaaaatcaaattttttacaaatacatttacttaatagccctcaaagttaattaaaaattttacttaaaaattcaaatttgctttcttcctgacaaggtgcgcaagatgatctcctcttatgtgggcgaaaatgccgaatttgcgcgccaatatttgggcggtgaattggaattggaattcacaccgcaaggtgctctcaatttgt

SEQ ID NO: 8948 - DNA, 1355 bp, Heterodera glycines
agggtaaagtaaataaacggacttgaaaagggatttccgaaatttagacgatgacagagaagaaattgagaagcaaatggaagaggaggacaaaatcctgcaaagtgtgactcagacgagtgcactcgcaacggtaaaccatcactttaaagccgaaagtttcactgcttttcccctgtcaggtggcggaaatagcgaagggtgtcaaatacacagagtccattaaaacgtcgtggaaaccgccgcgtcacattcggcaccaaactctccaggaccacgagaagttcagacgcttgaaaggcattcaaattgagggagaagactgccctcaggcaattggcagttttttggtccgtgctcaaaaatatatatttgtaagtactaaatttttctaggaaatgaaacttccccgtcccatcattgccataatgaaagaaaagaaaattgtgtgtccgactgtgattcaaatgcagggcattccggtggctctttcgggtcgcgatatgatcggaatcgctagcaccggcagtggcaaaacactgacttttgtgctgcctgtgattatgttcgtaatggagcaggaaattgcgctgcgtttcaaacgcggagaagggccatacggacttatcatcgtgccgtctcgtgaattggcgaagcaaatttacgacgtgatcatgtggatcagtggggctcttccaagtcccgattatcccgagcttcgagtgggcctttgcattggcggctttccgataaaggaccaagcgcgggagtttgaacggtgccgttgtcccaatgagaaaaaaaatatttctcatgagaaattcaaaattaaggggtgttcacattgcggtggcgacgccaggccgtctttcggacatgctcaacaagaaaatattcaatttgcaagtttgtcgttatttggtcctcgacgaagccgaccgaatgttggacatggggtttgaagaggaattgcgctcaattttctcctattttaaggtttgacttctttccttttggttcaattttacaattttttaagggacaacgacaaactttgcttttttcggcgacgatgcccaaaaaaatacaaaactttgcaaagtcgacgcttgtcaaggcggtcgttgtcaatgtcggaagggcgggggcgggtgagtcgccaaaagtcattcatttgaaataattacttttgtcccaattaagcatctctcaatgtgacccaagagtttgaatatgtgcgcaacgacgaaaaattagtcaaaatattgcaatgtctgcaaagacggcgccgcgtgttcttatttttgccgaaaaaaaggcggacgttgacaacatttacgaatatttgcttctga

SEQ ID NO: 8949 - DNA, 3994 bp, Heterodera glycines
ttattatttattaaaaacacgaatttttttttaattcgcgttctgttgaaaatgataattggacatgcaatttttgagaactttaaaaagctgtattgaaaatttagcagtgtgaatgaacaatgtgcgctttttagttttgtgagtgtgccgtataattgatggtggcttcggcgtttttcaactaatgctcaattaaaaaccgtcatcccagccgctaaaattttaatttagaaaattacttaaaaaaaaatttcacctaaattcgtcaggcggaatgtcttgatcgggtgggtaattgtcaaagttggacacgtcagcaggattgcttactttctgaaagaaagaacggctctctattaataagtgataaatgtgatagactcactgggataatgggaggttttaatgttctcgaccgaagtccatcccaatcgaaacccatgaaccatctgaacgatcatttatcattgttgttcagaacaacgtgactacaccgttcacctgtgtttcctaatgtcattaacacctcccgaacccgagccgagtcgttctccggggttgtcacggcacagcttcttcaccaatgccgttgctgttttaccaatgcgtcgattgggtatctccaaagcatcaatgccctgctcagaatagccaatttagtcaaaaaatttcgaatgtgacttaccttcagaatcaaagtgtatgttttcattgggtccgatgcttggaacggcggtctgcccagcatcaactcgcagatgtaaatgccgagtgcccagtagtccgctgcttggtcgtggcccttgttgaggatgatctctggcgacacgtactccggcgtcccgcagaaagtccatgtcttgcgacccgaggctagctttttagcaaagccaaagtcgaccagcttcaagtagccgcttgtggttagcaaacagttttccggcttcaagtcccggtaaacaatgttccgcctgtgcaaatgctctaatccctccaaaacgcaagcgacgtagaaacgggccgtgtagtcgtcaaagtgaccccgatcgcgcagcgttgtccacagctcaccgcccagacacgcttccagtagcatgtaaactgtaaaagatgattcaatttttaaattgaattcactcaaattaccatatttagagtccctaaaagttttgtagagacgcacaatccaatctgtccgggtctccatcatgatgttacgctctgcgaaaatgtgctccttaaacgagagaactgtcattaaaatgcctaaaaaacttcgacgctgtaaaaaaaagcgtagtttaaatgaacgttacaataactttgcaaatgaatggaaccacctgttgccttgtgtcgataatgtgcttcttcttcaatgctttcaatggcgaaagtccgacccttgtcgccgatgatacatacctttttgagaaatggtcctcaaccatttaattttgttccttctcaccaattcgaccctcccaaatcctccgacgcccaaagtggcgatgcgcttcagatgccgcagtagaatctgtgagaattcgtcttccaacgcgggaatctctgtttttgtcggggaaacgcgggaagagtccttctcagtgcgtgcgctgcgccgttttatgtcctcctcgcggtacgtgcgctgttgtttcagcagcggttcaaggtcgccgatcaacttcagaaagctttccctgtccagcgtcagaacctcgacgccgggggccatggcaattacatttgcagtgcgtacttcctcacctgagaaaagcaatcgtcataacatttaatctggtagataaagccattttaattgattcaactcaccaagcaaagccttttcgccgaagaattcgccttgtttcaaaatgcgcacctcacgtggctccaactcgccttcaatggactgagtgatacgcacttggccgctatttatcacaaagaaagtgtcgcccttctcgccctctcggatgatgtaatgttcagcggcgtagtagtcctggtccatcacatcggccattttggacagtcggtcctccggcagtgcggcaaagatctccactttgtgcaagaaattcatcaattgggcgtgccgctccattcccaatcgcatagtgatctgagaaaaaaaataggataatgacgaaatcagttgctatgagagaccatttgaaaaactgaacggtcgagacagaatagcacacagtcggtgatcgcttggattgatgccgtcctgacaatgagtgggaatgtgagaaatgccgccgtcggcattgccacaaaatgcgtttgattacctagcacagttgtacagaatagcaagctctcccatcgcaacccctggatttagcacctaaaaattgcggggcactgctccgtctcaccgtccgattatctcttgtacccctaatgattggccctctcgtgacacttgcagttgaccctcggcgatcacgaacagccgatcgcccggttcaccctcttggatcacccattgaccagcccgtgcacgcatttcgaacatacattcgacaagctggcacaaatcagtaaatttaagccgatcgtttggcattgccttgcccgtacctcaatgatttgttccttggctaattggcgcagaaaatcattcttttggacagcgtcacgaatgagttgcttggatctggaaagggatgtcgtgacgtttgccatcagtttgtgatgagtgtgcccttccccaccctgctgatttggtgtggtgctgtaacgtcgctttgtgctggtccaaatttgtcggttcagcggatacggcgatttttttggcacgcacttcagtgccaccttggccaaactccggcagcaacgcggctttctgtagatacgaaatacaaattctaccaaatgcttaacactcacaacctgcttcatctctgtgtgcagttcgcctgaccgcttttgactggctgaagtggcggcactttctgccttgaaaattacattttgttatttaatttatttgccatgtagctaaaattgtaaaaattctgcccaggggtagtgacaagggaagagggttaacaagggaacattccgagctgtgagtgggaaaatgcatataagctatataccattggatagagcggggtcgacttgtattgtgaattttccctggttggtgcattatgtttcacccctccccgtaaaaaacaactcttgaacgagtaaatggatcattctctcccaccttctgattaagcaccgatcgcagtttgtcgcactctgatgacagacctttcacctccacttcaagttcgccaatccgtttctgctgcgcgtccatctctttttggttctgccgcaactgtcggtcctttttctccagttggtcttccatctttaagaatggagaaatgcaaaaatagaataaaaacagttttggaaaatacctgggggataagcttctgcaactcctgcgcatcgtacactcttgagccaatttgcacctgaaatgccaacgaattgtctatcattggccaaatttgaggaaattgagcttttcgtaaacgatttggttttggtaatttaaatgcaatctttgcgcataatttagttgttaaatattctcttctcaaccccccccctccaatttttacgagtatgacaacacttactgttgtaaatgggtattttatgatgcttttgagcattataaacagatgatttgtgcttattataaatacttcattaatattacatcaaatatcaaaaagaaaaggatgaaaattaggaatttgagaaggaaaattgaagtagcaaatggcacaagtaaatacgcaatatcaattgcttacaaattaggactgacaaaatgtgagcactaatgccagaagaaaaagagaatgaatgggggcacatttgcaattcaatgaaaatatgaataaaaagactaacagatgaatagaggaagggggggggggaattgaattgggagggggggggg

SEQ ID NO: 8950 - DNA, 2474 bp, Heterodera glycines
ttgtcccacccactgcgcagtttccgctttatctcgcgctctgctccgcccgtacgttttggttttatttgcactcaaggttactttactttatctctttttctcgcggtttcaaggccctaaactcatcccgaacgataatagcgtcaattcttttctccctctttcagccggcattacgattgccatgctttatcccccttggagacatgcttttgacccacccctctttctcggacattaccatgctttatcctcccttggtccatgcttttatccctcctctctttccccaacattaccatcaccatgctttatcccccttggagacatgcttttgtcccatcttaccatgctttatccctttgcggctttatccctctgctgggcgtgatgggccgtttccttcttacacatccaacaccggtccatgccaaaaaccaattcaatttttcgcaattgttcgccataactcacgcatccatcccataatccgcgccctttcattcatccgcccacaattccatcatcccccattttttgtcccccgcagcgctaaaggggcaaaaaccgtccgccgccgtacaaaacaatttgttgtgtgactcctctcttctgctgtcgcgttctgctggctgaacagttccataggttttcgtttcgtcgcctgcagcgccgctggcggcttttccctttgattgtaagcccccgggggagggattaattacccctctcctcagtcgccgcaacgacgccataggcgacggcacttcagcagcagaggcccaccccaacaaatcggctccattatttcgaagaggcttcttcctcgccctcctcccccgcatatgattcgtttgcggttggatcatggtccaaaaaaaatgatcagaaatttatatgatcacacctcgtttgtctatgttcaattaatagttctcttgatcatctcccttttttcttttttttcctccctcttcgctcctttttctcctttttttctctcccttcctcttcatcctctcttctctcttcagtgcagtttttttttctttcaccttccttacatcttctattctcatatcttcttcgtcctcctttaccccttctcgttttccacgtttttcccttctcttcctctcccatcataattttccttcttcgcctcttccttttctctgtttcctcttttttttctgtaccttccccactcttttgcactcctttctttccctcttcctttctcccttctcttcattctccttccctcttttcacttcctttttccaccatactctcttctctcctccttttcctcccctctctctcattgcactttcggcacttcatcctcccactttcattatcccaatccaaatctgtgccaaagtgtgcggtgccaatgccaatcttatcccctctggctccccaaaatccgttgtccatttgtccaattggcagattattatgccatttattattattattattgtgcccgccatttttggcaccaaaatgccacggcactttcttttcatttttgctgctcttctgttgctaggcactgctcctttctttaacaacaacagcaaaaaggagcacatcattgtcaatttgttctgtggtgccgcggcgcctttcaactgcttttgttgccctcggcccaataaaaaaatatttttaacgcaatttatttgatttatttttattatttttgcgtaattaactctataatgatccatatccgttaatttcgtattaacaggcatttgtcggaagtttcgcttttagactcgataattttttgatttttttttctcggtctcgactttctctatgaattctcaactctgaaaatttcgactcttgaacgcccctaccaattagggatagtggggcgggggagggctaagtcttgaattacaagcatggcgtaataatgccaaaatagtcgtttgatttcaattttcaaattgaattcctttttgggattaaaattggcttgatgtttggcttaaaacactagaaaatgaattaaccttaattatagctttaattaacctaaatattataattacccgctaaattgctggcaaaattttattgtccttttttaaaattaatttatctaaacaaatattatatatatatatatataaatgatcagcgcaagcttattaaccctaattacttaaatttatatgccataaacagaaacttaattggccctaattacccaaagaaatgccgtaattgtataataaatacatcaaaattgtccaatttatcatattaattacccattttttagtgtaatacaatttgtcgtccaaaattggtggtccatagcaaaagcaataaacacaaattgtttggggcggatcagcaacagcagaaagaataaagatttgtcgcccagtgataaatggcgcgcatcagcagcgatcgaggactgcagcccacaaccacctgct

SEQ ID NO: 8951 - DNA, 3467 bp, Heterodera glycines
  unsure (1)..(3467): unsure at all n locations
gcagggggtaattacgggtattaggggacccgcggggggacgcggggaaatgggcgggataaggacgaccaccccataatgatgcagcactgattgtgggcagagaaggcgcacggcggcggaaatggacgaactcgtgcaccgcccaacggttttgatcattattcattcattagaagaaaccttgatcaattggatgatgatggatcggtgatcagccatccgatctgaataattgttatctgatcagatcagtagcaatttcattagtcgttcatccgatttggacggagcagtcgcactgatcggtgaatgatcaccatagctgatcagctaaggtctctgtcattttgtttgctcccttctgatcagcctagaaccatctgctgctggtgatcattaattagcgatccattcgattttaggtacggaatccactaattccttttttcattttctattttccggtagtttttagtccgtttttttcatgcacagaaagcccgattttcaacaaaatggcttggaaatccattttttccctgatcaaatgtctatattggccgaatcatgaactctgatcaaaaatgtgtccatgtaattagggcataattttttggtcaaagcattgccaccatcaatttggccaatgtgccaaattcggaccagtccatcgcattttcctaatctctgatcaccaattccatttttccaggactgaaaatttgatcaacaaaaagaaccctaaaattttaatttttcacaatcattcgcccagaaaatgcttttggcgcaacgccatgcccaattaaaccaacagctgaccatcagccgcttattcctcatcattatcatcttaattagcgctaatttatcaccgctaatccgatcaccatttttatgcctcgggcaatcactttgtggcgaattggaggtccaaaaaatttgaaaattaaatttttcaaattttaatttattttttcccagattcacaagcaacagaaatggctgatcagcccatcagcggcaacagcagatggtgtccgaccattgggcactgctgaaccaagtgccaatcttcaacaatgcctgcaacagtgttgtgccaggccgggtagcactttttaaaatttcaaaaatcaaaattaaaccccattaaagatgacaggaaacggattttctaggaaattttctccgcctaattttcaattttagaacgagttataatcacctaaaaaaacctattttatgaagaactgtaaacacaaatttagggtcaaattcgaattgaaaattgataaatcatttcaaaaaacaatgcaaaatttttcgcaaattaatactaattaacgctaattatacttattcgtgtatatatttttttgattacccaatttacacaaaatccccgatattttttttcaaatttctccaaccatccccgacaaattttggtgggaatttcctccccgatccccgacttttttctccccgagaatcggagcttaaccttcaaattaaaacaatcagaaaattaattttcacaaggggtggtggtggtcgactgtccatccacaaattttcccaaaaatgcccatttattaaggtcattagggggtgctcatcctctctctaatcccatttcgcgaccaccgatggcgcaaaactaacaaatccaattttgagagtgccccgcggggggtaaattttcaactttttgcctccccccccccacgaaatttggcgttttgacgcaccggaaaacgattcgccacgccttttaaaaagtttttccgccaaatttgtccctcgtcggcgcgcactcttttcgcgcacatcaatggatgggatgggatgacctttgtttcttcattttccattgtgttgttgtttgggcaaccacaaattgcggcggggcgcttaatgtaacaaaaatgggttgggaaaaggacaaaaatggacaaaatggagaaaaggaaattgggggggggggggaaagattgcgtaaattaaattaaattaaatttaaattatgcaaataaattaattaatttaaattataaaaaataaattttaatttaaaacttatgatgcaaattgaaaagattatggaaaaattcgcaattgcaaaggttctttcaaaatccgtaagtcgcctttaatccgcgcaattttgggcataaaatgccgtatttccgtccctttttagaatttacgtaaaagtactgatcactgatcattctcagatgtttacaatttgtctttaactgatctgatcctatcattatttttgaactggaatctgatcatttctttgccattagattgttctgcaattagcttttccggctttttaccattgtcctctgactctggcaacagcagcaccaatggcgatgatgacacttcatcctcggcaagcagttcagcagcaaattgtgccctttttgagtgccctgccggtgccaacagtgaatgtgctctgacggatgccactgatgcggctgatcaggagggattgctcagtgtacggcttagacggaaggacacgcaaccaccggtaagaacagcaaatgatcaaagagctgaattggattgaccaaaaaactgatcagatcgatctaggaatttgtcgtactgatcagggtacactactgtactctgatcagtctgtgatcagttgagatcagccatgctaagctctttcagtcagtgaccaattatgttaagtcaaataagccaagataaacactgatcagttgggatttgcttgtgatactcctgatcagctgctttgagcattttaactcagcactaattaggtatgataagctcggattagctatgatcaagctttgattacttgagatgggctctaatcaacattaacatttctgatcagttgatataggctctgatcaccctgaactgttacctttttagccaacatcatcaccaacaagcaacaacaacacttcatctgctgaacagcaggatgacgaagaagatgatggacaaagtgccgaaaatggtggtgatcaacggcacatcctttcgttaggcaatgatggcacgtcgacggaagacggcaccggcggcgggacaaccgcggaacagcaacatcagcagcaggtggcgagcggaaatttgaaaatttaaatttgaaaaactcgagagggatttgttttatcgaaatttaattaaaaactaattttaaaattaattcaaaattcaaaaaaatatttaaaattatatttagaaaaaacattatatttaaattttaaatttagctttcggttcacatatttttttattaaaatgctcaaaaaattctagaaaattttccagaaatattttaaattanaatttttcanagaaacccgtcatttaataataatttccatgaaaaattatttatttanaggaaaattttcctannagcaaaatttaaaaaatcttttttttta

SEQ ID NO: 8952 - DNA, 2048 bp, Heterodera glycines
ttttcattagcgatttgttttttcctcaccctattagaagtgtccccccaatgcagcacatggccccgtgttgtgtgcacaaaatcaggcaaaacatagtcgacacggttggcactggaacaaaaatttaaaaaagtaagggacataaaaattttaaattttttatcaaaaaaattggaaagaatttctccgtcaaacaacagaaaattgatggtttccatcctcttcatggaccataaggagtagcaaatataaacagaagtcatcattcggagaagaaataatttttttgaattttatttaaaaacttcgacgggaatcgaaccctttgtaaatttaaaaacagcaggaggcatagaccactgagccaaaagaggaacaagaggccacccagcaattgactaatttatttaataaaattgtttaatcgagttttttatttaattaaagagacgaaaaaatgggaccggagagaaaattttttaaataaatgaaaaaccaagcaatcaaaaagggaaaaacttgaatagttgttttaatttatttaaattaaaataatcggctaatttgaaatatttaactgtaaaaccgctcgtttccttaccccgaaaaattttttgaaaaaaattttcggaaaaattttatagagaattatgtgtaaagattttcaaaaggcgtaccgccatcggtccatgtcccgctgaaagtcggtggagacgaagcagcagtcctccttgcactgtgttgtgatgaattttaaataatttttaaaatttaaatttaattttttcaaaaaaaacgattgcgcttacacaattgaccaaatacgtctcgtccatcatgtgcagttggcggtaggagatccaatccttcaactgattggtcaatgctttgccaccgatgtcaattctttgttggtggttttaaagggattaaatggggatccccaaaatctcgccgagacaaaacctcgtcccgaaatttgtttttttttaaattttcaaaagatattttttctagcgtttttagagttttataatgaattactaatatgtattttcaaaaaatttttctaaatcgctagaaaatttttaaaatgaaatgtttaagattttttttcttcaagttttatttttttttcatttttaaagaattttgcctttttctaacaaaatgcgttgaatttttcaaaaactaggcaccgctggttccttcctcgctcagaaatttttttttttttttttgaaaaagcaaccaaaaatggttgaaatttttttatgatgctcaactcccctccgcataatttaaaaattctcttttggcatggatttaccggacaatgccctcgcgcacaatttgtcccccaacaaatggcacaatgtgagtgaacgagtgcctgtaaaaagggtaaaaataaataaaattttgtaaatttccaacggatgagaccaatgagaaaccgaccccgagtcgacgacaacacagcacggattgtgggccgagcagtgcgcctgggcggtgcaggcggacgctaaaaattgcattttttagagttaaatggaccaaaaaactacaaaaaaaatttcaaaaatgaagaaattctcacacatttttttgaaattatatcaattttttcaaaagatttttttttctttttaaaaataatatttttttaaaaagatcttatgtaaaattttaagattttttgctgaaaaattatttttgtatttttttataggcaatgaaaaagcacaaattttcctcaccggacgttcggaggaaagcgttgaagcagtaattctcgaacacaatctcatccgtgttgtccgcaaatgccctaaaaattggacatcaatttttaattattattcccatcacattaaaccattttttgaagttttcctaaattttttttgcgcctatttaagaccgttttgaggctaaattggcgaacccccccccccccgaaatgactttttaaaaattttccagcaaataatggaaaaatttttcgaacttccccccccccccaaacgaaaatgtaaaaa

SEQ ID NO: 8953 - DNA, 2789 bp, Heterodera glycines
aatgccacttcgtgggggtcagtgagcaccaggcggcactgctgacagtccacgccgaggccggcgccctccgtgccgaacacgcggttccaaatctgcagctgcgtgtcccagttaactgaaattggaaaaaaaatttttagagtaatttttgcatggttttggtcctatttttgcacaaatttatggaaaaacatcaataatttttgaaattaaattttaaaacattgaaaaaattttttcatgaattttctttcgggtcccaaggttttttggaaatcttatagggagggagggaggggtatttttcgtattttgtaaaggcaaatttccgaccccctccccttttccatgtatgaaaaggtatctaaatttggcggagacccttccgcaaaaacaagaaaaaaaatctttttttttctttgagaaaattatctagattttgaaaattctaagatttgttttttagaaaaatttttggcctctgatcttatagggggggggggtatttttcgtatttcgatttttaaaaaacagttaggagatgggcacaaattccaatgtaaatttcccaaaaaatgtgacccgaaaacctgccaagatatccccgttcgaatggcaagacgaaaaacagtgccgaacggtcggtgcactggtccaattcgtcggcgacaaaaatgcgcttccgctcgcccttcgatttgaacacagtgttggggaaaattctaaaaaaaaaacggggagaatcgagtgtaattattgtataaaaataatgtataacctccgcaaaattttccgagtttttcaatttccaaattaaaaaaaaacttagattattttagaagaaaaaaaaattgtattttttgaacttttttgccatagttttctaatagaaaacccatggaactatgaaatatgataccaaaaagactgtttcattctctaaattttgtcaaaattggagggtcaatttgtcggcatcgtggccccatccgttccaaaattgtgccaaattggtacttttactgtttaaggcccatgaaaaatatacttaaattttatttcttttcctaattttaaaaaacaaaattcaaaagacagttaatttctcgacttttttcgagtttgggttaatgacttggttcaaattacaccagaacttgttatcatgatttttcaagaaaaaatggctatttttttttttaattttacacaattttcattaaaatttggaaaaaaaatctatgtcccaagaaaatgaatgcaacacgcaaatacctggcactttggtcggtggaatagcccgcctttatgctgtacgcgccgttgtccatgatcaacgtcggttgcgacgacaacatttgtgccaaagtgtggttgtggcgttggaggaattttttaaattttttttttagaaaattagattcgttggtaaaataaataaaaaagtatttaatggaaattatttgagaatttgttcgatatgcccaccaggggtggcgcgcaaccgcgactagcgatttaaatgggttactgctagagcccggacggggccgggatcccgccgggattttgccgggactcccggtcccggtcccgggttttttgggcaaaccgccgggaccgggagtcccggaaaaacgggagtgccggtgccgggatcccgcccgggtccattttccaagtcccggtcccgatcccggtcccggcaatttcaaaattccgggctctagttactgcagattttttcgcgatccgcggcaattgggattaaattttattcattgagacgattgtctttgaaatattcaaatttatataaaaaaatttctaaaacttggtattctcgaaaaatttcgttcaaaattccgggtttccccgtctacgctgaccaaaaaatttaaaatatggctcaaatcacaaaatagatcattttttggtcaagtcttttagcaaattgcactcaaattataaaatttttctctggcgacgcttattggcacccggattcccacctgctccgcaaagtttatgggtttcatatattcctaaccctagctatgaggaaatcagaacaaaaacaaaaaaatttgcaattttcattttaatcatttgtgttattttttagggtttaaaatatttctgaatttgttgtggtattttgtccaatgtctgtgctaatcaccgagagaaatcagggtaatttttttttttaatttcccaattaaactgacgacataatgctttgttttgggcttccattcatgagacggttgggatttgtttcaatttggactcttttttgagccaaaaaaaaaattgtaaaaatcagggctcggaatttttgattgaaaaatgcggcgccttcattttttcttttcagatgcgacaatttatgttggtggtctggacgagaaggtcaccgaggcgagtgagtgttgttgcacattttcaattttaatgaaggatttggaattgagtgaaacaaatttacgaatcgcaatcaatgacctcaaaaactactacaaacaaattttcaagaattattattgagaaaaaagattagaaaaaaatcccactagttgtagaggggtcttttgaaaagtttaaaaatgttttattcaatttttgagtttttttttggcttgcatcctttatttttcttttattttttgcagtcctctgggagttgttcgtcaacgctggtccggtgaccaacgtgaacatgccgaaggatcggatcaccggcaaacgccagggcttcggctttgtggagttcatgagcgagg

SEQ ID NO: 8954 - DNA, 2719 bp, Heterodera glycines
gcagacggatgcaggagggatcactcacttcagaagtggaatgacacacgacgaggaccaaatcatcccaaatttgtacagatacattcaggtaatgctgaaattcttaaccctgatattttttatgtcgtatttaagccatgggaagcggagtttgtcgattctcaacgtgtgtgggctgaatacgctcttaaaagacaggaagcgaatgcgcaaaatcgacgtttgaccttggaagacttggacgacagttgggaccgtggcattccaagaatcaacactctgttccaaaaagaccgtaacacgttggcttatgacaagggctggcgagtcagaacggagttcaaagcttaccaaatactgaagcaaaatccgttttggtggactcatcagagacacgatggaaaattgtggaatttgaacaattatcggactgacatgatccaggcactcggaggtgttgaaggcattctcgaacacactttgtttagggtttgtcttttcattatttctttttccatgattacattctttagggaacatatttccccacttgggaaggtctcttttgggagcgtgcgtctggtttcgaagaatcgatgaagtttaaaaagctgaccaatgctcagcgttctggattgaatcagatcccaaaccgtcgcttcaccctttggtggtctccgactataaacagagcgaacgtcagactttttaatccttaattcgaaattgttttgttattcaggtgtacgtcggtttccaagtgcagcttgatctgactggaattttcatgcacggcaaaatcccaactttgaaaatctcattgatccaagtaccttttttgtacttggcttttctataattgtttttcagattttccgtgcccacttgtggcaaaaaattcacgagtcagttgtgatggatttgtgtcaggtgttcgatttggagttggatgctttggaaattcagacggtgcagaaagaaacaattcatccgcgaaaatcgtacaaaatgaacagttcttgtgccgatatactcctttttgctcaatacaaatggcacatttcgcgtccctcgcttttggccgatacgaaagacgtaaaactgaggggctaatggggcattcgttggttggctaatataaatattgagtctttattttacaggtaatggacaacacgaccacgcaaaagtactggctcgatgttcaactgcgctggggagactacgactcgcacgacatcgagcgttattcgcgtgctaaattcttggactacaccacagacaacatgtccatttacccctcaccaaacggcgttctcatcgcaattgatttggcttacaacctgtacagtgcttacggcaattggtttccgggcatgaaggtgctcctacgtcaagcgatggccaagatcatcaaggccaaccccgccttttatgtccttcgagaacgtattcgcaagggtctgcaattgtattcatccgagcctacggaaccctacttgacttcacaaaactatggcgagctgtttagcaatcagatcatttggtttgtagacgacacaaatgtgtaccgtgtgaccattcacaaggtcattggcttttttatacggttgttacggttattgttacaactttcagacatttgaagggaatttgacgactaaaccgatgaatggggccattttcatttttaatccgaggactggacaactgtttttgaagatcatccacacaagtgtgtgggccggacagaaacgtctcagtcaggtgggctgaacgccgatctatgtttgtttctacttttaataatttagctggcaaaatggaaaacggcagaagaagtggcggcattaattcgatcgctgccagtggaggagcaaccgagacaaatcattgtgaccagaaaagcaatgcttgacccattggaggtgcatttgttggacttccccaacattgtcatcaaagggtcagaattgatgctaccattccaagcaattatgcgagtaagctgaaaagaacgacatacgatttatagatctgctgattaaacttaattaatttctttttcagattgaaaagtttggtgatttgatattgaaagcgacagagccgcagatggtgttgttcaatttgtacgacgattggcttaaggttgtttcaattttacttttttaccaaacttagtattttttagactatctcgagttatactgccttttcccgggtcattctcatcatgcgtggaatgcacattaatccggacaaaacaaaagtgattctgaagcctgacaggaccacagtgactgaaccgcatcacatttggccgacactttctgacgaggaatggatcaaagtggaattggcattgaaggacatgatcctgaatgactatggcaagaagaacaacgtgaatgttgcttcactgactcagtccgaagttcgcgacatcattttgggaatggaaatcagtgcaccgtcccaacaacggcaacaaattgccgagattgaaaagcagacaaaagagcagagtcaggtgaccgctacaacgaccaaatcggtcaacaagcatggagatgaaataatttctgcaacgacgagtaactacgaaacaacaacattctcatcacgaacggagtggcgagtgagggccatcaggtgggcagtgttttcctttagctaatgcttttccattttcctttccagttcgacaaacttg

SEQ ID NO: 8955 - DNA, 1132 bp, Heterodera glycines
tcccattacgaaaaagtgcaaatgcttctttccgaccgctttttgggctactttatggttccgtcggcgggtgtttggaattacaatttcatgggtatgtgtcacttttattccaatgatttggtcaaatggttaattgtttttccaggtgttcgacatgatgcaaatatgcagtatgatgtttgtttatcggctccaaaggagttttaccatgaggatcatcgcccacttcatttccacaatttcaatgtgttcgaagatccactcggtgtatccacagccgacagagaggatatatttgagtgaataatcaaagatggatgggattgacaatcagtgtgacaactgtcatatttattttcattctttgcagtttgtaccaccattatttgttttattggtaaatgttagaaattgttcaattgcttttattatttggtaacctccattttcaaataacaaagaatcttatatgaagtgatgaattgtttcaattcaattttggggtttaaataggtagccaaagcctgattctgattctaatttccaattttcgaatacattcctttcttcagtgatgcagccgcagtcaaagcgaaagattcaggtgttttctcctctattttgctttagtatgtgcattttttgcgtttcgtttgtttttaggtttcttttctgatcagaaatgggtcggtcgagtcgaagcatcgcggcttcgtcaacgccctccaatttgacccgacgacgcgcagtctcttttcggccggttcagattcggtcattcgccagtgggacacttcggcgccgtcgggcagcgccgcctttctccgctcattggagcaccactgtgactgggtgaacgacatcgttttgtgcagtgatggcactcgacgtgcggactttgtcgggggggggggggaggggtgggattttatttttttggcgattttcccgtgtttggactttgtttgtgtgggttaaaatgcgattgacaattgagaaacaattgaaattattagcgcttcagtgatctccgcctcttccgacaccatcgtcaaagtgtggcacacgcgcagaaatggcgcgtgtttgtccaccctcaaaacacacaaagtatgccttgccaaccaat

SEQ ID NO: 8956 - DNA, 1958 bp, Heterodera glycines
  unsure (1)..(1958): unsure at all n locations
aaacattagggcaatttcggtgaacagagacggcactntggtaagtgccgtcgaatggctgtttccatcccttttgtttgtggtcagtgtctgtccggcagcagcgatggcactgtcaaattgtggagcatcggccagcagcggtgcattggcaccattcgttgccattcggacagcgtttgggcactgcaaacggactctgtttttgccaccgttttttcgggcggacgcgaccatcgcgtgtttcgaactccgctgcgcaacctcaacgactcggaattgctgttcaccgaagggaaacccgtgcagaaattactgatggtcgacactgaccaacccaaacatttgtggacagcgacttgggactcgtccatcagacggtggccaatcgacggcaaagagacggaacggacggaggaggggccgcgggtcagagaggcggacatgacactgcaaggcgagaaaggggcggccgggaactgtcccatgggggggggggacaataaaaggaagaattttgaaaaaaaggactttttgctaccgtaatgcgcttcattggacgaacaaagtttagtaattaaagcaaatgattagtgatttgcaaagcacaaaagattcaattatttcaaatcttgcatttggtcaagttttattctttaggtgctccaagcatccgaaaatacgctgtactgaacgacaaacggcaaattgtgacgcgggacagtgatgggaacgtcgaactgtgggatgtaatgcaatgcggcagggtgaacaccttcccgatgggcaccaacatggaggaagtgatcaaggacaatgtgcggaaggtgtggatcccgagttggttcggcgtggatgccaagtgcggggtatttgtttttacggcgtattatgcctccatgcccattattcctcttctgcttgtgtgatgttcccttctgtgttcaaggtgttggaaatcactttggacgagagcgacgcgttctccgcttgggtctccgcccgtgacgcgggtttcaccgacaaagccaacgatgccaaaggtcctctttctgtggtccctttgcctttgaaccctttgcattcttcggcagttaattacggcggtctccttttgcgcagtcttttcgagcattggccccacgcgtacgttggcgacgacgaggactcgcccctgcagggcttttactcgttgccgctgcacacgcccattctcatccggtgagagtgtaacgattggcacagttatttgcataattacaccaacacaacgtttcatcagtcaatgcaacgacgacattgcgaggccgctgttccgcaccaccgtccatgacacggcctcccaagcggactcagccatgctgcgcgatgtgctgccttcgtgggtgttgcaggtccaaaataccaacaaaaagtgaaccgaaaagacagttgattaaggtcgtggagctcaaccattttccaaagttcaacaaaattcctttttacctgcagccgcactgttctttcattccaaagttccccgttaaaaagtccgtttatttcgtttccatcttttttggcgttaacataacatgacaattccacgtttccacagagaccgactgagtgccaccgaaatgttgcagttgcgaaaagtgatggagcacgtgtgggagaaaatcctttacccggcggagacggcgaccgacgactgcggtggaggcgcaagcgcagcgcattcgctggcaacacaattgcaggaaaacattgaagaacgtattgagttgttctgcaacgaacaggtggacttcccatgtacaaattgatgggattgtaaatgctttcgtcgcttttcagaagttggactcggagatggacctcaggacggtcaaacatttgatttagaagcagggcggcgatttgcttattttttaccgtcccgagaaggatttatttctattgtaaattgtccataa

SEQ ID NO: 8957 - DNA, 6225 bp, Heterodera glycines
  unsure (1)..(6225): unsure at all n locations
ttatagcaccnggtaagatgcatgctttcattttctgacggagttttattatttttaataatttcttcggcattatctgtactagtattaataaaaaatttgttgtaaattttttttttgacaacttacttaatttatttttcgccaattttttctgtttttctcttacttgtcgtgttaatttaaatttttatatgtttacctttttccttaaatatagcacaaattttactttttagttaaatttttattttttgttttattacttttttctatgctttatagttattagcatctaatttatgagaataattttgtttttaaatcaactcacattctctgtggccccttctcaatattatattgagcagaaactcattttattaatattaacgaaactttaaccttgactcatttatttttttgcataaatccttttgagttaaattattaatatatttaatatctaaaatttattttttcttatcataatttacagttatactttattattttttaaccaaacgacaagtctcatgattgaagagccgcgacgcaatatttcttagaaattttctaaccatattttttgcaacgatttcttaagtatgaaaacattaagctttccaaatttatcaaaaaaaaatataattcatcatttattattaattatacaaaaatttatgtttaatgctgagaatgtcaaagtgtcgcagtgaaattatttaaaataattctcatcagattaaattaagagtttgcttattctcaaacctgaactaatgattaaattaattagatgattcatcctttgcttgaatttatttttctaatcttggacaaaccaagatttgaattgaaatgatattattattattattattattattatttaagttaattttatgtatttttgtgagattttatttatattattttcaaataaaattatttattaatttattcattttattcagattgattactataatttttatttggatattactattgttatgataatagataaaaaatttatgaacaaaaatatttattaatatattttctttttcttgatggtaatgagcagtcttcttgacctgatttatgctcaccagggatgggccgaggtttcgcttttcgcatttcgcctttcgcattatttgcattttttggcgtttcgcatttcgcatttcgctttttggcgcgaaatgcgaaatttccacccctaagaaatgaatatatttgaaaatttaatttttaaaacgaatgcttcattttattattttctgttaacatattacactcaaaattgcataatggaaaaattcttcgaatttctccccacaaacgagaattaaaaaaatttatgggtacatttttgaatataggcaatttttcgtaacaaagtgcactcaaattttcaaattttttttcaaaaaatttcacttgtgaaaattcccggttggtcccagtcccggacgaaaatcgaggtcccggtcctgacttttctggaccggtaagtcccggtcccggtttttgtcaaaattcccggtcccgtgcaactctaataattaccttttttgctaacttgctatagcctaatatgcacgaaaacgagtttttaacttggtttgaagcttttatcttgaactttttggtgcatttttttgccttttttgcgatttatttttttgaaaaaacagaaaatttttgaaaattttgcaacttttcctaccatattttattacaatttccaaaaaaatttccggcggcgcttatcggcaccgccggaccttcattttaccttaatttttgaaattttaaccacaaaatgggtagaatttgtcattttttatctgagaaaaagatcgaaccggaaaatgcagattttttttgcatcacaacctaaaaagctattggtaaaatttttaaaaaaaatttcgcttttcgcatttcgcattttcgcatattttggcttttcgcatttcgcttttttttcatttcgcatttttcagtttcgcaaatttgctttttatttttcaatttggcccatccctgatgctcacctattttcttgacaaagtcctttttgcttttttagtgtaaataatttataagaatatatcttttagttactttttctatttgtaatcttttatcttttaaaattttttaaaactgtccaaaatccccccaaaaataacaaataaatatttgttgaagagaagaaatgaatattttaaatgaaattctggatgtagccaaaatttccaatatactggtatttttaatttgttttttttttgtctagcgagaaaatttaaaatttatttatttctatgttaagttctggcaattcaaagtaaaattttttaagttattccaaactaaaatatttaaataaatattatttcaaatgttatttcttacaaaaatttaaatagtttactaaatggcaacatttactttttcaataaatttattttgaaaatttctaatacttttttttcgttgttataagaatacatctattggttatttttttaaaattttctttttaacttaatttcggacattgatattttccagactctgagtccctgcccttctgagaatgagtctaataaaattttataaatatttaaaattctttaattgttaatcattttgttataaataagtattttattttacctttattgcttaagttttagtatttttttcgtgtgaatttgtttaaacttttcaactgaaaaaaaatttatttcacaatttataattttattcaattctgttataaatgtcaatgaagaggcttcagatttgtgcatcaatatttgttttatttaattcgataagtaataattagggggaggatttttagtggcaaaaaatcccaaaataattaacaaatagtgacaaaaaatgccaaaataatgacaaaattatgataaaaagtccaaaataatgacgaataatgaaataattttcagccaaatattgacaaaaaatattttattcacttgttattgttgcaaatgaggttacactttcttctaatttttcttaggaaatattaacctttttaagtccgaaattttacaattaaataatattaagtttttttttcttatttttggtaattaattattttttaatctaaagtggcagtgatgcgtcttttaagtagagttgctcggtaatcggtaattgttaaaaaaccggtaccggtactgaccggtaatgcaaaaaccggtaccggtaccggtaccaactttttccaccggtaccggtaccggtaccggtaaaaaccggtaattttccaacgtaaaaatttttggacaaaatttttcaaatacaaaatttttattcagttttcgcgcgagtgcctgttttttagcattagaattgttcagaagtatatgtatattgagggtgaccaagtttttttttcaaattcaggataaagaacactaaaattcagatgtagacctcaaaattcagattattgcaaaacaaggggtcagcagccaattttccaattttgcgaaggggtctccggccatgtaaattaatgtaaatcaatgaccttttttgctttcaacaccgcttttttcgcggcacgtttttctcaagacttttggggaacaaggaggggccggcggtgccgataggcgccgccgggaaaaattttgtattttttaatgcgatttgttaagagaatttgtaaaaaaagaacaattgattaatttttgggtttttaggatgcttaaaatgaaagaaaaaaagttggaatattttttttaattaaaatttcaattaaaataatggtaaagaaaatatgaagaatattctatccaagtggggaattgaacccaagcgagaaataataaaatcagaaggtttagcaacttgaccacttatgcatatgaacaaatgctttaaatgaaaataaataatttaatttttttttcaaaaatttctccttcttcaccattccctactcttttctcacccagacccccattcttaccagtgcaaatttttaccggcggtaccggtactagacaaaccggtaccggtactttgatttttgaaaaaaccggtaccggtaccgttaccggtaaaaaccggtaattaccggccagtaccggtaccggtaccggtaccgagcaactctacttttaagttattatgacatatttatgagttttttaaaaaaatatttaaaagtattgccttgataagtctcgttgatagcattctgacgtaagttaatttttttctcttatattaagtaatacttggaattatttttcatgaacatgcttattaatttattaattctgttaaactgaggtttcttctataatcttacgcgaaaacaaagcatcgtatataataactttgattttttcacatatttttgatatatgtactcgcggctcgcaatgttcattcgctcacgcgcgtcgtgattttatatataataattttctttgcgctaatatcttatacatatccttttttgagtattattaaatattaatttaagatttgtttaaaaagtcattagttagactattttatcatttcatttttttcatagttttattatttttcagtattttttctttgtgaattttaaagtttaaaaatatttttttatgttttcttttggtattttgtttttggtgtataataagaaatattttatgatgtcatataaaaacacaatttaaagatatccttcgcactttcaatccaaaaacgaaataaagaaaacttttcttaataactgttatgtccgaagataaaaattataaaagtttatttgccggagaaataaataaaaaaaataattcagagataaattggagaggtcaaattggtgggcaccataaccgtgctgagtctatccacaaaaaaactcagtgtgggcgatccacaaaaaaattcagtgtgggcgatccacaaaaaatctcagtgaataattaaataattaattttaattatatagaacgtgtcactgaattaattataattaaatttattttataccattatatttcaagataaatttaaaaagaacaaataaaaatttgtcatttttgttctaattttttacggtttaatgtacaaaaacttatcttaatatctttttgttgcatttgttcatgaagtttttttaatgttttaatttctttattttgatagcttttgacgagttctatagctccatgattttttataaattcttcaaaaccagaattagtagtaaccgaatactcaaatagagataagaaaaaaataaaaattttattcatttttctaggtcagaataatattataaatatatatttttaaaataaaattcatatgtatattaattttgcagttacaggcatataattctgattaatcatcttgtgaattattgatttcctgaagtcaatgtttgttttataatattaagagttttttaaaatatgatttctttaacatgattttttttattcattaaagaaaaagccagggattgacaacgtcctccaagatcccagaataggtttcgaatttatattacttatttgaaaagatttaataatttttattgattattaagttaatctatatttttttttgtggtcttgtttatgataaaaaggagaggtttatataaacaattgtttatgataaaaaggattggtttatataaacaaaagcaaaagataagaaaattcgatgatacaagtaaattaactattaaatatcggtaatattaaatacaaaatgcatgaaaaaatattaaatatatgaataaatttaaaatttaatcttataatttcaaaattttctggaggtttggaagcagggctgcacgcaagtggatttacaattacggaaatccgcaattgcggcgattttctcagttgcggaaatccgcaatccgcaattacgggtgtccaaaaaccccgcaatttccgtaatttccgtaatccgcaatccgcaattaaaaaaaattttttttttaataattttaaattttattttaaaaaatcctataaatcttttaaagcaatttaaaagcatattaaaaagcaaatttataaaagcaaaatcattcaattgaaaatccggttagaagcaagttatggtgaagaaacaaaagctttgccagattttccgcctgtaaactctttctcaagtcatctgaaatca

SEQ ID NO: 8958 - DNA, 1050 bp, Heterodera glycines
tatatattttttgcaatttttaaaaaaatccaaaggtgagaaccatattttttgcaatttttaaaaaatccaaaggtgtgaaccatattttttacaatttttaaaaaatccaaaggtgagaaccatattttcttacaatttttaaaaataaaaaaagtgaaccaccatttttttgcaataaaataaaaaaatatgaaccattttttaaataaagtgtgaatcatttttaaataaaagttgtgtgatttaaaagaccattaagaaagtaggtatatttctacccctattcagagggaggaggggtggggtaaatgactcaaaaccttttagtggattttttaacataaaccttacggcatttttttataaaattgttttaattacgaatccagaattctctgtcagaggggtggtctaagggtattttcccctttttttcgctgctgataaaaaattaaattaattgttaaaaataatggctgaaatataaagttttcaaaaacctaaatataaacacaccataatttaattttttaaaacccattaaaaaagagtagacagatttctatccctattttggtccttaatcataccgtatttataagatgaggggggtaatcctttcccaaaaaaacctttggtggacctgttactctgtgcctatgagatatttttaacaaaaacaaaaaagtatttgttttttttttatatccgaacataaacaagtaaaataacaaagaaattgaaccgtcaaaaaacttgtcccctcatcattacaatgttttcatccagtagagatactgaacgaccagagtggcgaagatcaggaccaacacgatgaaaattcgttctttccacaaagcacgaagaagttttcgagaatgcggtacgggtgttgttggcggttgctgttcctcaacaatgcgctcaaactacctaaatttacaattaagaaagagtaaaaaaaattgtcctctcaacataccattattactcatttgcgtagatgaaaattgtactttttgtatatattgtttagctttaaatatg

SEQ ID NO: 8959 - DNA, 4651 bp, Heterodera glycines
  unsure (1)..(4651): unsure at all n locations
aagtttacattttcaaatcatttttacngcaaaataataacaaaacgccacgccccattaaaaccatggcggataaaaacattcaaccttttttataaaagatgggcggtgttattattagtgagcgcaatgttaaagttaaagtgtgaaacaataaaaattatgagggagggacaaaattttttaataaatatatcctttaccataaaattaaccaatttttcataaaaatagataaaataagacattaatcaaaatcagaacattcttgataaatcataacagatcaaaaccgttgcatataagtagagaccggatttttatgtgctaaaaatcctgaaatatgtaataaaatatgtgctaaaaaatgctgaaatatgtgctaaaaacccccaaaaatgccaaaatatgtgctaaaatatgtgttaaaaattgaaaaaataagtgtgtttttgcataaaaattcccaaaaatctcattctttatcatttttagcccatacaacgcaaatcaaatacatttcgaagtgtttggggtaaaattgtctttttttgataaatcatttctataaattgaaagttccagcagagaacttcgaaatccaatgacgaattaatgaattcgagatttcattagtttctacaatcgaagaaaaattttttaatttgaaaattatgttaataattaggaaaaaagtcgatttttaggggtgtatttttcaattttcttgtatttttattgcaatttttctcaaaaatgccaaaatatgtgcaaaatatgtgccaaaccccaaaatatgtgctaacatattttatgtgacaaaacgccaaaatatgtgtttttatgtttttataagtcgctctaaatcaaaaattgttcggagataatgctatttttgggcttctctcgccataactaagccgcaaaaaaaatatgtaaaaacataaaaatccggtctctacatataagacattttttacctaagtttttttaacatcgtttaattttattaaaaaaattggctgacttttttttgacattttattaaagttgttttaaatttgaaaaaatgtgattgatcataatttttaagattgaacaaagaatgaggaccagagcaacatacatacacaaatggattaaaaaaatcagatgaaaaagtaattaactatggtttttttaaatattcgtttttataaagtgagattgtatttaaccttgggttttaacaatttgctaattgttgtaatgaataaatcaacaatggtttatcaatgttctgtaattagttggtcaccggaggagaagcataatttgtaaatgccttcgtcctaatttggcctcagcgcacttttcaaagggcgcctttttgatgtggggaaacaacactcaaaaagggacgaagttttgtccaatgctttgctgggcactttttcgttgacaattcgaacattgggccccgaatgggcgcattcgcaacgcgacaaaaagggagagaaacggcgacggaaggcaaattcaaagggacggcagcagacaaacgctaaattagcaacttaatgaaccgaaacaaagcaattaactgaggctagcagatgttaaatgacttttttgaataaaaaggtgttacattccccgttcaaaaaaaagaaacgaaacgaaacgacggcctatgaccccccgccccgccggtgagtacgagatacgccgcaacccccagttcaatacccctaattattggattggcttttcgtgttttttttgccccctagattaaaatgccggccaattccccgccccctccccaatgttcttttctcacctgtacccattccgtgtgcactgctcgcatcgctcgcacttttctccttccttcaattcggccttctcaaaaagtcggagtgccgtgcccttttcttccaaaggacaaatcacttccacacaaaccgaatgatcagattcaactgcttcaaggcaaacaacagttaaatgagaacaaaacttagaagagaagaaacggtagtcaaatagagaggaaaggaagaggtacggtatttgtgagacattctaaaaaaggacggacaaatgacaatgaatgagtattaattattaagtaagggcttcttcttgagttgacgatgacgtaaataagcagaacaattagtcttaattaatacaaaataaaaataagtgaaaaataaaaaatttaaattaattttgacggttaaatcggaaaacaaaataaatcttaggaaagaggaaaaggggaagcgattttgagggaaacggatgcttagggataagtgggcaaaaacaataaacagtgatgagaacagaagaaaaataaacaaagggaggcgaaagtggcgaagacaaaaaatgacttatgaagcgattggagaagtgaaaacaaaaagagaagagaaagtgatcagagacaaaaccaaaccaaactgatcagaaaggaaataaagagtgaacagaaggaaaggatgaccagaagagagagagagaaattaaaccaaattaaattgatcagaatagaaagaaggactgatcagaagggaaggatgatagaaaatagtcgggaaaataattgaaaaaacaattctattttaaaaatagttcatgaaaataaaacttaattttggtcatttaaatgattattaaatattttatttattacattttaatggaattttttaggaagaaaaggtcaaacatagaaggcattaaaatcgtaaaaaaaacacaaaaaaatttaaccatacaaaatttatttaaaatttaacaaaaaattaaaataaaataaaagtttgtcattacagtagtcatggatagaaaaacattcctacgaattttactttgatttaaaaacaagtttttattgaagaaataagtaaagagaatgcgcagatgcaggcaagtgaccaataggaagatttaattggaagttgtgataatgagtattgtgcgcggttaccgtggaggggggaggggattgccgccgaaaggccatttaagatattgtaaacttttcattaatattgtgccgccaaagagaaaatgacactccgcgaatttgtgaatgataaataacaacacattcttttcttcaatattttattttaaatttgttttgaatcaaacaagaatttatatgggcgggcgtgaattcataacatcaattacgatactattttaatagcaaattgttaaacactcttatcatttcttagaatttatttattaatttaaatattatatttaatataaaaatatttttatatataattaaatagaaataattttttatattagagaaaatgttctcctcattaacaaagcttactacttcggatgaggcaattattaacgaatttcttgcgttcgacaatataagtactaattaattttagaaattatttcttatacaaataatatttaaaaaattttttttaattttatcaatttttttgtcaaaaaaatgcaattttactttcttaaccaattttttatcgttgcttttcccgccatttttcatgcttattaggtgtatatttgaaacattttgtttcaaaaaatcctaagcctttgataaaaaattaatttgtttcttaaaaatataaaaattatacaagtgaaaaaattatttaaaaagttattttttattctgaagataatttttaaatgtgcaaatttagggtccacaggtgacaattcttcaggctatgtcaatgacccgcagctgagcacctcaacagttgaaaatatttttgaagtatttttatcaaaattaatataaattaaaatcaatctttttattaaaataattaaaaattaaaaattcactatgcccaaattggtctgataaattttaaaaattttatttaaataacttcttaattaattttttgttatttatattttaaaacaaaaaaaatcagattttttcccatttttagaatgctaatacctcggctgcttctccgatcgtttttgctgaactgcaaaacatatcttttcaatcaaatttaaatttatttcaatcagaacaaattcaggttcatccacaacatttcgagaattgtacccagacggaaacgaatgaagcttcagacatttttgaagtggagatgattctgaagatgagaacaaacaatggattaaaggaatttttagtaaaaaaaattaaaaataatatatatttataaatgtaattaaataaaaatttttttattaaaacaagtatataaataatttaacatctaaatattataaagaataataataaattattttgaaaactatttagttttaatgtttttttttaaagaaaccttaaaattatatatttttttcttacaaatcatattataaaattaaattttaaactatgttttaaagatccgatggaagcactttgattcctcttctgacagctgggagccgcttgccaacctacatggatgtgctgatgtattgatgaacttttttttggatgaggaaaagaaactgattcgaaaaatggtaattataataaaaaaaatactttttttaatgaaattatcatataattagaataaaataattttcaatagtaccgtagtgataattcaaaaatttcacaaaanttaatttttgaaattgg

SEQ ID NO: 8960 - DNA, 2949 bp, Heterodera glycines
  unsure (1)..(2949): unsure at all n locations
tgaaatgaggtgtacaaagacgagcagaatncggttagcttttaacaacacgaaacgtcaaaagaaagcaatgcaaccgccagttataaatggcttttctcgtaaacggagtcggccggaagatgttcaactttgatctgcttttaaccggcacccctgttgagggcaattggcatcaggctgaactatagtagcgatttctaagcattcgtactgagcaagggtttaaagcggatacttagtatggttgtgcgaaatcgatttgtaaaaaacccggtaccgggtactgaatggtaatgcaaaaaccggtaacggtacctgtaccggtaaaaccggtaattttccaacgctaaaaattttggacaaaatttttcaaatacaaaattttattcggttttcgcgcgagtgccttttttagcattagaattattcagaagcatatgtatcttccgggtgatcaagttttttttttcaaattcaggataaagaacactaaaattcagagttatgcgctaaaattaaaaaccgcttttttcgtggagcttttttcaaagacttttctgggaataagcggggcggaagccggcggtgccgataggcgccgccggaaaaaattttacattttgagtgagatttgttaacagtaattgtcaaaaaaggacccaatcttttgttaatttttggtttttcgggtgtttaaaaatgaaagaaaaataaagttgatgaaaatcagaaggttaaccacttaccacatatgcatggtcatgattacatgattaaatgaaataatttaatttttttctcaaaaatttcttcttcaccatttaaccgacggttgctcattacgcttcggtacagcggccgtacagagtcagaaggcaaattcccactttattcgacattattatttttaaatagctaaaagagtaaaattaaatgtgaattacctagaacatttgcattttctccggtgacaacagaaaaaagtaaatggcataccggtccatgtttgatattttttagtccatataatttcgaaccctactcattagaaataatggagagtttaacattacattcgttaaaaatttgaacatttttattacaaactctataaacacacctattggctcaaactcacaaaaacttgtcattttttcagcaaaatcggttaacaaatcacaagtaaattatcaatttttcccggctgtgtccttggcaccggcggacttcaaaattctcattaaagattccttacaaaatcacaaaaaaaaattttgttttggaaaaaatctgttaattgtacaattttcaaaaaaattttcctagcgatgcctaacggcaacgccgcccaatccctgctgttcatgaatccagaatccatttagcctattctcaatcccagattcgaattcgaacaaaaagttgcaatttgctggtttttcttgaacaaaagcttattttgaaaactcagctgggagccctgctccccccccccctatctctgctttctctctgactcctcccaattcgcttctctctctcttgctttctctatctctctccctccaactttttcttctctcacttggctctattccagtttacgcgtccaaccagtgaccatcctgtttctcaggtcataacttttttgttatttaggggaaaaatagtattttagggctaaacattttcaatctttcttattgaccccttccaatacctacctcacccaaatttttccaaaatattgttgaattttatgaaaacccagagaattatctattttcccgacaaacacacaaattaacgatttttgacgaatatctgcttaatatggccaaaattctcttttttggaaaaagcactgcagaagcgcgaagaataatgaatttcgcgtcctcattgcaattttctattcatgcaagtatttgctcttttcttgtatttaaaattccctaaactaagctttctttttataccaatgtatggattaaccacgtgagaaatttatggcctaagaaactgaggatagtcactgattggacgcgaaactggaattgacactttccattctcacttttcctttctctctgttttgacttaattatgattttcaagctcaattaaacttaagagtccctatagctagcttttcatagacccactaaacagtaaacgaaaattaagaaaaaaacaattatagccaaatgttctttattaatctattcaaccaaaattatttacggtcactttaaaacaatatacatgaaatacagatcattttaattacattttttgatcatctgactcattcttcccttttgagctattcctccacaatccttttgttgcatgttgggcagcgaactgttgtggcaatgtgacggaagaagcaccggcggtggagcacatgtccgcacgagatttttttctcagtctttttcgtccgcccttctcacactttgcgcacttcggacgggcctgtgccttaacaaccttaaaatagaacaacaaattaggctattgggatgcgcttccatttttgtttacgttgccagcacgtccgacggcggctctgcttttctttgccgccaactttgcgttcttaacgcgtcgcgcattagccgccgcagccatctgttttgccgttgccataatttacaaaacgaattatatgcttaatattaatagcttttaattaaaaatggaacacagaaaatcaacaacattaaaattcaggacgtaatagctcgtttggattggagtattattatgtataataatgctgtttttgtctatttttttttatcttatatactcatttgagattggtgcattacgacatttgtctatagaatcttccaccaaaaaaaaagctttataagggtgaaattctacangtatttgctcattattctgtaatgttcggtttttataccttcattt

SEQ ID NO: 8961 - DNA, 4282 bp, Heterodera glycines
atcattcatttttgtggagcgggacaaaatgtcgcctctcctaagatcgctggacgattttttggaccgaccataacttttttctttctcagccaaattgaacattcttggtaatgttcgaaagcatttgataaactctattaatctgcaatttaattttttttttattcatttataaaaaaactcaaaaattttcgaaaaactgttttttgagttattcttgtcataactactgtattttaaaacttgacgaatttttttgagatttgataaaataataacaaacacatagagctatcaaaaaatatccagagtgcttaatctggttaacaaaaaaaaagagataatccaaataatcttccggcgacttttttggggttcaccgtcattttctgataatggaattgactatttcgaagaaacatactacacggagttggaatatggaaatttgaaatatggctgatatattgtattgatattccttaattaacggaattttcatttttaaatcgccatttttgatttaaaataaatccaaaaagggagacgggggatgatcatccatccaagcatttaaaaagcatcatcatcatcaggtggtgctgttgatggagggaggacattggcgccggcgggagggcacccacaataattcgttgcattttgagggcaggggcacatacggcacagattagtgccatggcccattgccgatggaggaggattgagtgatgatagccccgaggatgggttgtgggattgaaagtgagtggatgcagagatgaggagaagaagaccttcgagaatttaattgcagttttcattcgccctgaggggacggaccgacggacggggaaaatggcattttgccgggcaatgagttcagcggtggggggcggatgggacagataatccaccattccccgggggtgatagcaatgaaaaccaatttgtggcacattaccgtatgaatttaatgggtgccgattggttagcacagcgcttcgggacacgccccttttgccttgggggcatggaaaacttcaaaatgccttccttttaagtgcaccctttcaccattggcactggttgagatgcttaaagccataatttagtggtgccaaggacgaggtgtgtgctggtggatttcaggaaattttagagtttccccctagggcatccttttcccgggagtttcaagaaaatttgagagcttcacctagggcatcctttttccggtggcttcaaaaaaattcgagagcttcccctcgggcatccttttcccgaagatttccggaaaatttagacctggggcatacttttctctgtggtttcaagaaaattcaagccctctctttagccagaaaataaagaaaaattcaaagatttccggaaaatttgaaaatttccccgtggaaatcacaggcaaaaaagaggtcaaaaaatccattaaaacattcaaaaaaaaaaatttcctccgtcatatccttgagggattttcaacaggaaatacattttggaattttccttcatttgtcagagaagcaccgaaaaatttgcaaaattttgaaaaatttctaaaggaaaaaattaaaaaaccctcgagaaaatctcgaacattaacaaggtttcttgcctatggctttgttagagatgggttgtggccagcagctgcagccgccgcttggccccgccgacggggagggcgccgccgaagaagaagccgccgccggcacaggcggcgtggccacgacaagcgcaacaatggcactgttcggcttctaccatcccccagcgacagcaccgcaacaattaacgactaccgtaccaccaccaacagcactacaacacaatgccaaccagcaccagcatcactacggtaggggaggggagagggggtacggtaaggggaactcttgtaatatgaaaaagcttggcatggctcaactcttttgtccgaatattccaacggggttaacgccagggctgttgctaatcggaaaataaaacgcgaaaaaaaactaaaataaatacgaaatgctataattaaacgcccaaaaaaaacacgaaaatattaaacgcgaaacaagcaattttttactgaaaaattctaaaatttataaatcatctcgaaaaaaatttgaaaattttgatgcaatttgttaacagattttgtccataaaatgagcaaattttgcaattttaagccaatttttaaataatttaggaatttttgggtccgatagtgccgcgatttttggcttaattgttaaacgattttcacctatgcaaattttattgtttttaaatggtaataaaattacaaataaataatttttacatttaaaaaatatttacaaaattaaaagagattaaattaattattttttaaaataaaatttgtttcggattatttttttcaaattttcgtaattttattgctaccgtttccgcacagcatcccatgactaccttatgtcctcctcgtcctcatcttccccatttgtgccactaccgtatccctttgccatttgcgacgcacaccatcaacagcagcagcagccgcactcatctgcggcacaccaccatcaccatcagcagaatcaagtgctgcttgatgatgatggtgccgttgtgcaccagccattgttcggtggcggcggtgccgtgacaagcgccgcaaacggcgcttgttgctactatcacaaccattctcgtggtgtgtatcagggatggcatggaattttgatttccgaaaactgggccggaattccgattccccaaaaaattattgggcctcggaattccgatttccaaattttagcacctcagaattaaaatcgagactctcgggggttgcctcgcccctggttttcttgatcagtcgaggcgatctccgatcactatcccagtgatcaattgggccctccccaataattctaatcagtttattaccatttttgctgattttaatgccgaaattgcattagaaatcgttccaggtccattttggcacgctttcacatgattaattagtctgattaattaatattaacgatactactcacatgtttatgtcacaatgccgaaaaggtgcggccgtttcgtcgtcctatccggcacggccgctcaaatgtgatgggacgacggcaacacacaacaatttcgcgcagttcagtgcctattccgctggcgtgccatcttcgtcctcttcaatgactgagtggcgcgggccagacttgtacttgcgcgtcggtgccacaattgaagttggcgcaaccgctccagtaaatgtattatgggttgggtttatcggctcccggacaatctgtcaatggacaatccgtcagaaactgccaacccaaaaactttttgagcctcggatttaccgatttttaaaaaattttggggcttcggaatgccatctctggcaaatattaacgcgttctttgttgataagaataattattaatgcttaattaatccgttcattgtctcactagtatacaattaaactactgcttattgcttaattagccggcctttttcagggaggctgttggtacggcactgggccgacttcggcactttcgcaccatcaccaaaaccattccggccatcattaccataatcaccaacaccaacaccagcagcaacaggcgttcaacaacggcacggtgacagccagctttttgttggcaccaacaaatcagcatcacaatgctcatcaacatcatcagcaacaacaatcgtcctatcatcaccaccaccaccaccaccagatccaaaatcatcacaacggcaacaataataataatcattttgttgccgccgccgcgagggttgtgccattgtcggcggcggcggtagacgactacgacgaggacagtgatcagcaacagtgccctgctgctggcggcgggatgatgaccattgcattgcagcagcaacatcagcaagtgtgtggtggtggtcattagagatctgggccccgccgagtacggcattttggacacggggtgcccgcaggagtcctaaaaaacggcacttttcgcccgttcccggcccaaatatagtcgcgtcccgttcatttgaaaattccgttatttttaacagttatcaggagattgaatgttggacgttaatccgattttgcttacgggcgggcaaaattaagggcaaattacccacacgagtacagtagagcaaggcaccgtaatccgctcggttcgccacagtagtacttaagcttacacaacatttaaatgatgcacaaaaa

SEQ ID NO: 8962 - DNA, 1365 bp, Heterodera glycines
tttcaaaagaataaaaaatatatattatcaaatatttataaatccatttcacatttttttaatacaaaaaaaaaaatcattaaaattcattaaagaaaagaaatttttgtgcataattaaaaaaagtggcacgcccccccccccccccccccccccctcaaaaaattcactggatttttgtcgggaattctcttaaagccctaatttcatgcgacaaaagatttttaggtcaattctgggacacaatattttcttatttgttaaccaaaattgtttatcccaatcaaaacttctattatcagtgctcgaaagtatgttttttagctccacgctgaccaaacatttgcgcacacacaccgggcagaagccgtacgcatgcgcactttgtctaatgcaattttcgcaggttaaccccactgtgtacagtgtaaatattgtggaattaaaaaaatgtacagggaattttcaggaaattttcaagagtaaatttaaaatgcatatttttaaattttgtttagtcaggcaatttgcatcggcatatgaaaacgcatgagcaaaggcgagaagccagaatcaattaatgaatgttaatgttatattgttatataattagctaattacagtgttcataaaatatttgattaagaaaattactgtacaaataataaatgcgctttttcttaagcagaacgatatattttaaactcactgaaattaacttacttatttatgtataaaagtcgtagagacatggtttttaagtagagatcggatacggacgggatccgtatacggatttttacggatccgtagtccgtaatccgtattttttcggccaatacggattttttacggactacggatttttaatccgtaatccgtatgggtgcctagtccgtaatcccgatcctgatccgtacaattcttgatacggattagggattttttttttggcctttttaaagtgaaaatggattatatttttaaaattttgtgcggtcaatttcgcccaatactttggaaattggcgggttcttatttcgttaaatattttggccgaaaaatcgaaaaaaattggaaaaaaagcgaaaaattttttgcgaaaaaactcgaaaatccttacgttattgaattgcatttagttgaacctttacgaaattctatttcgatttttttccaatttgtaaatttttcaagaaaatgaatttcgtttttctattttcttaaattttttacgaacttggttttgtaaatttttcaaaaattattagattattttttatgaattatttgtcgacgaaatttcgatgaaaatggttgaaaaatcgcgaaatttgctcattttttggtgaaaagtctgttatc

SEQ ID NO: 8963 - DNA, 1607 bp, Heterodera glycines
atatggtcccaaattaggtcacctgtcaatcaaaaccgttctattggttctctttttcgtaatatccctattgatttcgcaatcgtcacgtgactttttggtacttatttcgcaatccgcccactttggcgcgagcttttttggcgcgagcttttttggcgcggccattttggcgcgtccattttggcgcgtccattttggcgcgtccattttggcgcggccattttggcgcggccattttggcgcggccattttggcgcggccattttggcgcacgctataaagtgttttttggcgccaatggtcaaaaatctcaaaaaattttcagttcttgcacattgataaatcatttattataaaaaataatacacgaaaaaatgaaaataacaaatcacggatccataacacagttatttgaaattcccctcagaaattcaataatttttgggcatcaaaattttcaataatattcaaaattcgcttgtccgccttctggaacttctttttcttctttggtggttcttcgccattttcttgtcccacgacatcgttcagcgcagtaattgcagcagtcaaatgctgaattggcacaaatgcgagcgcggtgatcatacgagcagtttctgcgaaagcggggtcacttcgatagcgctaaatgggatggaatttctttcttttaaaaacagaagggaggtttgtgttctccgattaatatgcacattcagccaaacaaatgtgagaattgcccctcccccttacaccgtcccccgtccaccatttgttgttgccattttctgctcctcattttgagcttcgtcgttggcggtggaatggagaagtgggaggaggagcgggggactgttcgggggcgttctgccccctccggtgatgtgctgttgtgatggtgccaatgctgtactgatggtgaactgatgatgaaggcgcacaaatgcagtgaaaaaaggtacaaaaaaatcgtgggggaaatgtgatgactgggttggggttaggaggtgagaaaacggttggctgacttgaatttgaataaaggtcgtggttggggggagagattaggaaacggataaaaaattcttagccacccccccatgtatgataccgtaaatgagattctgcgtaagatgcatctgccgaagacatcgtacgcatggatgataccgtaatgcgctttgcgtacgatcaataaactcaatttattaattggcaaaggtccacttggcaattgtccaacccctccccaacatttggcaactgcccaatagcccccttggtaattttgtattttcaattgccgacactaccatgccccccccccaaatctttcgaaaaaatcgataactaaattggcaaatgtccaattgccgcattaccgccccccccatccttgggaaaaaccgatattttaatttggcaaatgtccaatgtttagccccatttagcgcacgcgttctccccgggtcaatgcgtccccggttacgggaaccggtacgcacggacgcgcccgcccgcccaagcatacgcgtcactgttagcagcgttcgcgtcgacgggacgtaccccccccccccccacacatacacatacacacc

SEQ ID NO: 8964 - DNA, 3017 bp, Heterodera glycines
ccaccccgtccaccatttgttgttggtattttctgctcctcattttgagcgtcgtcgttggcggtggaatggagaagtgagagggggaggtgggtggggggattgttcggcaccgttctgccccctccggggatgtgttgttgcggtggtgccaattgctgtactgctgctgattgatgatgaagacgcacaaatgcagtggaaaaaggtacaaaaaaatcgtggggaaaatgggatgacggggttggggtgaggagatgagaaaacggttggctgacttgaatttgaataaaggtcgtggctggaaggagagattaggaaacggataagaaattcttagacacccccgccccctcaaccccgttctgttccatctttcaccccctctgatcattcattcattttccttcaatttttgtgcactttattaataaatgttcaattatttatttcccacattttaagcagttcacttcaacgcaatttgttcatcaacagcaaaaagtgtgtcgacaacaaatatggacaacaacagtaacaatggtggtggtggcaacaacggcgggcgaaaaccgcccccctcccggggtcggaagaggctgcacgagagcagcagcaacaatagcggcagcagcagcagcaacagcgccaacaattttgtggacggcgacagctcttcaaccgtgcgcgcatcaaaccgtcctcagcaaccgcagcagcagcagcaacacaactataacgacttggagctgctgctgatccccggcattgacgacgtgaacagttcggcactgcaaccgcagcagactcagatggttcaacgaccaattgcgacgggcaatggacgtcaaatggtggtgagttcaaattggggggactcgttaaaataaaagccattttggcacgctgttaaatatattttttgtattttctaaaatttttggcaaaaaatttaaataattttcggaaaacaaattaatttgtttttttaaaacatttggtttaaggcggtcaattcggcgtcccatggcacgcctgtggaaggaactttgcaaaatgtggacggcggcggtggcggtggtggtgtcttgtctcagcgtaatgtaagccgggagtgggggcgggtgtgtgtgagggataagtaatgggatctctctagccaaaaaaaaattgataaacgggtgaccacaaatattttttttatagagaattgaagcaccaaatgtcccctccctatttgagtgcaaaaaaatggtgtgcccatgtggagtttgaacaatgtacgtttttttggggggatgtcaaagggtagcagggcttttactagcatttcgggtgggccttcatttttgtcattgtaaaccgggcccaaattcgaacaatatatgttatttgatggattttatttatttttttgtagtctgctgtcaattttgccgctctgatgacggccggcgggggtgacggttcatgtgcagcccgtcccggtggtggaacgctttcggtggtgcgcggtactgttggaggcggacttgaggtggtgtttttaaatttttttgtgtcaatgtggagggggggggcaataccaaattttaaaattaaacatttttcttttaaagtcgctcccgcccagtgtgcgtgaggcggttgcaaataataatttttcccattttttttttgaaaaaaacatttttgatttaaaaaaataataatttttccccatttttaagtgttcaatccgccgtcagcaaaaacagcacagcctggtcatgcaaatcgacgacgatgatgagggcgaggagcagcaggacgaacaaagccgcgggagtggcggtagcgacgatggaccggcagcgaattttgcattgtcatctgcgggcactgatgcgccgcgaaccgagaccggcgcttcgtcaacggtgagccgcaagtgaacaaaaagaaagaaaagaaagacaaaaagaaaaagcaaagaaagaaaaaacgcgctcgcataccatcattatacgcacacacacactcacacaaacacatacaatttgttctttgtttttaaaaatacaattgttgtttattcttctgttgtgttgttgtttttgggttgtttaatagtgggggacgggggaattgagtatctgcgggcgtgttttttgcggaaagtcatgcattttcggtacaaaaatttaaaaaaatgattccaaattttttagccatggctttccgcaacgcgcccgcccactccacctccgccacgaatggatcatcggcggcggccaacgggtggtgcgcccgtcatgtggacatttcctccacgcctgctgttttgagcgtgaggcgaaattggggcgagtgtgccccatttgttcagcccattttataagtgggaagaatgactcgctagggtcaaattttcggtggaggacgccattgaccgctcaaaataattaattaaaaaataaaaaacattttaattttttcttcatttcgcatttttgctttttttgttcaacatttctcattcattccattctttttatcatatttttatgttgttgccaatttttatatatttttctgccatttttaattaaacttattcatttttatatttcaaaattcagtaaatttattcatttttccttgtgtgtgtgtatgtgttttgatgtgattagggggggggttgcttacagaaaatgagaagcgctagggctttgggggagagaaatggtgccatttcattggaagggctttcacaaaaagggaaaatagggacatgcgcaaaaatgactttttgcatttatagtgtaatgcctggcgtcaaattgggcgaggtcggccctcgttcaccaatcagtctgatcacgacagcagcagcaccaatcgctccgaccatcagcagcacgtcagcggagcgccgccgatgcgcgacagcagagatccggcggtgtcaaatttgggcagcagcagcaagcagtgtaagtgccgccgagagtgccaacgttgcgccgagcgatgac

SEQ ID NO: 8965 - DNA, 1570 bp, Heterodera glycines
  unsure (1)..(1570): unsure at all n locations
acatatttttgaagattttgggggaaaaaattttacactcaaaaatcctatgctcaccccttttgtcccgaatcnccaaaatcacttttatttttataacttttttcaaaaaagtgataaaaatgccaaataaaatttatataatagagcaaaaaattgcggattttatcaatatttttttataccttagcactttgtttggagtgagttatgaattttctagtgaaaaatagaaaatttccagaatttctggaataactttttttgtttttgtggtataaatttcaaataaatctcataaaattctcccgaatttttgctattttttatgctttaaatgagctgaattggaccattttgaggcgagttatgaattttcaaagaatcacttaaattcccaaatccaaaaaattgacgatttttcaaaatttttttacctccctccaaaaaatccaaaacgcaatataaagtgcatattcgtgttcagcacctcaaattaccccagaaaagtattttttggcaattttaggagcaaaaaaatttctcacgaaatgcaaatccatggggtcccccctttggttttgcatttaaaaattcatttttgttttataactttttttatattacagataaaaagatcaaataaagcacattagatagagctcgaaattctctacaaaaaagctctgggacgatttttcgctaaaatcaacccctgacgagttataagcccgggactgaaatgtcccggtcaggccaaaaaatttttctatttccggaaaattttgaaattttttcaaaaatgccaccaatcgatagagctcgaaaaacggttgcttgaaagtggtctccgttttcctgggaaaaatcggcaaaaaataataaaattcaaaaacgaaaaattttcgagggggcctagctcgaaaaattttgaaaattttcaaaatctgaaaacgccatcggatgcagctttaaaaactacacaaatgctcaagcggcgccaacccgctccgcttaacccccagcgagttattcccgaaaaacggaaaatgccgaaattgggtgccaaattttgccattttctgcagcattggcatttacagatagaacccccaaaccaacggcattcagtgccaaacagtccaacttaaaatcctacctccaagcattttccgctcccgcttcttcccgcaaagttacaggccaccaaagacggacaaaaaaaatttcacgccgtttcagcgccgccggcgctgaaccgtccaccggagcggaaaacccatatttttcccagatgcgcctcaaaaagttgtaagacccttccactactttcagggcgctcccggccttcggccgggagattttgtttttgaagacgaactgcaacgtttctctatagtaatataaactagcgtgttgcacagtgggggatgttgtgggcagtatactttggtatttaggaaggagacgctgacatgagcgcttcgcgcaaaggacttcgttgctagtgcatgcgcggcttccataatcgatgcgtgtattgaacattggcatggcacccccacccttc

SEQ ID NO: 8966 - DNA, 1182 bp, Heterodera glycines
aattttgacgatttttcaaaaaattttaaacactctccaaaaagtctgaaactaaaaataaagtatataatcaagttaagcaccttaaattaggccataaaaatgcattttggctaatttaggagcaaaaaaatttttcatgaaatgcaaaaccatggggtcccccctatggttttgagtttcaaaatcacaattaattttataactttttttaaactcatggtaaaaacatgagataaagcacattagattgggctttaaattctctacaaaaaagctcttagacgatttttttataaaatcaactcctgacgagttattgagccagaactgaaattgaggcctagcaaccaaaattttctatttccaaaaaaattttgaaaattttttctgaaaatgacaccaatcgatagagcatcaaaaacggttgcttgaaagtggtctccgttttccccggaaaaatctgtaaaaaatactaaaattcaaaaacctcaaaagtgatgagggggcctagctcgaaaatttctgaaaatttcagaaaactaaaaacatggttggatagagctcgtcgagctgtacaataagtacgctggcgccgcacagctcagcgcaatgcccagcgagttattcccgaaaaacacaaaaaccggaaaattggaaaaaaatttttacaattttttgcaggccagggctttggtgctaggggctaggtcaagaagaaaaaaatttcccaaacattccaacttagtcgcctcccagcagaagttttttgctccaggttcccagaaaaaagttatggccccaaaactgcatgcatttttcctcaaaaagccgtttcagcgccgctggcgctgaactggcccccagatcaaaaagtctatagttttcccagatgcgccgtcaaaagttggttaagcaatgtcacacttaaaacccaccctcggcgcccgttcccgagattttggttttagcaacgaaacacgatttgattttatagtatataaactagcgtgttgcacagtgggggatgttgtgggcagtatgctttttgtatgtatggacgggcgctgacatgagcgcttcgcgcaaaggacttcgttgctagtgcatgcgcggcttccataatcgatgcgtgtaccacaacatgcgtggctccccacccttacccccacgcttcccccc

SEQ ID NO: 8967 - DNA, 2497 bp, Heterodera glycines
taaaatccagcaaaatttggatttagataaaccaataaaggcatatgtggggggtgccttggatcattctgcattcaaataattttctcgattttaaattcgccccaattgaaaaaatttaaattaaaaacgaattctaccgttcagtattaggtattgaaaatattttgagccaatgagataaagattaagcaacaagcttattgattgggattaattcatttaaaaaagaaactcacgcggtggcgggatgaagaacagcgaaggttaagcccatggtggttaactgctgttgttcaatttttttttcatataatataatttccaatttatcgtttgcttctcccccctccccccccacacgcctctccctcacgccttccccgccccacgcccgacctcaagacgggcgcttcgcgcccgttttttaattttgttgaggacattgggccgcttcgcggcctcaggacgggcgcttcgcgcccgtttttaattttgtgggaagcattcggccgcttcgcggcctcaagacgcgcgcttcgcgcccgtcttttaattttgttgagaacaatcggccgcttcgcggcctcaggacgggcgcttcgcgcccgttttttaattttgttgagaatttctttaaattaatttttttcatattttattagaagaggtacaatgtgaattttaaaatttaaaacaattattgataaaaaaatgtaaattaaaaatttatttattattaaatattaaatcaaaactattttaataaattaaaaacatctaaaaataagtaaaaaaatacttagaaaaataatgtgttaccgcccggattcgaacttgccccccgccccctcaaaatgatgcctcagaatccccaatcacacagggattctgaggtcttatcgatgtcaaaagtaaaatctgatcacgtattcgtgatcagcgtcataaaatacccctaaagacatgtttttggaagatttttggtgaaaaaatttttcaactcaaaaatcctatactcccctttggtcccgaatgccaaaatcacttttatttttgtatctttattttaaaagatgataaaaaggtcaaataaaatttatataatagagcaaaaacttgcggttttttgtattattttactcttctctaatgacttttcagaaccgagatataaatttttttctgaaaaatagaaaatttccagaatttctggaataactttttttgtttttgtggtataaatttcaaataaatctcataaaattctcccgattttttgctattttttatgctttaaatgagctgaattggaccattttgaggcgagttatgaatttttaaaatttaggttgaattttcaagggccaaaaattattgaattttcaaaatttttttaccaccctctgaaaaatccaaaacgcaatagaaagtgcatattcgtgttcagcacctcaaaataccccaaaaaaatattttttttgcaattttaggagcaaaaaaatttctcaagaaatgcaaatccatggggtcccccctatggttttgagtttcaaaatcacaattaattttataactttttttaaactcatggtaaaaacatgagataaagcacattagatagagcttaaaattctctacaaaaatgctctaagacaaatttccgctaagatcaacgcctgacgagttataagcctcaaacggaaatggggagctcaattccggaaaatttttctatttccggaaaattttgaaattttttcaaaaatgccaccaatcgatagagctcgaaaaacggttgcttgaaagtggtctccgttttcctgggaaaaatcggcaaaaaataataaaattcaaaaacgaaaaattttcgagggggcctagctcgaaaaattttgaaaattttcaaaatctgaaaacgccatcggatgcagctttaaaaactacacaaatgctcaagcggcgccaacccgctccgcttaacccccagcgagtcccgaaaaacggaaaatgccgaaattgggtgccaaattttgccattttctgcagcattggcatttacagatagccccgccaaataagcgccaagttttcccaaacagtccaacttaaaatcctacctccaagcattttccgctcccgcttcttcccgcaaagttacaggcctccaaagacggacaaaaaaaatttcacgccgtttcagcgccgccggcgctgaaccgtccaccggagacttttctctatggtaatataaactagggtgcccagttggctatggtgtgcatgcgtggcttggtaatatattgctctcatttgttattttaaaacatacaaaacattaattgcattagtgtgctgttttaaagcgctatcgcgctatgggacgcggcttcgccgcgtcgctagaaattgatgtaatttagcaattcatcgcagcctcaggacgggcgcttcgcgcccgtttttaatttttcgggggacattcggccgcttcgcg

SEQ ID NO: 8968 - DNA, 5094 bp, Heterodera glycines
  unsure (1)..(5094): unsure at all n locations
atggcagaaccataaacagaaaaatttcgggaggggcatccccctagctttttttttttttgctattcgcgtcaatttctcctacttaattttaaatttgtcgacgccggagagcaaaaaaaaaaagcaggaatttgtggccgctttttgcccaaaaaaagacggctccctatcatttcgtcactgttcagttcgtcaccgagaaaacttttttaaaagtttgtctggcagattgaaacaaaatctgtcgtacatatgtataaagttcgaaaagaaatggatacagcacaaaaattgcaattattggagcaaaaaatttttttaaagttacctatgtatatcttctacaaaattggtttatacccaaaatccatcgtaagaccattcgcaaaacattcataaaagataaaaggtcgtcgtaaatatcagccctgactccccgccccctcccccctcggccactcgtacgttctacggggaacctgctggccgaccccttatacacttgtgatcataatcagggtccgaactgaaaaaatcagcatttgaccgacaaaaaacagatatgacccctttaaatcagcaaaatgctgataaatcagcagagttgggagccctctgatcataatgaattatggcataaaaattttttttagaaataagttcatttggaagttaaaattaaaaatgaaaagctaaaattaatgtcttttatttcagagaagatatccctttcaaatctcacattcaaggcaatttaaaacttttatcaaattcctttcttacttttttgctagcacttttgtttattaaagaatttttttgtttttttaagcaatgtgccaaacttttaaaaaaaaatttctcagtgacgaactgaacagtgacggaacgatcagtgacgaaatgatcggccaccaaaagaatattttttacaatttttggggttaaaattaaaaaattgataaaaatggggtccggtagtgccgacagtcgccgcctaaatttcaaaattgattttttccttatgagttaatatgtttttgattttaaattgtgtaagaagctttacaaaaaagttgcttttttggggggtattgttctcaattctcattaaaaaaccatttgctgataaatgtcgcttacaaattagtaaaattctgattttcattattctagcagattttggtatcgattatgagtatttaaaaaggtatttatgtgtgaatttctaaaggttgaagatcggcagttttttccaaaagatttgttatgtaattctgataaatctaccaaaaaatatttgtttttgtgccaattaaaaaaggcctgtatctcttacttatgttaatttttacaaatttaactacatatttgaaattgtgtaaacaaaaattatttcatttccccgcagtgacctcctccgtcctgacaatggaagaactgctcgccgtcttccaattccattgccacccgaatctccgcggtgcgcccggacagtacccaatggcatttccgtgccatggacgcatttctgatcagaaagaaggcacactttcgatgcaaattgagaaattgtcggaatttgcgcgagaggaagtgaacagcaggcgattaagcaaacacttttacacaaagggattgccatggaaaatattagccaaaataaaaaccaaagaaaatagtactgagaaatggctgggcttttaccttttgtgcaccgctccaaaacaaggtggagagataaataaatttaacaatttcttattcaattaagatggaaattggagctgcaaatggagctgcaaatgttcggcaacccttcgaattgcctctcaagacagcgtaacggaggatttgataagaaaatatgaccatgtatttaacaacgaagtggacaagtggggtttctcaaatttcattgcttttacggtgagtggcagcaaaacttcatttagtggcttaataaataggatgaggattctaagaattttacttattttttctgcggctttaactcaacaagaatacacgaaaaacattttatttcgacaattttgcgttttagcgcccttatttgaccttagaaatccttattttgggtgttagccattaaaataagttctgcccttaaaaatcctcgccctattaataaacagtaaaaattaagcaattgatggatccgagcaaaggattttacgacaaaaatgaggacaaagtgacgctggcgattgatttaactgttgaagaagaaaaaggcgaattggctgatgaataagcgctcaccaatcactcattttcaattgataatgatcgtttggaaatattatgcaataaaatagaagcaatacttacaattagcctattttattcatatcatttttaattttataaaatttggtccttttcgccgccataattaaaaatctcgaaaaattttgaaattatgttaaaaaacccgctagtctaaattttcgttttctttttttgaattttttgcaaatttaaatgatttattttaaattgtgaaataagtatagttttgttccaaattaaactcaaancttaaaatttttcacataaaaaaaatacaaaacnanaaataaataccaaaattanaaatacacctttaaaaaattnanatccctaantnttcctctattancctncaaaattttnaaaaatttnnnttaannttcaaaaaaattatnnctnttcnaacaaatanttttttnaattttatttatttncnctcttacnaaaacnactccnacccctccatttnatntcattttctnttttnaaaaccaanctntatcatnaaaaancatntaanaattnccccnatanattattcnaannttnnnaatttcatnnnctttntttnnnttnnanttaatcgagtggcgggaaaggtcagtgattatttaaattaattgaacacattaattaattatgacaaaaaaggaaacagcagccaccagcagttgaattgccaacgattaaattggatatacatatttatatgttgtttaaaacaaactatttcaacagctttctaacccatagaaatctttaatttttccattgaattgtttaagaaacgaaggcaaaaaaaataaagaaagtataaaagaatttttggccaaaaagcagccatcaacatttttaaattgcgtataaatctcgcaaaaatgaacaaattgtttataaattagagtccggaggaactctcgactcaaattttaatttagaaaataaaaaatccacaataaataaccaagtttgtcaggttttttgtaaaaataagtacagagttaaatcatagaatagaaatttctgcctggataaatatttttgggtggaagagacgcacctgataatcttgtacaaaattctctatctgttgcacattttgatattatttttttattatatataaaatggagattaaattattattttttgggtcatcgttttgccgttaattattattttatgccctcgccaccccatcataaatataagtgaaccatgccatctttcttcatttaactcttctgcaattacttttttgttcaataagttcccttttaaatatatatttgttaaagaattgttatttaaaaaagagaattcacaatttggcaatttgtgattttagtccctcaaaataacccggcaattcaaatgttattttggcttgttccaatttcataattcgaatattatttttactggggtttgttgctcatcagtaaaataaattcattttaaaggtttgttacaaattttgaacatgggggaaagtttattttctgatgatctgatgggcttcaatctcgatttccattttcaaatttccacaaaaaatgaactaaaccggaattttaaataatttatctcatttagtttccaattattttattgcataaaatagataaattacgaatttcacaattgtttataatgtcacaatcagtggtttatcggatgaagcatttgttgagcacgggagaagacgcggatgtttattttttggtgggggacggagacggaaaagaggcgagtcttcttcaaatttgaaatttttttattattttttaaattaattttagtgaattgtcctttttttgtttgatttttacttaaattttaatcctcttcagcttttgtcagcacatagactgattttgaagcacacttctgaagtatttgcggcaatgttccgttttgatgctaaaaatgaaaaagcggaattcggtaaaaaatattaataattataataaaattaaataattaattggtaaaattgcaatgtttctggatccaggcctaagaacaacgggaaaatggtcacataaatcaataataaaaaaaatcaatcagattctactaattatattaattagttttcaattaaccttgctcattgccataattatttctcaattagcctctgctaattgccccgtggaggtcactgatgttgaagtggcagcgttcaaagtgatgttgagcttcatttatacaggcgatttggccaaattgaacggatacaatgcaatggcagtgctttacgccggtggattatttttttatttgatttattaattatttttttaattagccaaaaagtacaacatccctggcttggtcgacgcatctttgcaagttccaatttcatcattgcgaaatgttttcttggcttatgcccaggccggtcttttcgaattggaggtgggaagaacaaattgaaaaaggccgaaagaatcaaaaatttattggtgtttaaccggctgggccagttactttatataactattttttattttcacatttcgaatttagaattttgccaatgattgtttggcttacattgacagaaatgcggatgatttgttcaaatctgatgcatttttgcaaattgaccaaaaattgttgtgtgaaattttgggacatgacgaattgcaatcgatggagaaattttcatttggaaagcagtaattttagaaaacagaaattaataaatattaatgaatccttttatttattttcattatttttttttttttttgcactccgttgggctga

SEQ ID NO: 8969 - DNA, 1522 bp, Heterodera glycines
gaataatgattttatgataaagcaaagacaaagtgacatgcccatgatgtcataatgatgagaaccaaagtcgaaaattcactttgatcaacgcaaatcgactgggacaatttcgatggaaattgaaaaagtgtcggaattttctcgagaaatctttttgagtgaacgtaaaagcaaaactgtgcacatcaacggattgccatggaaaatatggacaaaaatagaaaagaaaaatgaaagcactggcaatgagaaatgctttggcttttacctttggtgtgatgctccaaaagaaggtgcaattaaatataaattaacataaatgattaatttgaattgagcagaaaattggagttgcaaatgttcggcaatttttcgaattgtctctcaaaagagcgatgtggcggatttcagaagagtattcgatgcccatgtttttgacagtaaaaagaacagctggggatattgtttcatttcgtttgcggtgagttcaattagctattttcttaatcgatccaattatggacaattaaggaattgatggatccgagcaaagtattgtacaacaaagaagaggacaaagtgacattggccattgatgttacagtgaaagaagcaaaaacggaggacaaataaatgataatcaatttgcaattttttgatttaaacatccttaattgacttattatttttcgtgttaacttttccaactgttgtattcctttactgttccaaaaatgtaaaactattaattaattttcggtttgagtgtgtgtccaaattgaaatttgtttaacttaacggaaacttttgaaaatttgcaggctaatagaataaacttgacttataaaatctggtgccaaaattaggtacttggcgataatttgaaaaggaatagaaaagaatgcggttggaattcctattactgttgagcagaaaaagagatagccaattttccaaatttttcccaaacaaacgcgcagagaaacaaattccagaacaattagtatcggcgtaattattctgagaatgcggttggaattcctattactgttgagcagaaaatgagatagccaattttccaaatttttcccaaacaaccgcaccgagaaacaaaatcctagaacaattagtatcggcgtaattattatgagaattcggttggaattcgtattactgtagagcagaaaaagagataggcaattttccaaatttttagctagcaaacgcgcagagaaacaaattccagaacagattagtatcggctgtaattattatgagtaatgcggttggaattcgtgttgccggtgagcagaaaatgagatagccaattttgcaaacttttcgcaatcaagcgcgcagagaaacaaattccagaacaattagtatcggcgtaattattctgaggaatgcggttggaattcctattactgttgagcagaaaatgagataatcacattttccaaatttttcccaatcaaacgcgcagagaaacacattccagacacaattagtatcggcg

SEQ ID NO: 8970 - DNA, 6057 bp, Heterodera glycines
atccaattcaatgtccggaaacattgatttctaaaacattgaaataaaatcttttggtgtaaaattttgacttacaatttcgtcgagattgtccttaacaagagccattctaaaggaaaaattaatacgaaaaacgaaaacctaaaacgtgtatagagtaactttttttaatttttaaactgcctacaaacgaaattcgaaaaactttaattttcgattttctgttcgaattcgggtccaggacccggagttggtcgaaatgagtgctggatttcgtgatcagccccgaaaatcctcgtaaacatattttcatgacttttgaaaacaaaaaaaaaatttcgaaaaaagggagggatcaccatcgatagaattttacccaaaacaatgttaatttctaaagctcattgtgtcaattaatttctaaagctcaaattgtgtcataaatggatatgataagcaatctaaaagttttagacaaaaacttctgaatgatttcctaaatacaaaatttatgagattttaatttaaatctcaaaagatcgggaaaataacgccaaatttaaaaaaaaattgggagaattcagtttggtcgaccaaaaaaagtggctcaaaatgcaaaatttagttaggtatataaaattcttttttactgatttttttagatgtcaagacctttgcctaacgtaacacagactgcaaatattttgcgtagtaatgcgccatcgccgcataatcaacagcaggttaaaaagagactcaaaatttgagttgccataatggatttattaaggctctctatcaacaacagcaaatgttaccccacccgcaacagcaggttaaatagattttggaaaaagttcttatattaattgcttaaaaattttaactatttttaaatttagaatgatataattattataaatcattttgaaacttgaaacagtcattagtcacttgcaacagcgaatgctattatgtattattatccaggaaatccaatttttgggtgcctacccttgacatgagtctttcaaattaatctggatttagatttggatttcctgggaaaaattgttttaacaaagctcgtaaactgttcttaaaaataattaaaataggcatcgatgcatataatccgtcatttgctatcagttacaccctccgccacggctcaattcgcaaccgccgtacacaattgtctaccaaaatcaacaacgcacggctcaaccgacagtttttggtaccaaaaaattgttgttttccaattttccaacctttcccttttgttggcactgccaattcgccgctccaatcgcagtccatcagttcgtcatgcgcctcttcaccccaattgtccatgaccagcagcagcggtggcggcgccggcgatggaggcacggcagcgccggtggcatcggcaaatccgcacgacccaaagcgggtgagaaaagggcaatggtagggaattgccacaagccaaatttaatgaacacattcactgaagagaaccgataaaagcctttgttgcaataaaaaaaatggcatttgatatttttaaaattaaaattgacaacatttttaatatagtgcagtattttcagttgcttctcaaatgtgcgcacttcttcaaatcgctgtcacgttttaaaccaaactcttctcaggaacaacaccaacaagtgctgcaactgttgagagtgagataatttagccttaacactgaagttattgaatcgagaaataatttgaaatattttaatttgattacttttgtcaggagggcgtcacaagtgaaatgagtgcagaggaattcagtgccaaactgcgcgaagtcactggctcacaggtgacccaaaaaatacggcaaaatttttgtgcaaactcttttctatttaatttcgttgttaaattgatcatatgaaaatcccagcaaaaatttgattaatttaaatttgttttatgatgccatttgatagagaaatgtttgctgatcattttaaaataagtttaattactctacctttattttaattttttttatgaacttttaaaaattttgtcatttttatcgatttttcggaactttgatcaaatttttctgatcatttttggcgccggagccaaaaaagccgaaaattggcaatagtaaatcgactatgctctacacgataaaagtggtttaaaagtgatttgaacacatacagttcgtaatgttcccttgtaaatgtacaataaacaactttttcgcttcattccatttatttgctctgtttaaggacaaaggcactctgttgccctttttgaaattgtcacttccgttgctgcgcgtctcccttcgcaaaggcgaacagaatgaattacagcaaatgcttcgtttggacggtgccggaagcgcctcgcccgaagaaactgcggttaatctgatgacagaacatttgagtggggtgggagacgaaaggcgttactttcaagaacaaggcaacaaaatgccactgatttttaatttacgatagttttcttagattatgattcaatcaaaagaaaatcatttttattcttgacataatttttaattttttggcagttgctttctccgcaacaacaacaactgtcagacaacggcgtcgatgaggcggtcacggcacagcgacaacttcaagtgtcgcgcagtgtgccgccgccatcgcttcagcaacagcaaattcaaccggcacaaattgtcaacgtggtccgtccgctttctgtacaaagtaatttttaaaaagaaactacgaatcagtaaaaatttttttactcctttagattctctcaacgcgctgtacccggcgacgaccgcttcgaccactttcgttgtcgagcgaaagccgccaacaccacagcagcaaccattgcagaaacagacgcccattgcttccgcctcaccggcacaacaagttcaagcagtagcgcaacagccgcaacaactgcaaacgaatcggcccccttctacgagttcatcaatggcaacaacaaatgtgcatgagagcagcggtattatgtttattcagatattagttaataaattaaattcattaagccaaaatcatcgcaaatttttaaaatttttagcatcaacgacaacattagcccaagcgcaaatggcacccgaaagtttgcaggtgggcacttaattttttgaaaaacagggactttttccccttcgttgcgaacccccctatttaatgtattgtaggaaaaaactaaaaatattacactaaagataaaagtatttaattcctaagccaaaaaacggtcatttgcatgaaatttttggaaaagcacactctgtttaggtagattcttataaattattatagattactattttcattcaatattagaatttgccaccgatgttgctgaatccacaagcactcgccgatcgcattttggcacatatgccggacgcgcaaggcgttgatgccgaagtgctttccatcatttcaatggtattttcatgatttatcgaatccattttgcccccccccccctcttaattttttcaggctgctgaggctcgtctgcgcaatgttttggctcaattggcctcgttggccgatcatcgtcaacggccgttgcgcatcgacccgaactatgcattggtggacgaaccgcgaaaacaaatgcgtttcatggaggacattgagaggagggctcacgaaagtcgcgagacggcagaaaaagaggcgatgatgcgaacggcgaaaagcaaagggggcaaagacagagacgtggtggagaaagcgaaaatggtgggacattgggcaggcggaaattgacccaaattaccaaataaatagaatattttatgaaattttaaaagcccaattcatcacagaatggctcggtgtattattgctaaagtcagcattggttcgagtcctcctccccgtgcttgtaatagcgaattgaatgcaagaacgctagagtcaccagaagaagcctcaaaatgagttaacttttggtgctaaagtagttcgtaaataaatgttccgttataacacctcttggcacattgttggatgattgctgggaaaataactatggcaaacaattttcattttaaacatttttgttaatttttactttttttatttattgcaaaagtttatctttgtcattccatcagattcaaaaggctgaccgtgaagcgatggtcaaccacgaggccaatttggccgcttttgctgcgcttggcgttaacaaaactggcataccggcgaagcgacagttcggagcgcccaatgggccgggcggcggcgcggattggaaaaacggaatgcaaaatcagggaacatctggaggccttgttaaagtgaacgtttttagtcttttcctagagaacaaataaactttttagaatcgtccaccgttggtgcgcctaaaacgcgtcacaatgcgcgacttgcaatattttctgtgcaacgatccgttggtgcccaacagctcgcggctgcgctaccgaattgcgctttcgacgcttagtgttgaagagaacaatccgacaaatatttaaatctgctttgtttaacaacgattatcaaacggaatttattagatcaaatgaacattttttgtttttattaccaatttattatttgcaatgagcttttgattaaaaatgactttattaacaaagtgaattatggggttctcaactggtatttaaatgatgccatttttattataatttaacacacattggcattttctatttttatatacacactaattaattaaaacttgttagcatcctcaccaatggctagcgccctcattttggctgggcttggaattgcagccgctggatttacgggccgatatatgatcaggtaatctgccaccattcactgcatcagttcctcatttttggtgtttattataaattaaggaataagcatctggtgaaacaggcgatgactttgcttcccacttattccatttacgagcgtggcggatttgctgttcgtttgccagaaaagaatatgcaaaaaaccgaaagttttaggcaaaaatgacacggcatgaagcggccaaaattttaggcgtttcgatgaacgcgcggactgaacggatacgcgaagcacacaaaagagtgatggtcgccaaccatccaggcactcaaattggcacagaataatcattctgattaacaaaaacaccattttagatcgcggtggttctccttatatggcagcaaaaatcaatgaagccaaagatttattggagcgataaaataattcgaaatgcagaaatttctttttgataaaaatttgtttaataattagtctctgttattcttatttgttagttttgggtagagttgagcgggaccgggacctggtagcggacaactgagtaccaaggtcccggttttgaccgggaccgggactagtcccggttttcccagccaaaaagtcccggtttttcaacccgattaggtcccggtcccggttttgctcaaaattcccggtcccgctcaactctagttttgggcaataaattatttaataaaatgcgtattttctgtttgttcgtggctcagtggttaatgcgtctgtttttgactttcgtttggattctctccatttgtttgttctgcctatgatgatagtaacacgacggtcttcttagactttgtttcgtgctgaaaatgttgttactgaggcatttcatccaatgtttgggcgaagaaataattttctctgactttgaatttaatttttttttttaatttaagcaacaatttattattccgaattacaaaaatggtattaaacattgatttattccgcgaagaaaagggaggcgatcctgaacaaattcgcaaatctcaagtgggccgtttcgcagatgtttcattagtggacaaagtgatttcggcggactccgaatggcgaaaaggtaaaaaaactcgtgggttttatttgtttgcttttattgaatgtcatcttttcttaaaaatcgcttttcagagcgtttctttttggacggtttgaatcgtgcgataaaagtgtg

SEQ ID NO: 8971 - DNA, 1432 bp, Heterodera glycines
tgttgaaagattattctcgaaagtggtcgttttcccccccggcgcccggcaacaattactcgaaaaaatggcacccaccccccttagttagtcttttgtccgccaagaaatttcagacttttctgaaatcggaaacttgacttttgtcagtcccccaatggttggtattctttgaaaatgcgaatgtgtcggtacatttaacgaaccgaaagtgacgaagagaatgtagggagatgccttccatagaaatgccaccaattcgtcccacgcgctttttcgtgccgcggccatttcggcaccatttgcgcccggcggcgcattttcggtcaaacgctgcaaattttgtgagcattcaatacatctttgatcaaaacaatgtttacattggaaatgaaccccgtcccaaagtgttccttccattcacccattaaaatattgcgtttaattaatttaaaaaagacacttcaaaaatgtccgccgttttctccaattcgccgtccttcgcttccgcacattggcggagacccggcaaacgttggaggatcacatcgatcacttcgcgtacatttttggcatctttctgtgcacaaatttataaattcgttagaaaattcggcttttgccatttgcgtttttctgtgccgacaattacttttaaaaaatgttttaaatagccttagggtggggagggggtataaattagaaatggccaattaaatttggtaattaaatcaatttaattaataaattaatggatttccccgtttctcaaaagaatgccaaaccaggccagcaaaattgttggattgttttccctcggtgtgcgtaatgagcaacacttcgtcctccgtcgtcggcattgcgcaattgaaaaatgggcaaaagccatgcttgctgacatgggcagaaagacacgggccatggccaatgtgttggcactttgccaacttggccaagcccgccgcaagcgacgtatcacacagcggacagatgcaagcggacatttcaaaattattagccgatgttactgaattgagaccaaaacattaaaaaatcttcggcgagggcgacggattatgccaataatcagaggttcgcagaagaaaattttcaaaagcttcgtttggcaggccaaacataatgccaatttatcaaaattcaaaagattctgacgaattttccccaaaaaccacaataagcctcaaaatttctcaaaaaaccacaaaaagcctcgaagcctcatttggagaatttagcctcattgacctatcaaaaaaccacaaaatgaggctaaagcctcagatctgcgaaccctgccaataatttactcagattatgtaggtattttgatttgatgagaaagtactttcggtcccatatgatcttctgctgctgcgcaatttgatattgattctgtgacttcgcttttctt

SEQ ID NO: 8972 - DNA, 4254 bp, Heterodera glycines
  unsure (1)..(4254): unsure at all n locations
tttagtagttttttaatttcaatgattttagtctattttttttaatgaaaatatttttcaatttttttccacgggttttcattttttgaaaatttcaattttcattttatgtttgtatgttttaccgccttctcccccattaattagcacgtcattagcaagtgatcagatttcagaggaggatagctttgatgaaatcctccacaaacaccgggcctttcgtcatcatggccttgccgaagtcggcgtcaagctgcttgaaattgttcggcttcggcttcttcttcttcttggccacctttgtcttgtccaagcgttcatacacttttagcttggccaagcgttcgtgcaattcacaacattctgtctttccccccccccaatcatgccagtaaataaaaatattcgtgtttcgtgtcagaatacgaaacacgaacacaaaatgccctaaaacacgaaaatacgaaacacgaaacgatcaacatctctgtggggacaacttactctgacgaattgtcgaataatggacaaaattaaattttaataatctcatcgttttaaaaattagctgttcataatttcaaaaaagatgccgaggtgcgcgagcgaaggtcggagcgaagcgtagcgacttgccaaaaggttagagacagccgatagcaatgcttgaacgaaaccgcctattttctattattttaaaaacataattttggattaaagttttctcatgccatttttctgtgtttcaaattttcaattatttctggtttttgagcctcaaaacaccattagaattcattttcgagttctaattcgaaattcatccgtgtctgaattgccgaaattgtaaaaatgtcagaatttttgcaaatttagcgattttaatttgctgctgactccccttgccacctgtcttctccttctccttatgcttacgtcaggcttctttcgtttcaaaatgccaataatattaattatcaattttccatttcgcattctctcggcgattctttccatccaaaaataatatttattcattcatttacaatttcctatcataatgaatctatttctgcgcctattaatttttagtcaaattttgaaatttaatttttcgaaaggggcaaaggtggagaaactccgaattcgcgttgaatgcaaaagtgagaactcaaatcgggaagtcagaattgatttgcgcgtgatttacgggatcaatggcaaagtgtctggaaaaacacaaatgaacataaattgtgccgaggaatttggcatttatttgaacaaaaaagttgacaaagacagattcaagttcaattttgacatttttacgaaaccatttgacaacgaaattgtgccgtcgaatgaaagcagcgaaaatccccaaacagagggagaagaacagcaaattgtggacgacatcctccgctaagcgatacacagagtcgtcaaagtcgagctgttcaggccgaacttctcgcggctgtacgtggtcaatttgggcagtgccgaccccccggggcggctcaattggaaccgaagggtttttgtagaagcggaaaacgatacgggcaattaccacgcttttgtgtatgctgctgtggacaaaaatgagcgaattctcctgggatttgcgccatttgtgaaaattgagaatggcaatgagtcaaacgcaccgcaggcaaaaaaaacaaaaaaaaacggatgaaaaaaaattataaaataaaataaatttcagttctccgaatatcaattatcccttcctgtgaatttgaatcccttctttaaacgcaatatttggtttctttccatggacatttaccagtttgaggaggtatggcaaaagaaaataaaatgtgtaaatttttaattgaattaatcagaaatattatttagacaatttattcgatcgagacaaaaaatgagtcaaaatcaccgatatcaaatagtggtaattattagagaaccggaaatttaagtttacgggtcccgctgcatgattgggactcaaaattttagcgggaggtatcccgtagtctcgcattaaaatgtgcgagaacccgcggggtttgcgggatttttggaatttcgaaaaattaagataaatttaagaaaaactcaaaaaactaaatcaaattgcggatcccgctgcgggattggactaaaatttttgcgggaagggttcccttgggattaatcccgcaaaatcccgtgcggtttcttataagttcaatgaaggtgatggtactgatgatgtaactgcaagctgttcaatttgtttggaggaattaacgaacggccaacaaattattaaattacacgcagaaaaaggcgaaaattacttggttaatttggcattgaatttaaaattcatttcaaatcattttagcatttatttcacgaaaattgtatcaaaaattggtgaggaacgaaacagaaaaatgttttattacaaggcacatttaggtttaaacaggtccaatttccgatatgtccgttgtgcaaacaaacggccaaatatgaaacggtaaagaaaacaagccaaaccattcataatagcacattttaaaatgtaaaatttcagagttattaaatggcaatttatttctaaatttaagtccggcacattcccaccgatttttgagagttctgccgaaacattttcaaattttcatatgaattcaattggagaattatttcgaattgggagagaagatgaaaatgagtttttaaggacacaagcaaaacatcagattcaagcaatcgttgaccagttaaataattcggcaaaaaattacaaaaattttctgagcaacacaaatttgaaacatttggtgccctttttggaacaaaagttttttgaaattggaaccgatggatttgtggagacagaaattgtcagacaaattcgaaatttgttggaaaattttattaatgaacagcagcagaagggtggaaaggaggacattgcaattgcacgatatttgttaaaattggcttcagcctcaaaaattgccccaaaattcgcnaggcgaataacgcaattgaaaagctgaaaattataagggaagagcaatgaaaacgaaagaaagaacaaatgagcattttttgttgttaatttttaagtttctgttgagaaagaaaattttcaacaatttcattttccatattttatgataaattaaattcattcaagcgaatgattaatttaaaaatggaaaaatatttaaaaatttatttaattaaaaatggtagataaatttagggttgggcccgggcagacgacacctttgtcgggggcaaaattttcataaagtcggaaaaaaataaaagaaaaagttccagaacaaaaaagtcttaaaaactcatttaaggacatttacatcttatttgaagtgcaattgacgactttcataaaaccccgacatttcgggagcccaacccgagataaattcataatgaaacttcaataatacaatataattggattttactttttacatttatttcgaattagaattccctttgtttattttgtttaaatatttttttccttttgacattaaaccttctttaaacatctttactaagcattctccgtcatccaattgatcagcgaacctaaaattcggaataatcctcccttattgtgcccccccccattttaccgccaaaaagcgtcagcaaagcgatgccaataattgccgtgacagccacgccctcagcgtggcccccactgttgtccttcttcttattgcctcctccgttatcacccggctgtcggggcaacgatttgtttgcatagtgcagttcgatgctcttcatgttgcactgctcggggacgcagggttcgcatttgccaacgaacggtgccaaacacgacggcatcaccgaacattggccgctgctgtccgacgcgcacgaattcaccacgtaatggtcggcatgagtttcaactaacaaataaaacttcaattcccttattaatgcattaaatggcaatgtttttagagctgtcatcaatttattttctaagatttcgtcttttggggggacggaaatcatcgaaaataaaaatgcattagttagacttttgctttttccagcagcgtttcttggcactgaatttataaacgaattgcctaaaccccaaagaatgtccgtccgtccattcatcgctattattttaattaggtattattttttaaaatttatttttccattttcgcttgccatcgaaacaacggtaagtgt

SEQ ID NO: 8973 - DNA, 2934 bp, Heterodera glycines
aaaaaatatataccagtcacttgaatttatgtaaaaaataatctacatgatacacaatatgaagaataacaaaaaagcgaattctaaaaataaaaccacaacaatcaaatagcaaaatatggtcgtaagtgatggatgagtaataaatataattaatgccaccaatccccggggcattgccgcttttttcgcccctttcattgcgcaccattctccgcttcttccccgccgctgcgcttctgctgctctccctccctctcctcttcgtccgtcgttttgccttcgttttcgatttcgctaccggcgatcaaacggacagtgagctgatcgaacaaacttcccttgcacctaagggcacaaacaattcaaaattaaatgacgacatttgggctcagtcagcacaatcatttaggatcacaacttttttatagccaaagaaattttccgaagtcttttatatcactttgatcagatcactctctcaagatgacctggacatcctaaaatacactggaaatcgggaaaattcccaaaaactaggttttttttttggaaaatttccctgagtgtatttggggtatccagatcaccatgaataaatgctttgatcaagtagagttgtgtaattttttatcagtgtccaaagttatgttatagctggaatatttcagattcttcgtccgcaaaagttttcggaaattagacaaaaaaaaaaaaaatcagaattccgcgtctaaatgaaaaaaatattcccttttgctttttgtttttgtaaaatttccactttgaatttttcccccggttttacccgcatttggagcaccgccttcgctgcgctttccctccccccggcccttctccgtcgtcgttcttcaatttgagcacatagccccgctcgatgagttggaaacggcgcgacaaattcaacttcaaaacggtattaatttagaaattaaattttgaaaaaaattcggtacttctaggttttgtcaccctcccacttgaattttttttccaataattttttctaggctaatttttaattctgatcactagggatgggatttttaagcgcgaaaaagtccaaaataaggccttaaataagtacgaaaaaatcgcgaaataagtgcgaaaataagctcgaaaaaattccaaatttaggggtataattttttaaattgatatgaaaataatttcaaattaaggcaaacaattttattcattgattacagttgcaaataattaaatatattcgaaatttttgaatacacttttctagaattaataaaatttgaaaaaccaaaacttggttaaaaaaaaattacaaaaatttcggccgagataaaaacaaaatttagtggaaattttttgaaaatttttaaccaagttgccaagaaatgtgatcgcgtcaaaaaatttttttattgtatttttgttaaaaaatttgtgaattttcatgaaaaatttaaaatcgcgaaataagaacgaaaataagcataaaacgctaaaacaagtgcaaaacttattttaagggcgaacatccaaaataagcaaaacacgttatggctaaaaataaaggtcagattcgtgatcaaaattagcctagaaaaaatattagaaaaaaaatttcaggggatgacaaaacctagaagtaccaaaaattcttttaaatttagttttcccaaaaaatatttaggaataatttcatgttaaactaaatttgtttactgggaggaggcgaattgcctgctccttcattaactacaccaccttcttttcctccaggaaccgttttgccgacaaatccgcgtcaacgccgtacgatgggtggcactgctgcagccactggaaagcagaaaattcaaatagataaacagctgattcaaggggcccgttaattggagagtccaggtaaacaaattagtgaaatataaggggtaaaaattaaagctgggcgaaaaacccgggctttcaataaatgccctccgccacctccatgccgtcgatgggcgaaatggtaaaggaacaatgccgacggcgacagtctaaacagaagcagcaccgtcgcccattgttgtggcggtcgcatgcttcggtgccgttttcgtcattgatttggtgccaaagtttttgtgggccatcgaccggcgccgccgactttgccgattgttgagacaaaagctccatcaaatttgtactgttgtgcctttgcataaaaaatgttcaaaaagaatcgagtaaaatggaaaaataaatatttgaaagcaattaactgtccataaaaataacataattaaattaattattttaggaggaatgaaatcgaaaggaaaaatgaagtgaacaaaatggacaggaaagaattacaagaaaaacaaatattttggctcatctgagactgatcgacagaataaaataaaaaagacagtgcaattatatcacggaaaagaaatgataggtaattagaattagtgatcattaggcttggtgtgaactaaaaacattttcaggtaattaagggacggtgaacaaaatgcttttgtcattttgtgccataaacgaaaatttaaggtgttttggcacaaaatacaacttttgttggacattgaaacgaaaaatgggttaattagggaagaaaaaagttggaaaatgattgatgctactgctttttctgctgatctgattagagtgtggtcgatcatcagccaagtccgttgtcttcaaacaatccttgcgttgtctcctcctgaaaattgagccaatcattaaaaaggttcaaaaatttagccttaatattttttaaagaattaaattggaaaacttaataaaatccataacaaaagtaagaaatgagaatcgtgagacaaaatgctaatcgatgcaatttaatttgagaacgatagagtcaactggaccacacattccttcactgtt

SEQ ID NO: 8974 - DNA, 3225 bp, Heterodera glycines
aatggatgagagcattcctttttccatcttttcacatttgtccatccaatccccaattccttggcaattatttcgtcaataatttttggatttgcttcttttattttaaaatattgcttcatctttttcagtttgtccgcattggtatattgctcttaaataaaaattagatttaactttactaaaattatattctactttgacttttatggtattttggtgccaattcttttttccactttcgaaatgtgtcttcagaaatgcccaattccttcgcaaattctttctgtttgccttggccatataattctttaaattcatcaaatctttcaatgaattctctctttttctcatcatataattgtttttttattttgtttttatttaaatttaattcatttttccatttttgtattaattgcagatttgctcctaataattttgcaatttttctctcaattttgccttggtctttccttttgtattttcctttttgcttcagcttttctttaattgcttcaaatttcaaaattatttgtcttttttgttgatcatttgggtccgttccattttctccaccaatttgatcaatgcccgtagtttcattttgctccttttggtcgttttgttcaatttttattatcacaatttcttcactttcatttttgtcccatctttggccaaatatttcttcaaaatttggttggattttgccggatttaattacaaaaataaagaaaaatataataaataataaatgccacaaattcatttttacttttggaaattgaatttattgcattaaatgaatttatttaatgttttattcgcattaaatgttattacgcaattatttttcttttcaacaatattttaaaaattaatatgtgattcacgacgtaattcatacataatatggaaatcaattttttactcaaattttttaagaaataattattgcaaaaaataataatttataaaataatttattttatggaaaaaataaattaaaaggaaagtgtagcaatttactcaaaatgatttattttttttgggcacataattcaaaaaaaataattaattgaccataattggcttcatatccaacaaattttgtaaattgcttttttaattaattaaacaaataaaattaaaattttcctttaatttcaaaatattgcttcatctttttttaatttgtcataatttgaaggtttaattagcgctgaaaataataaataattttaaaaagttagaaattcgcttacttttattgtatttaggcaacaattcttttttccattttatcaatgtcagaaatgcccaattccttcacaaattctttctgtttgccttttccatagaattctttaaattcatcaaatcgttcaatgaattcactctttttcatctcataaaattccttttttattttatttttatttaaattcaattcatttttccatttttgtattaattgccgatttgttcctaataattttgcaattttcctctcaattttgctttgatcttttcttttgtatttacctttttcacgtaatttttctttaattgcatcaaattttttgacaatttctctcttttgctgatcatttatattctgatcacttttaaaaaggttctgtccgtgtaatttctcgtttgatcatttgggtcatttcccatttcttcacccatttgatcaactgctgattgtgagttctcatttcgttcatttagttcaatttttatcactttttcttctcttcttttttgtcccatccatcgccaaatatttcttcaaaattcggacggattttgccggattcaatacaaaaatattaaaaaatataataaataccacaaattcatttttacatataatgcaaaatatttagaataattactttcatcgaatattgcccatttttttctaatgttactggtattaataaaaatcgttaaatgtactgatttttctgatatgttctgatgaataggcgaacaatttcagcaaacaaatttaaaaatattattaatttaatgataataaattaaaaatacattttaaatatatttaaaaatatattttttaaattctactttgaaacacactgcttggggaataataggctaacattggcttttttccaggattttcatttttatagtgaatgagtggcgagtgtaatttgtaatgtaatgcaatgtttttgccgcccgcaggcggggcaaatgaccgctaattagattatttcacaacaccgcccccctcccgcacgcaccgccgaatcgcatcaatccgtcaccgcctccccccccccccccagaaaatatccatctctatcccaccccaaaaaatcccaattgtatgccacaaatctcacactttaaacaccacaaaatccgtcaccagcgttcgttctttggtccccaactgtttaaatattttttgagtgcctaatgtttaaattgttttcgttttaaatttttttaatgtttttaaaaaatgtccattttttctattggttttcattttttttgtgttcgattttccaaacaaaatctttttttttcaattttctcttttgtaatctttggtcccaattttccggaacttccaaattttccatctcctctcatccttcttctgcacaaaatcatcctacaaaaatgaattcatccatcccatcccatccctttcatccccaccggaccaacccccgaggggcccacttgacgagaagacaataattggggggggggaaggggggaagtggatgatgacacaaaatcgcacaaaattcattttccattttttgtttgtttgattttccgcacaatgtaagaagacttaaaaatagaaaagctttttcttctctaatggatcaatgtttctttcattttttagaaagtgaaatttttaagttatcgtatttcggttttttgaatttttatttaaagaatttgtcattaaacgttttcttaagctaatttaattagcatattagcttgtcattaaatattttcttaagctaatttaattagcataattagcatattttcattaaattttaatgtaattatctaataaatttttaattccttctttcttccaatgttaaatatgtgtgtacttttttcttctttttcattcatttttaaatatgaatattttaaaagtttcaaaaataattgttacaattaaacggttttatattttaa

SEQ ID NO: 8975 - DNA, 1142 bp, Heterodera glycines
  unsure (1)..(1142): unsure at all n locations
tttttttaaaaaaataatttttttttaaataattaaacatcaattatcttcaancaaatccaacaaataattacatccaacaacaattttttattatatatacatatttttnacatccaacatcttttcttcttttttttttcgtttataaatatatattaatccatataggatggatgacccaaacaaagtttcgcaattctgtgccaatttggggcttgttttcaaggacgcccttggccccccatgggggacgggacaaaatttcgccgccgaaatttcgccgcaaaaaaaaatttaaaaaaaattaaacttagaaattttttaagaaaaaatcttagaattttttataagaaaatttcaaaaaaaaatttagaaaaaattttcagcgatttttatgataaaaattttccccaatttattttttatcttttcctaaataaaattaattaatcaacaaatgaggccgcctttcccgaaaaatgtttaacacacaaattcatttgttttctttggactgtcaaaatagctagagagaatttggccctaattgcattaaatgggttaacattttctttgttccattctattttttcagatgaaattcctttttaaaagaattttaattaattaaatttgtctttatatgattttcttattcgaatttggctcttaattcgtaagaaaatttaattttgttgaatttttttttaaaagatgagcccgaccttagaaaatcttattttcttctaaaaaaattaatatagaaattttttaattttctctttattttctttcgatattttattctggagatttatggaaatttgtgctcgtgatgaagatataacacacaattgagaagagagagagaggaaaagaaacgaaaggattgaggagagaacacagaatttttgttgttttctttcactcattactccccatagcataattgaaatacaatttttatttctaaatttaaaaacacaatttgtttgacgataaccgtggggttaactactactggaatttttggaacggggtcagtccggaatgacccttaaattaaattttgtttaacaaatccaagagtttttttccatagatttgtttacccaaataagaatttttttaattaaaac

SEQ ID NO: 8976 - DNA, 1504 bp, Heterodera glycines
  unsure (1)..(1504): unsure at all n locations
tggtggtcaattcgatgttgagacgggttcgcaaaaatttagggttaaaccccacccttttccacttatttttaaaccagggcttccgtcgaaaaattttcaaaatataaacaccaagcccaaaataagattttagtgtcaaaaatatgaacatttagcaacatttttctatcagttatttttccaatttattcgatcaaattttatatttttagtcttctattatcaattttgatattttggggagatatttaagaaatcagaataattttagtcgctaccccaaaatcagaacattcttataaataataacaaatggaagcccaggtttaaaggccagcttggactcattcttactggcgctaacgaaatcagaagattaaagtgaaaaaggaagatttacgagcatttaaaaagaaaaaatggtttttttgggttaaaataaaatttggtcattccccgatcggggtccccgacccctgacattntgagctcctccccgccccgacccccgacatgtcgccccccgaggtccccggtccccgacattttgccccccgaggggtcggggagcaaccctaattaatataattaagggagccttaaaattttatttggttttcatttgcagaaaaagcacccgaagaccttcaacatttgttcagttcgccaacaaaaaacaattcaccttcaacgaaaacaggcccattaattaatttgttcttgacactgactagcatcaattagtatgtttgattatcaattaactttcggtttttttttgggttgggtcagattcatttatagaaattttctttcattcattctaagcttctttctgactgctgtcgtgtttgatccgcttatgactgacgcctgatggaaaaaactgaaaactcgaaaagctcattccccgcctttcccatagacataaaaatgaaaaaaaatgtctgaagaaatatatttttgtttgggtaattttgtaaaaatcattcttttaaattttctatttcatctaaattcaacgaaatgagtttaattcgtataaacaaataaatcccgattttgtatcaatgttattcaaattaaaaaccataaaaagtcaaattttatttaatttgcattttatttatttctttcatttttatttattatttgcatagaattgtcagcaaagcaactgttattttagtttattttaatttttttaatttgtgtttttgaatttatgtcgtgccatccatcccattttgtataaaataaaataaaaattatctgccatacgaaatatttaatttttgcgaacgtttaagttctattagcataaagcatccatccccccttcatcagcataaggagaagtttgtcatcgcgttaaggaaataaaaaatgatgattaatcatgtancaaacaacgggaaatatgtgcacaaaaattggctcttccttttacggagcgttttttcatttcacaaaacaagagaaataaatgcatatttttatt

SEQ ID NO: 8977 - DNA, 3820 bp, Heterodera glycines
tttcgggtcgctttttgagttcaattaattgactatcattgattaaaactctctctctctcgctctctctctcgctctctctctctctctctctctcttctctcgctcgttctttctctctctcgctcctcgctctctctcttattctgtctctctcattctgtctctctctctctctcttctatctttaaatcgtattcctatttaccacagaatttttgtacttttattttttatttatcccttttcttcttaaaaacaatcgcgataaaaagattaaaattttaaggatgcttgcaccttccgttttaatcattcttttatttggacttagtttttccatcaaagtagaaaagaagaaagagggcataattgtgactggccagtaagttaatgttatttttttacataataaatttagtccaaaaaattatgaaacactaaaacacgggctgacaaatctagaaattatatcaataaaaggcttaagcataggaccttctctcgctttaaacgtgctataacattttcgaaatagatgctaattatcagtctcggatgccattcgaactttattgtcattaatcaattcacagcccgtcacaatcgccaaaaatgagccctacaaatgttttggtggcaccggcttcaacacagccattgactccatcattggtaacaatcgcttcgccaacaacagtctcttccgggttcgatgttggcatcattatcttgctcttttgcattttgataatcgttgtcattgtgatgtgcctactgtgccgtctcttctaccgtactcgacaacaacagttcgtgccatcaaacattgtgccatcgccaactgtttcttcgccgcggatgccttctgctagtgtgctattgccaataacaagttccgtgccaatgccaatcctcatcggctgctgaccattcagcacagtctcaaattccaattcaaactttaacagcctctcttcagcatcaggttagcaatagggctccaatttttaggttttttaatgaaaatttcatcaaaaatccttttaaatatatttttctattttttgacaagaattttggattttaaaactttttatctaatattgatctagcctaattttgttacttttttgaataaattttgttattttacagcccgccagagaaaattttttagtaaattttgcgattaaaactttcattcagtgtgtggccattcccatgccaaaatgctgctcttcatcatcggactactcaccgtgcccaattccaactcaaatttttgccccatctcggcataacgaacaacagtttttgccaccaccttcaatgccatatgcttttgaccaccatcgtccgcaaatgattgctccaagttgttccgcttcgcctttccgtgaccaccgggcaccatcgccaattggccgtgccgtgccatttccatcaatttccggcaaccagccaacattttagccctcttttggtgcccattcgatgccttctgaatcttacgaatacatgtatgaatatcatttttcggaagaatatttcaagaggaaatagtctgttatgggaattaattgtgagaagcgtcgccgcgttccatttgcatatttttaatgtgttggaatggatttaaactcgtctttgataatcttaaaatatttaaatcattttgtcaaccaatttatttatttgtcccatctgtgttctatttttattactttgttctttaattttatttgatactagagtaaatgtcggtagtttaattttttgaaaaacaaaattgctttattatagcaaaaccattttttatttgatcaattaaaactgatttatttcctaatccttaatcttaaaaatatgtatcataaaaaccgacaccatgtgcgttaaacggtgatatagaaaaatgacagaaaggttcagcacgatttaaaatatttgtatgagtgaacaatgaaattaatatcatttttaaaaaatggcagtcgacataaatttttaataataaaatatcaatgaaaaaaaggcgtatctatagacatttggacagttggcaatctgccaataaactcactaacagtttccaattggcaaaatgtcggtaattaatttttcgaaatgaaaaatttcttaaccatagtaaaaaaaatttatatttaaattaaaattgctttaacatgataaaaccatgtattactcagcaaagcatggtcatatgaggaacagttcctcataaaaatatgaaagattcaaaataattttacataggttgactgacattcaatctttaaaacaggtgactgttgtgactggtgattactgacaagcacatttcttcacaacaattcacaaaaatattactttaaaatggcagcaaaaataattattaatttcagcattcaagaataatttcataaaaatttcctttttgataaaacttatttatttaaaattttcaaatcatttccaaaatattttagaaaatgcttctaaaaatttatattgcaatatttttgcaaattgtctttaacaatttgtttttgtcatgccatccaaactcagattattcagaatgtggcatttcggactttgagcctctgttggccaatgtgccaaaaatggaaatcggaacttataatgtaaagacaaagaatttaattagtttaattgaaataatttattctatttctttttgaatgaattaattaacaggtatacttgggacaagcggttgagaatgacaattctttgccgtggatggcctcgcttataaaaggaggaagtattaattttattataattaatatatctccattatgaaaaaataatagctaaaaattgaccgtttttaaaatttaatcaaatttttaagaatttaaatgctccgcaacaattatcgggccaaatcacattttgacggcgatgcattgtgttaagggcagagattttgatattggtgagaatttcagaaacattattattaaatggaaagtattttataaatttttaaaaatttattcaattttagggttttaaaatagtttaaaaaatgccgaattaaatttttaacagaaaaactccgaatttcatacgggaatgaatatgtttcaagccaaccgtataaatctgcagttgtttccatacaattgtatccaaatgcgaaatattatcgaatttatgataattttggcgatgaaacatcaagggcagatttaattttgcatgacattgcaataattaaagtaattgattaattaaatatttatgaataaattaatcattcaaatttatttagattaaaaacccaattaaatttacatcaaatgttcgaccaatttgtttatttggtattggtggtaatttttaataagtttaattcaattaaattaatattttttacccaataagtcttaacacaataaactcccaaaataattttatatttaaaaaaaaattattttgttagttttttgtaaaaaaaaatgtttaattgatgttaatatattttttgtaatatttttacaaaatgatttttaataatatttggttttcaatgaaaaaacaaaactttaagattcaacgcgcgcaaaatttctggtgagaaattcaaaatcagaaactaccaaatttattattgccggttggggaatgactcggccacagtgcgcgaaggaccaaaataagactcgaaatgatcaattgaattatggcaaaatgcgaatgatttcgacacaaaaatgccgagaaatggccaatgaacaaaaaaataggagttgttagatttacttcatttttaattttaaattat

SEQ ID NO: 8978 - DNA, 1055 bp, Heterodera glycines
atgtttcaagccaaccgcataaatatgcagttgattccatacaattgcaaccaaaagcgagatattatcaaatttacgataattttggcgatgaaatgccaaaggcaactttgcttttgcatgacattgcaataattaaagtaattaatttaaagtataattatcattataatttctgttaatttaagcttaaaaagacgattgaatttgcaccaaatgtccgaccaatttgtttgtttggttttggtggtgattttgaaagtatgtataataaataaaaaatcttattttattaaatatatttaatttaatataaatacttttaataagatttggattaaaacccaattttatttatttaaaaaaatcaaaatctaaaacacaaattttttttttatataaaataatttgaaaaatatgtggacctttgcatctatgtaaattttaaggttcatccgacgaaaaatttctcgaggataattcaaaaataaaaaattcacaatttattattgccggttggggactgacttggccacagtgcgcgaaggaccaaaataagactcgaaatgatcaattgaattatggcaaaacgcgaatgatttcgactcaaaaatgccgagaaatggccaatgaacaaaaaaattgtaaattattttagttttattttaaatttttaataatttaatttagcatttgaatggtctgctggcgatgacgatgcaattgaatcgattgaatcgctgttaaatgaatttgaaacatatgggttggacgacaaaatttgtgtggtgcccgagccgagcattggcgaaccggtacggtagaattaatactgtacaaacttactgtatacaattagtaggggaaatgtatagaatgtgtaaatctttaattgcgattaattgtttactctagggtgacagcggtagtccattgatgctgaaaattggcacaaacaattggatccaattgggcgtcgcaaccaaaacgagctgcaattccaaagacccaacaagtaccgaaggactctttggtaaatgcatttaaaaataatt

SEQ ID NO: 8979 - DNA, 1733 bp, Heterodera glycines
  unsure (1)..(1733): unsure at all n locations
gcacattttgcattggttgttccgatttttaaaggtttcttttttcataatagtttcgatctgccctttatgtcctttaatccaataaaattgcattgtattatatagccaatcaataatcattcttgatatttggaatccctctcattaattgttgacaaaagtacaaaagtaattcaaatattgttgtttaaaacattaattatatttttgagacaggaattctggaaaactgttggttttattcacatacagaaaattaaagcggaggataaagcccaacgcttaaatataactcgaattatttataataggacaaaaaacaaattcggtgtctacagtattgtatgcctgtttgatcattaaaaaatagattttctatcattctgtttgcatcggtttccctctgatagatgtctaacagtatcatctgccatgcttgtttttatatcaatttttgtgtcccatcatttacccgtcaatcatcatacattcctctttctccccccccccccaattttacatatattatgctttccaccgtttgctgatcaaaatcgaccaattttggctgactgatcggagaatgtgaccctcattcaccacccaattcccacaaattatgcattattattattacacacatcaccaattggcacgttacgcttttaagaaaaatgtttatataattaaggaaaagtgcttttcgatatgttttttcatttaatcaaatcaatttgagaggatttttctctttgttttttctttttgaattcgcataaacatattacgatctttcaaaatataagaaaattggggtccgaaacttcaccaagttattaaatttgtattttttgggatcattttgaccggatttttaaacacacagcaaccaattattattgtgcaagaaaaagcacgaaaccatttttgccgtgaatgattttacgccagtccgacatgtgccaacgtggtaaacatttttggcacattcttaatacggcgttgctgtttacggaattcgggcttctgattgctctgggccaacagtgcaaaaatagagggttaaactgcggttgctgataatgggggtgatgatgcatcggatgctgttgcattttcatatatttaaacaagaaacagtcagttagacaaatgactatggcataataaccgaaagtccaaaattttaaattcgcatgcttcaaaatcggtttaaactagagtagagcggaccgggaccttttcgggttgaaaacccgggaatttttggctgggaaaaccgggaaaaacccgggactggtcccggtcaaaaccgggactggtcccggtcaaaaccgggactggtcccggtcaaaaccgggacctcggtactcagttcccgtgttttggacccggtcccgctctactctagtttaaacacatggaaataaactgaaagccatcactctttcaataaacgataggtaatttaataataagccctttttagacaaaaaaaatgcgaaaattcgaaaatttgatcgggtcagaggttcgaaattagtcgtgtcatattcgtggtcagcgacaccanaaacccatggctacattttttttgtcttttaacaacaaaaaatccaacccgcaaaagtcttaaatctcgcgcttacgattaacaataaacaccgatatgccattttattatatgtcaagtatctatatatgaatacaatgacgatgaatatgaatga

SEQ ID NO: 8980 - DNA, 3139 bp, Heterodera glycines
aaggggctggggggggggggggggaacgggcgactccttcttgtccttcgtcttgcccttcttgtccttcttcctgcgcgtgctgcgcccgtccttcttccagtgcttgtccttcttgctgccgccgccgccgctcctccccgtcctcttgcgctcctttttgcccgccgctgctgcctggtgctgctgctgctgctgctagtgctgctgctgcagctacttgtggtggtggtggtgctgctgcagccgccagcagccgttggccggccagctgaaaatattgatctgctaaaacttttctcattatcaactaaattaaacattaaaacgatttttttcaataaatgtaaatttttgtgaaaaatgaattctcgacttttggttcaaatatggtgcaaaatttcaatatattttctgtttacaaaaaagttttgaccaaaaatcaaatttaggaaaataaaggatctttaaaaaagcgcagcttaccgtggcggctccaccaagcagagcaccaccagcagcagcgatgaataggtaagtggccatagcgttgcgttgcacactgaagcggttcgttggttggagggaaaaatgaagcgaacctgggagaaacacattccttttatacacatctgatgccgcttgaaggcaaaggcaaaaaaattgaaaaatgggtataaaagggcggaaattgggaaaaatgagtgtccaaatttttgtgcctatttcgccatttttggcgcctttttcagaattctcggaaaaatccttaacatgcaataaaaatgaaaaatacaccccctaagaaccgacaagaaaaatctcaaaaaatacacccctaaaaaatgaaaaaatttttcaaagaaattgatccccacaatttaattattttttcatgataaaaatttttaattaaaaattaaaaaaaaaatttaatagtagagaccgagtcagaccggacccggtgccgggttttactggatccgggaaccggtccgacggttttttggaaaaatagggattggccggattttgaggaccgggtccggaaaccgctctgatcgatagttttcattcatttccctctgtctttgtacattggaaatgtgtgctcatgtgcagcagctgcaggaccaggtggaccagctgaacaccgaacgggccaccttccagcggcgccttcgtgcattggctaaccaatttgggcgcgattgatttggtcgcagaatgtgcgcgagtttttcatgtttttgcgcgtttgactgaacacaccacaaaaaatgctaacgaattaatttaagatcagattattccattccatattcatttttattgtttattttctttgttcggctcaatgattgatgtctcttgtgtctcgctgctgtccctgatcgatagggatgaaaaatatgggtataaattgcaaaatgtggccataaaattgcaaatattgagtgaaatgtcttgaaatccgtcaaattcagttaaaaaatcgcgaaatggctgacatgaaattttcgatgtgatttaaaaaaacgccgaattatgtttccatcttgcctagcagattcaaatcaagttaaaagttcggataaattccatgattttcatccctacttaataatatcctcgtcgtccattatttatccatccaattttctgcacatactataaaatgccaatgaaaattgtttgtgcgttttgtttttctattgtttttttccgattttcatcaacacaacatatccaaccacagacactgactgtcccttctgtgtccgacattctccgctttctctcgcaatttcactttttattattattattaatgaaaaattgaaaaataattcccctttttatttttgaacatttccttcctcccgcacacattctcttggcactcctctctttctgctcatttttaaattatatatatatatatatttaaaactcgaaaaatgaaattgtgtaattttttttggctatgacgtcatggaacaataaaatttaattattacacaatttaaattgaattaattatttttcaaatcctccgccaaactcctcccgacttccatcatcatcatcatctgttgtaacgatgagtttcgtctttatctctttctctcaaattctattttattcttgccttccgttccgaccaccgccgccggacccacaaaaacaaatcgccccgttcgtttccatcatcaatttttgtgtcccatcatttacccatcaatcatcatacattcctctttccccccccccccaattttacatatattatgctttccaccgtttgctgatcagaatcgaccaattttggctgactgatcggagaatgtgaccctcattcaccacccaattcccacaaattatgcattattattattacacacaccaccaattggcactttacgcttttaagaaaaatgtttatataaattaaggaaaagtgcttttcgatatgttttttcatttaatcaaatcaatttgagaggatttttctctttgttttttctttttgaattcgcataaacatattacgatctttcaaaatataaggagaaaatttgggttattttaaagtagggttgcgtccccgaccccgaaccccgacaaaagcaaccaattagttacactcttcggtactaattcagtttgggtcctatattttggccaaaattttttaaaagcgtaaccagacactagaaatcactattttggagcttcgtcactaaaatagtgaaaattcactattttggcgttttgtcactattttttcactatttcgacattttttggaaaattccttaacaaaaatgcaataaaaccaaaaaatacacccctaagaatcaagctaaaatttttcaaactatgaaattaaaaaaattttctcaaaaatttactttcttagcaaaatttttaattttaaaattttttaggtaacttttgggttttttggtcttaaaaatcccagtcctactcatttgcaatgcaatcagtgaataaaaattatttttgctcaatttttggctgaaaatttgtcactattcgtcactatttcggactttttttcactattttggcatttttactcactattttagttaactatttcgggatttttcgt

SEQ ID NO: 8981 - DNA, 428 bp, Heterodera glycines
ttaaaatattttaattattggcattctgttttttccctttaaaaataattttctcatcgtgatattgtgttttctcactttaaaaaaatattttcacatgttgttatgctgtctctctcaaatttaaaaattattttttattaattttccgctcttttcttccaaatattaattattttggcttccccctttaaatatgtttcatatccactctttttttcctttgttattcattttccccttgtttttttcatttttcattgatcgaaagtactttgtactgacctttctcacctcattttgttatgttgttgctttactcgaaactataaccctttatgatatttgtgtaatctttacaaatatcctgtgggacatccttaaaccgaggagtcccgccccggtactggattacttcccataggggt

SEQ ID NO: 8982 - DNA, 5505 bp, Heterodera glycines
tcttttcccgtcctaattggtgactgtgtctcttcactctttgtttcttttcccgtcctaattggtgaatgtgtctcttctgtctctgtttcttttcctgtcctgttttcctccgtcgttttttcgttatttcttttcccctttttctttttcacccttttcttccagtaggggtcaactgcgtcttggggccaactgcgtctcagttaaaaaatcaaataacaaaaagacattagaaaattctaattcaattttgaaccggaagttgatgaaatacatgcattttgcttagcaccctttttaaatttcttttagcgttccaatgaatatttctgaaattaaatctcaacgaaaaaataaaaaactcgaacatgaaggctgcctgtatgtcttccattcgttgaatgccgatcatgacgtgaaattttggcccgaccgaccgaccaacgggaacattcccgaacatcaatggtaccatgcttcttcttcttcgggcccgtggctcttggggggggggggctgtaaaccatgcgccttgggtggcccatcggttctcctcctcctcatcgattttacgggcattgtagtgcccgcccgagccccgggtgaaggacaattggccggacccttcaccccaactctcgtcgcggtttcgcgacagtcattgtggtaccggtaaattgtacacggccgatgggcaacaaagaaaaattgtgtgtggtaaatgtattaattaattaattaagacacttagaataaatagtgcatcaggcatttcaagtccaattttatggtggccaatttaccgggacccctcgctgtgggatttgagtagttacccacgaccttttcaccggattacggtagccccccataggtgtgggaggggtgcatggccaactgagcgccagccatttgagcgccgccaagtgagcgcgggccatctgagcgccagacttttcagtactgaagccaaaacctattgcgcgacttttttttgaaacccaaacctattgcgcgacttttttcttgcaaacccaaacctattgcagggggggtgcgcgacttttttgactgcgcgactttatgcaaattttttattaatttaaattaattttaaattaaattttaaacaccttaaaggtcaaaacatcttaagaacatgaatttaaattcatttaaaattcatcaaaaattccccgcaccaagcggatccgaaccccaggggggcggccagactgacgcactaaccactcggccacattggcaatggacaataaacattaatttgctctcataaagggaaaaattgacgtcaccagcgggggcaggggggcgagagcgggcggcgagaaggcgggaggaggggtcaaataaacaaatcaattatgaagggggcggggttgttggaacggtgccaaataaacaaatcaaattttttaattggtcgcgtactttgtagtgccgcccaaactcccgcacgcttattatgtaatctgacaccttcagacaataaacaattgtttaattgatttttttccatttggtcattttcatttcatttaattcactttacggatgaaaaagccaatcaataatccattatcatttatttatgccttaatttttccttctttggcacttgtttacccattactttttgccatttatttatgtgccagattggcattattatgccaccgtttttttgtgccattttgcctcaattttttggcattgttctgccccctttttttcattttcatttgccaattgtcgcaccttttcgtgccaaaactcctcaattatttcttgccagtttttggcattgttctgccccctttttttcattttcatttgccaattgtcgcaccttttcgtgccaaaactcctcaattatttcttgccagtttttggcattgttttgcccccttttttcacattttcatttgccaattgtcgcaccttttcgtgccaaaactcctcaattatttcttgccagtttttggcattctcttttttaaattttaataaattattcaatccttggcattctgttttttcaaatttaaaaattatttttcttttatttcaattcttggcattctgttttctcaaatttaaaaattattttaattcttggcattctgttttttcaaatttaaaaattattttcacatcttggtattctgttttctcaaattaaaaaattattttcacatcttggcattctgtttttctcaaatttaaaaattattttttattaattttccgcttttttcttccaaattttaattatttttgcttccccctttaaaatatgtttcgtttccactctttttttccttttttattcattttccccttgtttttttcatttttcattgatcgaaagtactttgtactgtcctttctcacctcattttgttattttgttggtttactcggtactaaaccctttaggatatttgttaagccttttcaaatatcctgggggccatccttaaaccgaggagtcctgccccggtactgggttacttcccagaggggtgggcacgggcgttcactgtccacggggcttattccgctggtatccagggctgcggcagtgactgaccgaaacccagtttccgtcatagcccgccgggtgtcacagcgatgtttaagcccagccagatagtcggtctggtgtggacgggggcccttcactcgctggccttgagggtgaaggtgtgcctgttcctagcagcgggggtggcggttcctagccctaatgtgccctgcctacgggctgcattggtacagcgagagaataaccgggactggctggcccggaggaccgtgagtcactgagcagtgtcgaacgcgcagctgctcaaactcaacaccccggattaaaatccgcgttgccggaactcatatgtgctgtgggcgttggcgcaagtgccttatggagggagtaattaaccaacatagggaggcctacaccaaaccttgcactttgggatggtagtgccacacactttgagttccatgagcggttccataatcgcttgctatgatagtcatagttggtgggcatgccctccaatgtgatggcttgggccggaaggttaacaacacgtgtagggggtgacctatgcgcgtttttagccctccaaaaatggcctaaatcatcgctcaggagaggggtcatgcccgatttttttttggcagccattttctttgtcattttagctaaataacgggtttaattttccttttaatttaagaaagaaaataaaatgagccaattatctgacgattccctcccccctacccttgatggaccgtactcccctgttcgggacggtgcggatttgtttgatgatgcaccgccgctcgaatccgtcctcagccaactgccggcttcagttagttataaaaaaagggttataaattcttctttgctaattttgtgagaatatttcaggcaccatcgccgccaccggaacgaggaaatcgcactgctcgcaaagagcccagcatcagcaaggagctcgatcccgagcaatttgagggcgaaggctttagctgtttggcagcagcccaagcggaagctggccgttttaaaggtgttttaaactgcttcaaaatattttatagccttacaacattttaattgttcttttaattttatttaattataattattatttttcgttttctctaatcgttttgagtgttttctttagcatttcgttttatcggacaatttttgctgagcctctcactcactggtgtttttccggaggaaattttgcgcaacatttttaccatgtgccttgcctatgctgccgaaggggcggaatcaatgaaacttgcggcggatcacttcattttcctcctcacttcaaagcacatggactacgaaatcgccattcacttaaaaaagctggaccacactgcaaccgacaagattctgtcgcgctttgagatggtggatcaaagcaacaaatccaaggaacgaccgtcgatccgcgatgaaccattcgtcatcgacataacagccatcgaaagcaaaggagcaaaaccgaagaaggccggcaaaggccggcgggacctcaatgtgatttaccgtatcgctgacggagcgacgtatgggttgcacaacgcggacaacctctgcctcttccgagcctttgaatttttgcggatgaaattcgtattgcctcgacagcgtttcgcggaatacaagaaggacgaaagaagacaactcgaaaatgtgcaagccctctgccgagcatgcaatattgacatgaacttgcctttttattgcgtcgtggaatacggcgataggatccaggcaaaattaaaaaaataataataataatttaaaaaattaacaaaaaaattaaggcttattatcagcgtcttcatcccgggttgttttggctttactgcttcgaaacgtccggtcggatgaagccatcatggaagtcatgtgccggcgaccgcgagcatgaactttgtgttctttttactgaggatgtgaatggtgaaaatgggcattatgacgctgtgaaatcggttggaaagctgttcggcacacaaaattattgctttggggtaacaaacaaacaaaaaatttttttaaatattaataaaaagtttaagtgtgagatgccgtactttcaacacactcaacattcggccaaatgcaaatggaaatgtcacaattgccagcgcgtgggctgggcgttcagaggaaactgtgacgatcatcaaaacttctttgagtcttgtttgggatgcaataagatcgtcttatcgattaatatttagtacctttgtttttaagactttcaaaagtctcgattgctacaaacaccatgccaaagtcacacattgtaaaatcaaacgtggcacagaaaatacaacaattgtgaaatcaatatgcaacagctcaaaaaaatgtgttgactgtggtattatttaccaaactcgggtaaaaattattttcaacaaacaattattattattattattatgcaaaagctacacaagaacaaagcacatgtatgcgggcacaaattctgcaaaacctgccttgggtttcacgcaccgcgggactgctacatcacctatcagcgaaaagcgaagaaggataagcggatcatcttcttcgactttgaatgcaccacggacttcaagccggacccgcaactcgctcggttcaagcaccaagtattttttttattttattttttttgtcaaaataaatagaaatttaatgaaatcgaaggtaaatttctgctttgcacacgtgacgtgcacccggtgcatcgaaaaaggcgtctgggaccaggagttggaacgggcttgcgccctttgcggccgcttccgcacctactcatgggcgccgttcgaattctggcgcacggacgtggaatgcgcgaatgtcgtcgatgacccgttggccgcttttaccaaatggctgctgaacttcgaggcggaagtcctcgg

SEQ ID NO: 8983 - DNA, 3713 bp, Heterodera glycines
  unsure (1)..(3713): unsure at all n locations
tggtgctaggtcacttcgcgaaaattgcaaaaatgatgacgtcaaaaatggggcgtttcgcgaaaagtgcaaaatgggcgtttcgtgaaaattgcaaaaattaataaaaagagactgggcctcttcagttcggtgtctctttttattaaaacttaataaaataattattccgtgtgtttcggcccttatccgtagacacacaagccacagcaataaagcaaagcaaaagcaattttattaagcaaaatacatataattaatagtatttattaaaaattttattaaattgaaattataattaaatttaaaaaatttaaaaatataagcaaaataaatattaaaaattcaaaaaattagtacaccataaatttttgtaaatttattctaagcttgcaaggctccaacatcagcattttggtgtaaaattagttacacaaatacaaatccaaatgcttgttatttgctaatgaatacagcaaaatgagtgggagattttgccggcgcgctgtcaaaaaatgtcgttctgtcataatgtcgctgcgtcgaaatgtcgccgcgtcataatgtcgccgcgtcgaaatgtcgccgcgtcataatgtcgccgcgtcgaaatgtcgcccaagctaaaaagagtcaaaatgtcgccaagctaaaaaattagtgaaaaagtcggaaaattacattttaaggcttcataacacataattcattaacgatttatcagaatagcataaacaaataacaaaaataataaattttgcaggaaaaaggaatagttcaaaaaatgaatgaataaaaaagggtaaaaattgggatcgaacaagtctaagcgaaattcatgattgaatcttccgtgttttcgtagtccttcaattttcctgcatatccttcgacctgcagaccaagagccgtcataacatcgtgaatttcggcatcgtcgttgtatgttgcatccgccaaaattctcatgatgactgcgtcctgcagcacgtagcgtttgtgtcgtttgtgtatgaagttccttgctgacctcgctgcgtcaacttgtctgtcgatgcttccgctgacttcagaaatgaaatcggaaagggctgggtgatgacaaagacccttctaaaattattttatttggggttttataagtaataaatacagagaaatgaagatgggttgcttcgaggccattgttggtccgcgcgagggcagaagccgcatgcgagtgcacgttccaatatggaattggaaatagtgcgcgacggacgacgggttcttcccaaggacggacttaaaattgtttaaatcaacaattttgtgaattttgctgtgcctggctgcaatgtcgtcgttgacgatgaactcaatgagtactgcaccaacggcgagttttgctccactgttgacggccatgatagtgttgagggggcgggcgagtcgatgccaaattgtaagggctgccgtgagtatgtgtggtcggattcaacagaagaaaatgatgtccccgtgaatgcttaaatgcaaataaaagaaaataaaaagagtaaatgtaaaaacaaacacgaaaaaagtggagaaatgccaccaggacgaactccaaacgcattgtcaccgtcaagcagctgttgctgcgtcattccgatgtacgtcctcgcaaagtagaggagaaactgctccatctccataggggcggtgccgacaatgacgctgaatgctcgtctgacgtaagttggtggcaacaatggcaaagataggacatttctaaaaaaattatgaagtcaggtcaatttttgaattgttttacctgaaagagtgtcggaccgcttcaccacgcacagactgttccccatacatttgcaccagtttaagccccttcatttttcggaagaggttttgcccgtagtggaacatgcaacagaggatgtttgttgcagggaaaacagcagatacggcgttcatttcggctttctcaaaatcgcaaatgactaaaagaaaactagattttcacataaatttatgtgttagttttcaccttttctcggtgcgaccggtgaaattcggttacatagaaagttcagcacttcctcgtagtagcgtcgatgtttcccgggcagaagaccccagactccaatgcacattcggtggttgacagacgcgcccacaacaaagcactgctcccacatgtttggtgctgccttgaatgtcccgtccaaatgccaagttgcactgtttttgctcaaaatgtccaaagtctaaaaaatttaaatttaaattctgttttcgcccctgatgattacccgttcgctcccaaacacaagcaccacgtccttttctccaattctgacagtgcgactgtcgtagagcacaatgtcctctccgtttttcagccgcaatttgtcggggatcacgaatgccaaagggtctgtgcagtcgacgttccccaaaattttcctcttctgtcgtctcatcatgcagctgagtgcgttgtccgagcccatcgccacataggtctcgtcagcagttgaacgcctcacctccgccaaaagccgtgtcggtttgattcggggttcagctttcacgcactcgagtattttctgtcgccgaatttctgcctaaattttattagtttacttaattagcaatgattgtccgaaacccgttgtttttgtggctctgggaggtgattatggactttttgtccgaaatatccggccattccattgtcgcttttgtcggtgattgtcacgcgtgcgaggcaatctcgcacattgcacctccacaaatcattttgtttgtgcgtaaaacggaatccttgaaatttagaaaaaaaaattcaataacgattaaaatttttaccttctgaccaaagacaaatgcctcccttttgagtttttccgagttcgaagtttacgatggcttgttcttcttcaatttcatcgtcgcagtcgttgttttcgtcgttttgttcacggtgctcagaatttgcttcgttttcattgtcgttgttgtccaagaacttacgcttacgacttttttggagaatttcaatttttttacgatccatatgagtctaaatgagtagatttttcaaaataaataataagaagccttagaattatgtaattttaggatttttcgcaaatttttattgggggacattttgactgattttagcttgggggacatttcgacgcttggacattatgacgcttggacattatgatgcttggacattatgatgcttggacatttcgacgcttggacattatgacgcttggacattatgatgctaggacatttcaacgcatggacattatgacgcttggacattttgacgggcagcggggtacgcgctagtgtcggacaaaattgctcataacgccaaatagcgcatttggcgtaaatttttgcgcgttaattcaaaatttacactggtaaatgccttttttgtattttttatttcgatctgccataactcgcttcattcccaactaaactgaacaattttggtatctaaaaaaagattttgaaaaggngaatctttttctaagcgaatgttaagtaatttgtcatctcagaaaaaagttgtcggaatttcaaattttcattacgttagaaactcagtcctaaactgctgttttcaccaaaaatgctaaaatttattctttttttatttattctatatgtccaaagtgattttgtacccttataaccaaaat

SEQ ID NO: 8984 - DNA, 1640 bp, Heterodera glycines
ttcacgcactcgagtattttctgtcgccgaatttctgcctaaattttattagtttacttaattagcaatgattgtccgaaacccgttgtttttgtggctctgggaggtgattatggactttttgtccgaaatatccggccattccattgtcgcttttgtcggtgattgtcacgcgtgcagggcagtcacgcacactgcacctccatcggtcgtttttttcgtgtgtgtaccgaaagcctttgacaaattttcatccttttctagcaaatttcccaccttcagaccaaagacaaacgcctcccttttgagttttcccgagttcgaagttcacgatggcgtgttcttcttcaaaatcgtcgtcgcggtcattgttttcgtcgtttggttcatgatgctcagaagtcgtttcgttctcattgtcgttggtgtccaaaaacttacgcttacgacttttttggagaatttcaattttgttacggtccatattgatgctaaagcataaattttaaaagcagatcgtatgaaggcatataattatataattttcagttttttcactaatttttagcttggcgacattttgactctttttagcttgggcgacatttcgacgcggcgacatttcgacgcggcgacattatgacgcggcgacatttcgacgcggcgacattatgacgcggcgacattttgacgcggcgacattatgacgcggcgacattttgacgggcagcgatttgaaaaaagaaatgtttgttttgctttttttcatttttgttttgtcagtttttgcaaaaagcacaattttaaataaatgtctacttttttgtttttcttttttaatgacaaaatagtttttatattaataataatgtaatagaaatgattgctttctattgcatttgttaagagaaaagtattttgttatattagcaaagtgcatatggaaatgaatgctcttaatttttgtaaaaaagaaagaaaaagaattgtttttgtatatgcaaagtcaatggaaatgatcttacaattagttttggtattgtattgaaaaagttttggtttgagaaattgttttgactttgaaatggagtttttttgtttttgtaattaaagcggatgtcaattatgcctcttttactggatacggtttaattggatggatttatcgcattattaaaatgaaagagaacaagtatttataatgaaaaggattttctacgcaaattgtatttcataattgaaatacgtttttaaaattccaaaattatgcttaacaggtctgaattaagtcccgtgattgaaatgccgatgaatccgtaaaattgagttcattgtttggaatagtgaaggattgagtcccggtgattggaatgccggataattgagtcccagtgattggaatgtcggagaactgagtctcggtgattgcgatgccgaagaatccgtgaaaagtgaaggattgagtcccagtgattggaatgctggtgagattgagtcccgggaattggaatgatggagaattgaatagaattaagttccagtgattggaatgctggtgagattgagtcccagtgattggaatgtcggagaactgagtcccaatgattgcgatgccgaaggatcaggtgaggttaggtccc

SEQ ID NO: 8985 - DNA, 1450 bp, Heterodera glycines
gctgtctgtgtctgtctcacccaccccaccaaatttcatttggaaattccacggtcacttgacgacccctcccctcctttgttaggtattcatacaaaaataaactttgcttacgctatcccaaacttgcccatgtttttatctgtaatacttagggttctgtcaatccgattcgctctctttcttatcccttagtttgccaataatttctcgcttcccgattttctctaaggaaatgcaaaaagccaagatacatttcgttttttgtacattaagccgaattgcggcggcttccttccgcgtccgggactaattaaaattcgatggttaatattttaaaaacgtatgtggtggataaattgcgctttacaacaaaaatatcgcactttcactatcaaagaatcaaaatcggaacgaaaggatctttttcctaaaatgctcgtcaattcgtcctcctcaggccaacaatttctttgccgtttcgtcaatttgtgcctcaattttcgcttccatttctgcgcacaatcgcaccgccgcttttcgcattgcgtcctttccgttgggttcggccaaactcaaaaagctttgcgactttaagagttccttttccacagatgcccaacaatttttgttgtttcgaaactgttgaaacactttcagtgccaaaatcatttcttctgtcgccgccgtcactttgggccgggtatctttctgtaaatccggcacattttgaggaggcaacgatttgttggcggtccacagcttcacatagcctttctacaaaatgtttaaacaactatattcattaatgacgtttaaacgatttccaactttcacctgaatcattttgttggcgtccatttggtcctggaagaatttttctccataattgtccccaatgccggctttttgtccctgcgccgaaacactttccaacacttgcttttcccgttcaaaatcatcgattgagatgttttgatgaaatttgtaattgaccacgtccttggccaacatcagccgtttgttggccacgccgacgatgaaaagtgttgcggttcctttgtgaaggaatttaaattatttttgtttatttaaatcaatataaaattcaattactcatataaataaatgtctccgtgcttttattcaccttgggttgccttacagcacaaaaatgccccattggcattggccccgggcgccgttttgtcctccgtttggccattcattccgaccacaaattcgaatgccgtttccgttttcttcatgaaggcatagtcggagctgcgcagaatcacttcttccgcctcattgcattggccttccccagccattggtttacctactcaaatctgtttttttaaactatcagatccctcgtgatccaacaactcctcgctccccccccccaaggaaaagaaaagtcagttggctttttccaaatttataa

SEQ ID NO: 8986 - DNA, 1192 bp, Heterodera glycines
  unsure (1)..(1192): unsure at all n locations
ccctactaatgactcacttcattcattgtcagttgggtcgcatccatttaatagcatctttcagtgacctacctattcgtcattccttcatttttacttttgtttatccatgtattccactctccctgaatcaataactccgcttttctcctcccaatttcttttttggttggtcgttttcgtttaagtcgcaatattatggacattgtacccgtttttattccaaaaattcattgttattttgctcaaaacaaataaatagtacaatttatttgtatattcgaagagttcaaatgttctgagcattcaaaattctaaaaaatcgttttgtttacaaaaaaaaaaacacaaataaaaaatatttttaatcttttttttgttatagcttttttaaaactattaatttttttaattttaatttataaaaagttgaaattcccattatattaattgaatttaatatctcatgacccctaacactcttctgactctaaattttgaatttacttgcgcttataaataatttaactaaatttaaatgtttagaaaagcgatggaaatttttgatgaatatattattgttgatgaaaaatcactttcaattaacattggctcaaagttcaatgaagtgactcaattcgctgcaatgtaatttattatatatttaagttttctcattatttttttgggaccaaccgagacgggtaattttggcacagccattttggtgtcaaacgcataactttctaattaaccactaaaataattaaataatgtgggacactttgaattagcggcaaaaaatgccgcgcaccaaagtaactctgacacgaccaaaacgaggtgccattatctagctgactggggaattttaaacgctaaattaaataggcagttggagtttgattcaattgtgttccaaaacctttggaaaaacaaatttttaaattgaactttcataataataattaataaatcaatgattaaattataaaattttctttgtggaaaaggaacgaaatttacagtaaattttttattgcaaatttttccgaagtagcttaatctgcctcatttcctcaaaaaaataattttttttatttagggatntttcatttgcatacaacccttgtcgcttgatagttaaagacattggcaatgcaactttgccggatgtgccattggcacaaat

SEQ ID NO: 8987 - DNA, 3690 bp, Heterodera glycines
ggatcagaaagtggaagaggaatagaaaaggaaacagaaagtggaagagaaagtggaagaggaccagaaagtggaagagaaagtggaagaggaacagaaagtggaagagaaagtggaagaggaacagaaagtggaagagaaagtggaagaggaacagaaagtggaagagaaagtggaagaggatcagaaagtggaagagaaacagaaagtggaagagaaactggaagaggaacagaaagtggaagaagaagtggaagaggaacagaaagtggaagaggaatagaaagtggaagagaaagtggatgaggaagataaagttaaatagcgaagctatttcaattaaaaaaataaattaaaatcaatttaaataaaaatatcgcatttaaattaaatttaaaacaatatcgtttttaaattaattatttgttcatttccaaattctcatattcctaaactatgaggatcgcttagcggccaatagatgctttttgcacgccccaaattatatctcccactagagccagcgttgaaagcgcccccggcgctttcacagggcccgcagggccctggttatgaaaaggaataaaatttaccagtaaatttttttattgccaaattcttcaaaccctatttaattctgcctcatttactcaaaaaatatcaaattattattttttatttagggatttttcatttgcatacaacccttgccgcttgatagttaaagacattggcaatgcaactttgccggatgtgccattggcacaaattattgtgtgggcatgggacgcgcaaggggcacaagtgatcaaagaagtgacaattcaatcaatgcctatgcctaccaatgatttttatcggaaaaatgaattctagacaaaaatattgaacacgggcggcacactaacatttatggcacagtcaagtgccaacaacactgtgggcggaacgccaaagcttcaagcccaaccgaatgccaacactatgggcggaacgccaacacttcaagcccaaccgaataccaacactatgggcggaattccaacacttcaagcccaaccgaatgccatgggcggaatgccaacgtattatgccgtacagcaacagcagccatatgcccaactgcagtttgtttcccagcaggcatgttagagggatggggagtactttggtggtatgactgttagtgctgttcgagagtctcgacttgagaaaagtctcgggttttcggtctctgtgtcaggtctcggtcttgaatcggaaaattttcgttctcgaacagcactaatgactgtggctcggttttttagttttttttttttttttgacaattttttatgcgagagatctcccagggcccatccaactacggggcccaaaatttccagcagccggcgacggtaagacttggcactccatcggcgtcagtaaagcctggcactaatcaacccatgatgcccatctcacccacacaatcagtgctggtacggattctcaaaaaacgcgaaaacatggacgaaaagtgaaaatttccattaaaaatatattattatttcttttttaatttttctccagtccatgccctccgctgagttcgccggccgacgatttgaccgtgcatattggtaacagaaaggtgaagcgacaattagcattaatcaatcactaatagggattcgtttttaggcaaatgcctaaaatttttcgcatttaatacatgtagctaaccacgaaaaacgcgttttccgctcttgtttggggtgtctacgatgaattttataatgcccaattttgcctattttgggctttttgtgcttaatgcctaaacgcctatttttgtgcctatttcgccacttttggtgcctttctcagaattttctgaaaatcctataataaaaacgaaaatacacacctatgaatcggcccaaaaattttctgaaaatacgcccctaagaattggaaaaaattttcccaaaaattaattacaaaaataaaaatttattttggtaatctttttaatttaaaattttgttcttattccaaaaaaaaactttaagatatttaattattcatttacaatttaaatttaaccagatttactttatttttatcaagttttacgttttgctaccttaaaagcgttaaagaaatttctatttgcttattttagtgaatatttgaggatttctgtgcctatttagtgcctattttgcaattttgcgtttttaggtgcctatttcgcgatttttagtgcccaaaaaacgaagccataataattcaaaaaaattgcttaatggatactgtatcaattttcaggttactgtgtctgctgcttggcttatgtgccaatcgccgatggtccgtcaaatgctcagcgtggaaatgaaggaaaagcagcagcgatcgctcacattgaacgaattgggcatcgacatggagcagttcatggattttttggaggcaatttcgaccaatgctcttctgttcccgattttgccaaatcgtaaaatgagattaacaattaattaataattaaatgacattaatttttaaatttaagcaaaaaatgttcttccgttactcatattggccgactatttccaagtggattgggtgaagacacgctgtgctaatcatctgatcaattgcgttgaaattccgctgatcgaccgtttctttctggccattcgctatcaacttgattgttttaaggtgtcatcccaaaaactagaaaaaataggatttttggggtccaaagaattttaaagaaaaaataggatttttgggttcgaagaaattttaagagaaaaaaataggatttttggggtcctgagaaatttaaggctaattgaaattttttcccattttaggatttctttttcaatttgagtgttaatgtgttgcgcgcctttttcaaggcgaatcgtgaccaattttcattgttggcaactgatccgaattccggcaaattgttcttcgaattcgccaatcgacttagtgcggatactgattctggagaaaaaccaatgccagcaaattttctttcatattaacttttaatgctaatttatgtatttaatgagacgcgctcatacataaatttatatttttacacacaagaaatgcatctgttaattatataattaaatgaggtagggagagattagaactctgaaaagcatcctaaataagcttatgggagcaaattaagtcactgaatcactgaacgcaaaaaccggcgaaattatcgatgagtaaataatagacgataccgggaattttttggaatttatgatcaagtccccgcaacaattctactacagtacactccatttacggtctgctgctttgtccgctgatcaacatcataaaaacacaaatatgaaagttaaataaatttcgatgataggaattgtttaagaaataatttatataaaatatttttttaaatgtaaataaaacatattttaccgcatttaggagagagagaaagctagagatgagaacatagtgagagaggagagagtgcgataaggaaagagagtgtgggagaaagcgagagtaagagaaagatttatataaagaataaaaaattaattaagttatgcaatgatttttattaatattatacagagaaaaaataaatcgttaattttaataaagtgagaagagagtgaggagagatggaaa

SEQ ID NO: 8988 - DNA, 1265 bp, Heterodera glycines
  unsure (1)..(1265): unsure at all n locations
cttcgaattcgccaatcgacttagtgcggatactgattcntggagaaaaaccaatgccagcaaattttctttcataaattttcattcatttaagatttaatgctaatttatgtatttaatgagaagctctcatacataaatttatatttttacacacaagaaatacatctgttaattatataattaaatgagatagggagagaaataagcttatgggagcaaattaagtcactgaacgcaaaaaccggtgaaattatcggcgagtaaataatagacgatgtgataccgggaatttttttggaatttatgatcaagtccccacaacaattctactacagtacacttcatttaccgtctgatgctttgtccgctgatcaacatcataaaaacacaaatttgaaagttaaataaatttcaatgataggaattgtttaagaaataatttatataaatatttttttaaatgtaaatataacatattttaccgcatttaggagagaaagctagagatgagaacatagtgagagaggagagagtgcgataaggaaagaaagtgtgggagaaagcgagagtaagagaaagatttatataaagaataaaaaattaattaagttatgcaatgattttttattaatattatacagagaaaaaaataaatcgttaattttaataaagtgagaagagagtgaggagagatggaaaactaattgatttttttagttgtttaaaaggcaaagcaaaatgataaaaaatccattttaatattttttttacaaaaaactacaactaattgctagggatatttgtaggaatttacatttatttgttgctccaaggctatgtatatgtaggaagaaaggaggccaaaaatagtatctctgtgaacaaatttttggaatatgtgaaagtttttggtgcttttgtggatttttgagaataattcatatttagttatttttaaaaatatagaaaaaatgaaaatgccaaatgtctcacaattattttgtattttaattgttttttcaacatttattgaaaagacaattggtgtcaccaaaaaaggaactgcttctccactagaaaaagcagagcaaaaagacgacgaaccaaaattgggaaaagaagacaaaaaattggtgaacaacaaaaaagaattgctaaaaaaagaggtgaattttaaaaatatattttaattgaaattgaaatttaattttaatatttttgagggaaaaattgcaaatgcaaatggaccaaccagttgaaca

SEQ ID NO: 8989 - DNA, 1677 bp, Heterodera glycines
  unsure (1)..(1677): unsure at all n locations
ttgtattatcacagtgaatcccgttaaaataatttatatgtgtgatttttgtttttgtgaaaaaggatttaattttgtataggatgagtgattggatttgggaaagtaattaatggaatatgattgaanattggtgggggattgaatggaantattttatattttagaggggaaattataataaaatggttgttaattattttatttttattttagcatggaaaatcgacaagcatttcgggatgaatttccattaatatttaaacgaaatgtaaatgtaattcaagtttctccacaacaaaatgtaagcacattcgctggaagctcaggacaacaacacgaatctttgataaaaaaatttttttattcattttaaaaatataacctttcattcttttcaccgtattttttttaattgtcccctaatcgcaaaaattggtcattttggacaaaatctatcaacaagttgcactcaaattttccaaattttcctggcggcgccgcctattctccataaattttttataaaaacgcgccgcaaaaaaaccggctttgaaaaagtagagttgctttaaaataaaattttggtcattacccgattcgcgagggtgactgagagagagggggaagaaaacagagagaatgggagaggaaagtgcgagagagagaaagaaagggagggagggaaactgaaagagaaagagaggagggagggaaagagagagagacaaatccaattcatgaagtcaatcttcctcctttcttggctttttcccatttttgtctttgactgaaattctcttaattatcaaccatatgggaatatcggtaagtatccgccagttgccggctctccccacaacacatcgcttcccggcacattggccacaaaccaatggacgaatgtccttaaatgaaaaaaaaaattaaataatttgtatgaaattctatcaataagtgccagagatcatgaaacaattaaatggctatttatacatgataaattagtaaataaaacaataattaaaattatgaaaaatattgtagtaatatatgtattattataacatgaattttaagaagatcaatcgagttctagcgatttggaagcgtctctcgagcgtttaaacggtttattttaagttaaaaaaatgaaaattaatttaccaatttaaaaccatcaaattctgcaaatctgcaaatgaatctgatgattaacgttagtaagataattttttgtgtaaaataaataatactgaatatattacaatatctaattaaagatgaaatgaatcgtagagcagcagcagatcagcatatgaatgtgattctttttctgatcggccattattgtcaagattatgccaaaataattttcacacttttgtccaattctaattcttaaaaataataaattacacacaaggttcttaatttcccattcaatgaaaaatgcgaaatttagtattttataaatactaataaaagataattttggtgatctcagagttttaaatgccaagaaaaacaattaatgattaattactatctctgccacaaaaaaaacaataaatgattaaaaaaaaatttatcttattgtttttgtcatgataatgccaaaaaactttaaggactgggagaaaataattccagaggaatcgatgtccaattccctgc

SEQ ID NO: 8990 - DNA, 4945 bp, Heterodera glycines
  unsure (1)..(4945): unsure at all n locations
aatacatgaagtatagaattttgattattgaggccctatttattctttactaaaaaactgaacttatttagaaaaaaaagttttaggggtgccttttcggttttttgtgaaaatgccgaaatatggatgtaaaaatggaaatgtggaaataaaaattcatcctagaagcatcaaaccaagctaaaaatactatttacgtcgtttttaggccgaaatgagtttgcaaaaaaaatatggaaatccatacaaatccggtccctagtgatcacttgtgccttatttagctttgttttcttgtttattaatatttctttattgttttatgcgttcagttaataataaaaaaataattaaatagaaatattatatatttttttcccaaattcctaaaaatcatatgaattttaataagatccggcaatagattaagctgtataatcaatctgatattacaaaaatgaataaataaaattttcattcatagtaaaattgattaatgcatattttcctttattttttttattcataaaaatgtataattcatataattttttcgttatttaatttaatatcactaataagcatattaggatattttttcaaaaatttttttgttttatttttaagattatgatgaacgtgtttcaaattgtttggtgtttcgctgcaattttatcaatgtccaataccgctccaagtgcgaaaaatatatttaaacgtttaaaaaataaaaaatatgtttctttagacataaaagcaaaagatttaattactaaaaatgaatcaaattcacaacatgctgaaaccagtgacaaaactgcatcaagctcacaaaaaaataaatctgatgagaattgctcaatttgcttggacagcattgctaatgatgataattcttcactgaaaaccttacttaattgcaaagttagcaaaagccatataaagtttaatatttaaaaattcatttataatttttaaattcaattattaatatttttattcaaattattgaaaaaaatatattaataatataatcttgttttatagcacagctttcaccacagttgcattgatcaatggtaattcttatttataaaaaatattaaaatttttatttttcaacaatatataattagcaaattagcataaaatttcataagcccaacaaaaataaataaataaatattttcaggagttctagcccttctctaatatggaatttaaaaaagctaaattcgatgattagtccattggttttcattttgcaattttttcaaaattccgataaccttatttttttcgcttaattttattgggttaaggttacaaatcaaaaaacgatgtcctgtatgtagaggagaagttaataaacaggaccaagtaggaactgatgacagtcagcacaacaatggggaggaggacatggtaataaataatgccattttagccatggttattttgttttattatctttgattatcattttcaaaagcatttaatattaaaggaagacgaaaatataaataatgatgatgctacttcacttaatgagattgcagaggaatccgatgaaacaggtccattttttgtatattcaattagctatattaaatactttaatatacatttattttgttttttaaaaatttcggaaattgcattgaatctttcaaacatgttttaaaaaaaaatttcttatttattgaggtatttatataataaaagaatttcattcagattcgagttttcgtgaattggttgagtctattgaacaattttttaatggttatttatataattcataaatgagtaaataacaaaataattaaaaatgcaaaaatattgtagtattttatataataaaagaatttcattaagcagaattaagtcttggtgaattggatcagtcacttgatcagttattaaatggttatttatacttgataaattagtaaataaaacaataattaaaattatgaaaaatattgttgtattatatgtattattaaaatgagaattttaagaagatcaatcgagttctagcgatttggaagcgtctctcgagcgttttttaaatggtttaatttaagttaaagaatcaaaattaatttactaatttagaatctttaaattcttcaaatgaacccgatgattaaagacatgtatcattgataataatcattctttttcctgatgtagattttcctaattgaattattgtcagttgttttaccggatgccctttggcattcgtacttcatcagcccatcccccaataattagacgattgggagggtagaaacgagttaaagagggcggatgaaacagcaagtgaggtcctaaggtatactttattagagagggtgtaccgacttttgcggtgtcagcccaaaagttcccttccctaacgttaccacccaaaacagtagtgctgctcgagaccaaaaatttcccgagaccgagacttgaccccgagaccgagaccgagactcgaccagagaccgagactcgaccccgagaccgaaaaacccgagacccaaaaaacctgagactcgagacttatttcaaaaaattttcctattcgcttaaaaattgtttaaaaaattttttttgactctattcttaactaatttttatttttttaattttgattcaatttggtacaacatttatcatttcaaaaacgcacaaaacaaaaattcgttagttttttcgcggtttttgagtcaatttaaaaaaagaaagggtattttggagctccggcggtgccgataggcgccgccgggtaaaattttgaaatttatcagtgcgctttcttaatagatttagtccaaaaatgacaagattttatggttttaattgttaaaattgtgattaaattccctgaaaaaggaataatttttacaaattataagaaaaagtaattacttggagggatggtagtgatcaacgctaaaatgaagacaataaccaagaacacaacaacccacttaaccatgcacattactaaggaaataaagcaaaaaagttactaaaagtatatttattttttaactttacaaaaagccaatcattatgtgtgtaaaaaagtctcggtctcgaagaccgagaccgagactgaaaagccgagaccgagattcgagaccgagaccaaaaaaacccgagacttttctggagtcgagactcgagaccgagactctcgagcagcactacaaaacagcaccacccaaaatgccaccaacccaaaatgccactaacccaaaaggtcatcaacacaaaacggcaccaaatttgccttagacgattagagtggaacaataatagcctttattctgaaggttgatccgtacaaaaaaataaataaactggagatgatgaacagcttcgataatttaaaaaagactgggatttcggcgccaatagtgcaataaaaatgtgaacgattaaatacacaagaaaattgtagactanattttatgttgttttcatattacttaacattgngaatttttcatttgaatataaagacacatcttcgaattagtgcgatctatgaattgtacatttagaatcagtagagaatgaactatgttatgtgaagcggaatgtgcgagaaagcgggataatgacaatttaaattttcaaaccattttaaggcggcaagttttttgaaaatttttaaaattttcttcaaatcacattaagactattctttaaaaaaaatcaacgagttttgtagtataactcttttcatagttgaccaaattgaaattttgatatcatccaatagccctaagtgttctatatttgtgcaacaaaatttcgaacaatttatttaatttctaaaaaggtgcgaccaaaaaggtttggtttcatacgcttattacctttaaataaatttttttaaaaatctgttttagttatctaatttcaaatttagaaaccccccaaattttacaaggaaatgcgtcatcatatatatatgcaataaattaaaatttcataaacaaaaaaaaaacgagaaaaattaatcaatttttgtacatttataatcattagataaagaactaggtatcttatttttgagaactcctaataaataaaaacgaaaaggccaaaattgaaatggtgtataaaacaaatggactccaatcaactaggctccagcccgatttttggattataattcttttcataattgaccaaattgaatttttgatgttagccaatagccgccctaagtattctattatatttgttcaacaaaatttcgaaaaatttatttaatacaaaaaaaggacgacctaaaaggtttggaacgccagttttttttttttgtttttttttgatcataacttttttgtaacttaaggcatgtattcaattctcgccagtggctttaaggttcgataactgtcaaaagcttattgagttaaacttcaaaagtgttataattaaaacacagataaaatataaattggatttgttttcatacgcttattactttcaaagaaattaaaaaaaaattttattttagttatctcatttcaaacttaggaaacccccaaattttatagcaggaaatgcgtcatcttatatattaaaaataagaaaaatatttatatatgcaataaattaaaatttcataaacaaaaaaaacgagaaaatttaaattattttggcataagcatttcacgagaatttataatgttcagtggttttgtcacattgtaaacaacattgtaaacaggaaatcagatataagattaggtaatattttcatttttcattcatatttttataatataattatattattcattttaaaaatgaattcaaaaaatatttttactgcttctttgctatttttaatctcttttttaattgaatcaatgccatcgccgaaaaatgagaataataatgccaaagacgatatatcagaaat

SEQ ID NO: 8991 - DNA, 1361 bp, Heterodera glycines
  unsure (1)..(1361): unsure at all n locations
agtgccaggcggacagcgaaagggacggcacgggcgacgaaagggtggagaacggcacgggggtctgaatgggcatagaaaaggtgatagcaacgcccaaacatttccaactctctttgtgccgttctctgatcactcccccctccaaattcagtccgatcagtgattaaacctagccgccatccccatccggcggatcagtgattaaactcagtccccccgccccctccggcgaatcagtgattccatgttaactcacaatctgtctgatcattgcttataagccatgttccccccatttgtctttcccttaccttcgccgtctcctcctcataatcgtcgttgtgaagggatgccggccgtggcagcaccatcacgcgttgggatgggttggcatggtcaaagttggagatgagccattcctccttggccgagtcgagcgaggaggacaccgacgaggactgagcggagaaggaatgcatgttggaggagggaggggcgcggaagacattgcgcgagggaatccgaggcaaagcaacggaatggtgtccatggacgagctgagaaagggaccgaatgaggaggaccaacttggacacaactgttgctgggattaatgggaatgtcacagttttggcatggatggctttgttaaagagccaaaagttcccgagactctcgagcagcacccgaagaacaattatgaaaaagcgaccacagaaaaatgggcggcgttttaagtttcaattttggctatcagcatgggtttgtctgaatggcccaattggctccacttggccattcaatttgcctgaggcggtgccggcggaatggcgccgctctgtgcgcctccggcgccactgatcggcccggggcctttgcccacggagagagtgtcgctcattccgctgctaatcgttgttatgctgtcctcgcgcttcttcagaaacacctgtttaaagaaagcaacaaatatccatcaaattaagtgaccggaattaaaataacggatggaattgtgatccaattgactttctttctgagtctctcattaatccttcgtgaaatgtgtgaatgaatgtgtttgatcacttcgctcgctgatcaatcttttctggtcaccttaatttgccgcgtgtcgaccaccgacgcggcgccatcgaagtcatacgcagccgaattcaccgtcagtcgtcgactgctaatttcgccaatggacgaattgttgttcagaatggtcgagcccgaaggggacaacgaatgggaggaaatgcttcgcctgnngagaaataattagcttcccaattaattaatactccctcngcccccantcattaacgggtcaatcaaacgtaattgct

SEQ ID NO: 8992 - DNA, 2395 bp, Heterodera glycines
  unsure (1)..(2395): unsure at all n locations
ttggcatggatggctttgttaaagagccaaaagttccccatacatctcgagcagcacccgaagaacaattatgaaaaagcgaccacagaaaaacgggcggcgttttaagtttcaattttggctatcagcatgggtttgtctgaatggcccaattggctccacttggccattcaatttgcctgaggcggtgccggcggaatggcgccgctctgtgcgcctccggcgccactgatcggcccggggcctttgcccacggagagagtgtcgctcatttcgctgctaatcgttgttatgctgtcctcgcgcttcttcagaaacacctgtttaaagaaagcaacaaatatccatcaaattaagtgaccggaattaaaataacggatggaattgtgatccaattgactttctttctcattaatccccggaatttagcgattttacaaaatttgtttcttcgtgaaatgtgtgaatgaatgtgtttgatcacttcgctcgctgatcaatcttttctggtcaccttaatttgccgcgtgtcgaccaccgacgcggcgccatcgaagtcatacgcagccgaattcaccgtcagtcgtcgactgctaattttgccaatggacgaattgttgttcagaatggtcgagcccgaaggggacaacgaatgggaggaaatgcttcgcctgggagaaaataattagcttccaaattaattaattactccctccgccccaattcattaacgggtcaatcaacgttaattgctcgcactttgtttcggagtcggcaatgccaactgaattttgttgcttctctttttggcacatggcggcgccatcctccgtggagaagctgctatgccgggcggtgcccacccgctggacgaggtgttcggcaccggcaccggtgccatcggcggacgaattcactgatggcattgagcgacgcaaacttgacgacaaattacccattgggtaagtgatggacagccaatctaaaggtcgagagagaataattagccaatgtgatattcttggcataaaccgagtcaataaataaataaatgacccatggggaagggaaaatttaccgaaataaaactcgaaaagccgagatttttctcgaattggcaccgaaattctctgaagagccctgaggcggtgtcggtacgaagttggagaaaggacagcacaaaaaacgaacacttataccaacaacaaaatttgttgactaattgaagccaatttgttgaaaaatacggcacttattcgaatgaataatcaccgctttgccaatgagaaaagtgagcaattaacccacgggggatgggatgaagcggacggcacaaactgactaattggcccctttggcacccacacacggccgaagcgacgacaaagcacaaaaatggggggagcggaagccgaggtgaaaagttaatgaggaattagtaattggtgcaacaatattggcccatgcctcggggcatcaaaaaaccaaaataataaaaatgcaatgatcgtcccacaaaatgtttgtttttgaatgagtgccatccgcccgggcgttttaccggtcgaagtgccggcgttcggccgattggcggtgccctcgctggccaaatgtctgctcagcaccatcctctgctgctggtcatcgcctttgctaccatttgtcggcatttgtgaagaagtaaatgttcgttggatgggctaattcgggcaaagaaaatggtgccaatgccaaattctgtaaattgtcagtcattagttacggtaatgatgccatttgggaatgatntagtggcgccattggcaacccaaccgaacggacgttccgtccccataaattgncgcctagggtaaaatcggtgccgaatttccgtggcatttgggccaacaaaaggcaaagtccacaagcgaaaagcgcactcacatcgctctccctttgaaagtgatagcttatgaactaatatttcaattgggcaattgtctgccattttcccacccctccgccggcgacgacaattaaagcggacaattggccaatgtcttggcggggggccgagggaatggcaggagcaaattgaatttgttttgcatgacgtaaagccattcattcattccacgccctccgccgccccacggccatttgatacgccggcacagtccgtcggtcggtagcatttggcggttactgtgccaaatgaaaattcagccgtcgcccccgggcgatgctcccccctctccacacaaccgaacttcgtcttccgataatgtgacgtcaatttcagagaaatggcacgcgattgtgccgtgataatcaaattaaaataacagccgtcctttcgctgtattaattattcgcaaagtaaaacaccaaagcgcggaattacagaacccattga

SEQ ID NO: 8993 - DNA, 926 bp, Heterodera glycines
gtatttggtcatcacagcatcctcttgttgacttcccgggcagcacgggaaatctgtggtatttaaatatcataattttgtaaacaatagcagcttagaaacctaaactgtccattgaatcggaaaagtaccaaaaaaaaataataacaaaaacttaacaacagtcaaagcattggtttgtaatcgctgagtttttccaatggccgagcgatcagtgacaaaaaagggtcaattaattaacaataattggcacacattaatcaaatcattggccgatgaaatcgacgatttgctcaatctgacggcccatctgacgaatgctcaccgcgtggtatttgcgcaggtggcgaaggaattcggcacgggtgacaaaattgcgagtgcagtgatcgcagctgaacggacaattgcctgagggggggagggaggggtataattttcggcacaaaaaacaatgcctcccccattccaaatccaagccgtcccaccggtgtgtccgttcacgtggtcctccaatttgccgcgagtggtgaaactcttcccgcacccctcccagtcgcagtggtgccgcttctcccgcttcggctccatgtagcgcttctcgtgcacccgggcgatgtgccgtcgcagtgcctcccgggtcggctttcgttggccacaattggcacattcgtgttggccaagtgccaattgggcggtgggcacaacgccaaccgacagcgacaacgccatttgagaaacggaggccgaagaagagaaggaagagaggacgctgggagggccattctgaaaatgggaaggaatggggcaaaatgtcaaatggaacaattaagtacttaattaccatacaaattttatggacgggggatgcaataattaatttagaagaaaataagtccctctatttgcttaactgatatccaaat

SEQ ID NO: 8994 - DNA, 2453 bp, Heterodera glycines
  unsure (1)..(2453): unsure at all n locations
caattcgtccgtttgcgcctcctccgccagcggagcccttttgactgcgaagtgtcaatggccctcagcgcaacggaatgttattcgcgaatgtgccgtgccaaccgattgtatggcacgcgctgcccgcagccgaaaacggtgcattggcgtgctaaagctctccaacaaatttaatttttacaagaaattattcgttatgtacccacccccccccccccattttaaggggaaaagccttttactcaaaatcctgggacccctccccccaaatgaaattcagtggaaaaagctcgacaaatgacccaggataacagcccgactgtgaaggcggcccttgctgaacaccgcaccgttctcgccgtgtgcctgtctctcgtgccgtcgcacttgagcactgagtttgttggaatagtcacagaatgaacaccgcttcagccccttaaagccgcccatccgcaccagcagaaccaagccaaagaaaacaataaaatacaaaaatgccaaacaattattagttaaacaatttaaattgctggatggaacaacagagtgacactaaaattggaagaaagcgtatttgaaaaaggtaatctttttggaggttaaaaataataaagcaaaacaaatagaaatgtgcgttgaacattaagcaataatgatcattggtttttgtaaatgtctgatcagaaatcaactgtgtcttccaggcttttcctctcttcgtcaccaatttcttcttcttcttcgtcctcctcctcttcgaccattagcaaatgatagcgttttccgtttgcaccatttgtctcttccattgactgctaaaaatttaaaatggaaaaccctaaaattgaaaaactttcgctttttaaaaaccaattaatttttgaattattatagtaggagaaacactgttttgttttacattactaatttgtccaaatttcctttttaatgttccataattcttcgaattcccacgcaaaataatttttgccgcacctttttctgtccgtcgttgtcctcctcgtcctcatcctcgacagtcaaaaggccgtattgtgccgcaatttgtgtctgttcgtcaattgttggcaccccaattggccgggatgttccattgtttgtcccatcgaccgaatattgcacatacgtcgacgaaaagttggccgttgcgctgagtgttccttccttttccacttaaatgatgcatttatttactatttttatgtgaaatatataaaacggttacaattttggatttggacattagcctggctggtcatgagtgtgtcttattttggacaatcgatgccatttgtgccccaatgtctcacgtataaaattcggctgtttacctttggtttctccgtccttttctccgtgttcctccccctcttctttgctgctgatgaaccgctgttccatccaatttgggttcatttcgacgaattggcgcagtctttccaacgcttcgttcagttgactcaaatcggcctcatgcaaaaaccgctggtggtgcgcttttcctcccttcggctcaaaagggatggacacgtcgacggcggtgctgacgacgccgtggagacgggcgataagcaacccaacctaagtgaaagcactggttgaaaagggtggcgcagatggaaacagcagacttggtccggcaaaacaatgggtccaccagcgcgatcaatgccaaactgagaagaggcgaagaacggagggatcactgacggatcggcacaggcaaagcgcgcgnnnatgnnccgnttgagcagtgntttgtcntttgcncggnnnccttttggcgncggnctatgcccctggcnntgcttcgcnggnnccttttttggnccgccagttttcgtctgnttgttngngcgcncntgtcccttttgctggngttgttggtgctgcgncngnntgnccccttccgtngntgcnntttcncgngttcgcttnntncgnnnntncnnnnncntgnccnnnttctcctcctnttnccgnnnccntnnntccgctccccgtnttgcncnggtcggggnngtggcgtcgttggncgngctgttccccggccntctctcgntccgnnccgggcgtgnnnntgnccntcncgnngtcnccctcggcccntttttccnccnnccncngngcgngtcgnngtgctgnnntntnntnntngnnnnnnnggnnnnntgttgtncggtttgnctcncttgggttgtccncgnntgccnnttggtccccgnngcctttggcgttggcgctttcctcgtgcgtccggcncngngccgggncggcttcnctgtgctcctgtctgtcgtccgtgtncngctccgnngcggtgggncttcgcccgtccnnctcgaaaggctgnggcggcgnncgngccnnngctnngctccctcaaaagataaataaatgattggccaaatacaaaaatattacca

SEQ ID NO: 8995 - DNA, 1640 bp, Heterodera glycines
ttgctccgaaagaggggatggaaaaactgctaatttttttaaataagatcaagtcccacatcaggcccgtttctcgactaaaaattccaaaaattttaatcggcaccgcctgaccccaatttatcaagttttttgaaaacttgactctaaagtgtcaaaaatctgtcatttttttggcgcaaaaccgctacaaaattcctattttttttgcccttgctgaaaaattcgaaaaataaacggaagaaaaatttctgaatttttaatgattttgttaagaaaaaattgattaatttttaaaaaaatgctattactcctagaaaatttttaaatttcggggggggggggaatctccatcccttctccctggctgcttttttaggtgcttaaagctcaatagagtaaaaattgcaattgaacaccttcaaaaccttgggccattgcaattaaatttcgcctccatttttattttcccccaaaggaaatatatttaaatttgaaaaaatttcattagaatctttctgatgaaaaaaatcaaacttttacaaacacgtttaaaaaattcaatattttgaaaattatgatgcaaatataaatctttaaataaatattttctgatttggtcattgttagtcatgactagggttataaattatatggactaaaaaacgccaaatatggacataaaatatggactaaaaaagcccgaaatatggactaaaaacctcaaaaatggcaaaatatggaccaaaatatagactaaaaactgccaaaatatatcttttaacccctataaaattccgaaaatgtattttatattcaatatttgttaaaacagacttaaaaatacactaaaaactgccaaaaatggatttaacatttaaaaaatgccgatttttattaaattctagcttcacaattgcgaatcaaatacaacccaaaatttttgtaataatctcattcggttttcagcgaaaattttcggtagtggacaaaataactaaaaaagtttccgaaatttcgaaaaaattctcttttttaggggtgttttttttaaaaatttccaaaaaattcgatctttagggggtgtatttttcgcttttttgcatttttcttatgaaaatttgccaaaaatggccaaaatatggactaaaaacgcaaaattggcaaatgctatttttgagcccctttcttcatagcatatgcgcagaaaaatatgttaatccatataatttataaccctaatcatgactcatgaatctagtacctgactcgaatataattactaggatgatattttagaccctaaaaactgccaaaatccacggggagctcaggaaaaaatatgcttttgcataaaaatatcatccctaataattacttccggcattttggttaaatttttttcaagcgaaaacgatcaaaatgctatttcctataaaaatcaacctaaaaatttttgaaaacaactcctaaaagaatatttctccaccaaacctatttcatgataacctttaattttaatttatattattaaaattatttttttcatcaaaccgaaaaattattttgtttttatgtctattgtatagtaaatgatgaacaaaaaataccaaagaaatggtatataattgacaagtgaa

SEQ ID NO: 8996 - DNA, 3804 bp, Heterodera glycines
gaagaggtacaaccacgtaccacgggtggaagaggtgcaacaatgattcgaaaaggtacaaccttggctgaaaaaggtaacacttggatctgcagaggaacaacatgattataagaggtacaaccacgagtggaaggttcgaaagatacaaccttggctagaaaaagtaacactttggtctgcaaatgcacaaccataaggaggaattacaaccatggctggaagagatacaacaatggtaagaagaggtacaacctcgggttgaagaggtgctaccgtggtacaaagaggcacaaccatggttagaagaggtacaaccacgggtggaacaggtgcaacatgattagaagaggcagaacaatggctgtaagaagtacaacaatggttcgaaaaggtacaacattgggtggaaaaggtaacactttggtctgcagagacaccaccatgattatagaggtacaaccacggaaggttcgaaaaggacaacattgactggaaagataacacattggtctgcaaatgcacaaccatggctagaagaggtacaatcgcgggcggaacaagtataaccatgtctgtaacaggtacaacaattgtaaggtggaagagttgctaccgtggtataaagaggcacaaccatggttagaagagctaaaaccatggatggatgaggtgcaacatggttcgagaaggtaacaccttggatgtgaagagtcacaaatatgattagaagagtacaacaatggttagaagaaatacaaccacgggtggaagaggagcaacaatggttcaaaaaggtacaatcatggttagagaggtacagccatggttggaagaggtaccatgtctgtaagtggtacaaccacgtatcacaagtgtaagaggtgcaacaatgattcgaaaaggtacaatctgtgctggaaaaggtaacactttggtcttcagaggcacaccagttttttgctgttccatttcagcttaaatatctcaaacatttattgataaaattttacataattgtatgctaacagggcagattttgggttataaaaattttttagaacaaatttaattggccaattattttttgcaaaaattatcaacgaataaatttttaatgtttggaacgagattttttgggtgagtgtagaacattggttataagtacagctatggtcgagaataggtaaacccatggttagaaaaggtacaaccgtattctcaagaggcgcaatcatggtgagaagataaacaaaacaatgtaattagaatcggtacaactatggttaaaaacctcctctcggccgcctcagacgcgcgcttctccccccccccccacccaaatagtgttttctttttaaaaataactcgccttttaatttttttgataatattatttatttttataacattaaaagaatttatattaattttatttttatcgaaaattatttaaaaattaaaaaaactaaataatttaaactgaaacattttcacctccaccattgcttgggagcattgtgtaaacagcagttgcgagtaatttgcattttgtgtcatctccctcagttggacaatcacagcttcaacagcataagctaataaagaaaacgtatcgcttgaaaattcaccaatggccattgtttacatattaaagaacattataaaaattcattgcaaaatttactaattataaacaagttatatgagttttataaaaataatccggcaaaatcatgaaagtctgctagatgacctaatcaaaataaaggatttttaggaaaagtcaaaaattaaataaatttatattctcacaaaatatggctaaatattttgttttgcatatttattaactccgtcatttaattttatgaaaaaacttttgtccgtaattgggaagattgattttgaaaacttgttcttccaacattcacattttttcaacttcaaacttcgaaaaagattgggctttaattggagcttcgacagtgcctggcactgcccagacaaactatcgttttaatcatttttaagggtccaaaaaactcttcaaaattatttagaaaaaattacaaatgtcctcctggttgtcttctcgaaacaggctcgtgccatcatttttacttgcatggcatttagtagaagtctctcctaaaataattaaagtgagaaattttagtgccaaaaaaattaaaattaattaaatagtgaccaaaaattgtgaaaacatttaaattgcattgcatcggcattcgaagacccaaccataccataaagaaaattttaaaataaggaataatggcataggcgccgccagggaaatttgtaatttgaataatttaattaatttttatttaatttctctttaaacataataaaaatatttaattttttctttaaacataatcaaaatatttttcaaaaaataaaaatgtcaatgttccactcatttacggaatagagattggaaattacggcgtttttgacgatttccggtcccgtaattatgggttacataattctgtagagcgaggattcaaattgctaccgcgccctaataagaaaaatgaatccgttaaatacccgttgaagcatcatcctccagtgtagcttcggcaattatgaagatggtggctaacaaaaaatttttagtgattaaatttgccatttgtaggtctgtcttcctttttaggcacaaaaaatcgcgaaataggcacctaaaaagaaaaaatcgaaaaataggcaataaatagcacaaagatatgcaaataaaacttttaaataatgctttttaggtagtaaaatacctaagacttaaaatttaattttgattatatttcaattgtaaaacaaattattaaaatttttataacaaggacaatttttaaaccaaaatttctaattttaaggatttttccgagcgccaaaaatgggaaatatgcaaaaaaagaagcataaaaccttaaaataggaaaaaatatacattaaaaaagtcatcgtagatactccaaaccaaaggaaaacgcgtttttcgtatttaattgtgcctatcaagcacatcggaattttcggcatttacctaaataagaaacacctagtcattggcgccctggcggttagggcctcatttttgaacacgtagagaaccttataaaataacaatccctcattttatcattttagcctcacatctctcgctcttttgattctgtcatattttcatttcactgtttccctctcgtctagcgtctggtctactcgccattactcttctctctctttctctccctcactttctttttgtcttttggcctatctctcgctcccactctttcaccctttaatttatcagtttttaatgggaatcccatatgaatttttcggcagtgagtcataccgcgggaatccgttcccgccggtctctagcaattgccgcaaataaaatgccaagaaaaatttaatttgttgatgccgatctgacccgaaatgccaccacgaacgcgcccacacagtttatcatgcggagagaaattttcaaaaaaatgagacaggagggaaggcgctcaagcggctgccttttgcacttttctccatttccgtatgcatcagcagcagtcgaaatatttccattcacccaattcattcatttgtgtacgccgctttggcggaccggcggcgccgccaaaaaacaattgcttgaaaatagagaatgggtagcaaaaaatactctaaaaaactaaaagcggatttcggcagccgagcgggggcggggtgagggcagtggacgggagtcgagaaaagcat

SEQ ID NO: 8997 - DNA, 1358 bp, Heterodera glycines
ccggaacccgtcaaacattctctgacctaaatttttgttggaattttcaaaaaaaaaacaaatttttttcccgcctctttcaaaatgttttctttgccctcgcggctcttcttcttcacttttgtgagagaaactgaaggaaaaaacaaattgaagaaaattatggacaaatttggctgaagaataataaattactgaccaactctgtcgcgcttcgattttggcatttgcgaaagtgagggaaattggaataaaaagaattgaaattgaaatacaatagctgtgaataaagtaaaaagtatacctatactaaattaataaatttataattttacaataatccttttgaaggcaaaatccaaaaaaaaagttaaaaaattccgacatttttcaaatttggaaatcggaattccgaccccaaaatgtctgtaagtcggaattctgtgcaatccctgttttagaacatgaaaaaaaccatcaaaattgtttaaggataaatttttgaagtaagtcatggatggtaaaaaaaacggagaaaattgttggcgtaaaaaacaaaatgccaaagatttaaaaagaaaacaaagtgtctttattagggcttatatttatagttgataaaaactgccaaaataattagtttttagtttctaaaaaccccatgaaatagttgctaaaaatgggtaaatagttgctaaaaactttcatatttaggggtgtaatggctagggctgccaaaaatatgtacaaaaagtggtccaaatatgtacataaatatgtaagaaaaatcccaaaatatgtacaaaaaactccaaatatgtaaataaaatttttttaatggtattttttgggaaagaagacccctgtaaagtatgaaatagccacaaaatgacataaaaattactttttttggtatttttaggcaacattttcaaacttattttggcgcgcggacaaaatcccgtcccgacaaaatcccgtccgacaaaatcccgtcccgacaaaatcccgtcacagccaaaaaacgacaaaatcccgtcttcatcaaaaaacgacaaaatcctgtcccaacaaaatcccgtcacagccaaaaaacgacaaaatcccgtcttcatcaaaaaacgacaaaatcccatcccaacaaaatcccgtcccgacaaaaacgacaaatcccgtcttcacctaaaaacgacaaaatcccgtcttcttaagaacaccgaacatttagaattttttattctaacataatgaattgacaaaaagtgagttgaaaaagataatttgacaagagaaaatgcgatcaacaaaaaagaaatggtggataaataaagcaaattttcaatcatcttccgaatcga

SEQ ID NO: 8998 - DNA, 1033 bp, Heterodera glycines
  unsure (1)..(1033): unsure at all n locations
taatantgaaaaaaataataataattttaataattttattatttaaattaaaattaaattaaataaaaaacctttttaattatataaataatacacttaaaaaattttgtttcacctttacttcacgctgaaatgagaacaggtccacctccatccaattgctgccgtccatggccaatttgttccatgttcgacaaacttgcgcacaacggccaagcgatgtgatgtccaagtaggaaaagacccttgcaaaaattggcacttaaatttaggcatttgaaatagtaaattcaatggcatttaggaagttaaaataacaaatgtacaatatttagaatgcataaaaatgtttttgagaaatcgaaaaaatataattgatttacttttttgcatgctttccatgaaactgtagtaaatttttattatacggtgttttaccataaacaaaaacagttttcttaaaaatccatgtaaagcttactgtaagaattttttaatagtattttttaatataattcaaaaagtatgtttatatttgcccatattgaatgtaaaatgtagccaaggacgacagtatgcaaaactatcgtactaccagtcaagtaatacatacggtaatggtcgctaattgtcctatactgctaccgagaatatgtagtcttcttttattagttccgtattcgaatgcaaaataaaacacagtaaaagaaggtatatgccaaatgtctaccgtagtatgagttcggttggcagaatacggttgatcaacgcggcggatggcatatgctgtaatgatgtgttgcgccgatgcccgtttgattggctgtgattgttgttgtggtggtggtggacaccgttctgttgttgttgctgggcattcccattttgtggcactgatccatgggttggcaaaagggtggtgatcagatacatcttggaaaaatgatcaaaaaatttaaaaaatataataatttaatttttaattttttaatgtcacaanaagaaaaagctagataaataaaaaaatcgctaa

SEQ ID NO: 8999 - DNA, 1425 bp, Heterodera glycines
  unsure (1)..(1425): unsure at all n locations
tttgtaaaatgtcaaggaattgaagaaaaataaaaaaaaattagaaataatcaagtaataaacctactttatttttgcttatttaaaaccaaaataaaaatgtttttttcatttattaaattaaataaattaaatttatagtttttgaaaaattaaaataaaagactgtaaaattaattaaacaatttatgataattatattaaatagataaacaaaattttgaaaacaacatccgatcaaacggaaggggtggtgagaataaatatgcatcgagaattggaaccaaaaacaaaattttgtttcaaatgataattgacacaaatgaaaactgataaggtggggaacaattgataaaagggattaaattaaatattgtattattaaattaatataataatttaagaaatacaaattaatggaatttatttaaattataaaattatttttaaatattaattaaaaattattaaaaatgtacaataataaaaatgttattaaattaattttaatatttaagaaataaaagaattaatgaaaaattaaaaataaatcttttttaattaaaaaaagttttaaaatattaatttaaatgcaatataatataattataaagattttaaattaaaaaaggaatatgaaatattttaaacaatttttttcattaaattatttttttataaaattaaaaataaattaataaaattaaagaatttatttaataataaatttaaaaaaaagaaaaaatttgcttttcccaattttaccccttggctacggcggcgccagcgccaaaatttttgacgctggcattttgagtcctcgattggcgcaatggtggcggcgccaaaccttggcgcacgatagcgcccaagcggctgctccgaaattggccgctcgggcggatggtccgggttcgcgaaacgcaaatcccacagtatgccatcatggcgtacggtatgatcaaaatgcgcggtacggtccattgcgtaaacggcacgcaaacacaccatggcaccattgtcatcagcaacatacgcagcaatgttttgcacagcaacagatgaaatggttgaagtggagggcaaaggcatggcgataggtaattaattcataatatgatggcttgcttaattgactagtcgcatgcataattggggtcattagagggggaacagctcattccctcccgccgtcctccaccccaaaaaattaaaaaataaataattcaaatttacgtaatttgaaaaaatcttagtctaacgattctttcataatttaatgatgaattacttactatgttttttgaaaaacacttttccaaaaaatcgctgaaaattttttctaagtctttgtcttgaaattttcttataaaaatttcgaagattttttttaataatttctaagttcgactattgntgctgaaa

SEQ ID NO: 9000 - DNA, 2346 bp, Heterodera glycines
ttgggacaaaacttaattactttggcaaagtgccctcctccaacccaaaaaaaattcaagtaatagtttcaagtttttaaaaagaattgttaggaagtgctgaattaaattttgatttcacaaatccaacatctgccactttctgggtcatttttcagaccgattgcctttgggaagtttcaaaatttaaattatttctggcgaaatgccctcatccaacccaaccaagtaattagtctcaagtttttaagaaagaatttatcagaagtgcggatttaaattttttttttaagcagattttacaaatttaacatctgccaccttcagcagggggtggtcatttatcacaccagccttatagagatttttaaaattgaaattttgtttggcgaaatgcactcctcccataaaaaacattccaactgtgcgcaacaaatgctcaacaatggaaaaaggagacatcaccatagcagatgaatgggaatgaataaatgaatgaatttgtgtgtcgaaagcatatgtttgtgccccgcattttatgggtctgttgtgtgttatgtttacttttgtatttggcgcgtgaataaatttttttttcgggacggggacaaaaattgcgggggaaaaataaatttttgcgggggtggaaagcaatgtgaaaagtcaagaatttatttcctctttttttttgcgagaataatgaatcagactgatgaatggaatgcatatatgaatgaacaaaaaatacgtggcatggattgtgcaaaaaagtgtaaaattattgtctccatgatacagtatgacacaaaatgatacggtgtcacaatcgaatttgagagcattttgaatgttccaccggaaaattttttttattttttgaaattatgcaaaataatcattatgccaatctataataaaaaattatttcctgaaaatactaaactccatttaaaagagcacaaaagttaaattttaaccttggcattacaatcccataaaattcttgataattttcataattttagacccatccccccccccaaaaaaaaatctatggaaaacccagatttcagcgaaagccggccggtggtccaagctctagcgataaaatcggaaaattattttgacacaaatccaaacaatcccacgggttgatctgactgatcccattggtcatccgtaaaggatcatcagcagcagaagcaaaataaatcctgatcagcaataaaaaaaaattgggagggattgatgggagaggggataaagaagcatttgctaatgctgcaaaaagtcattgagccgtaatcgaagcgaataaaaaatgggcacttctatagcgatttgggggctttgtatgaaaaaccataggggtgacccctttggttttctacagaaaatattctgtattaaaaattcatgaaaacatgcatccctgggtttttcgatggcaataaatttggaagatctcaaaaaaatccacaaattttttttagtttcataataactttctttaaatggattcggatattaaccaaattcggctaacattaatgtgaacatgagagaaatctttgagaattttttcaaaattttacattgagaatttttttcagtaagagaaaaaagcgcccgtctcggtacttccgggttttgacttcccccctgaaacttttttttgacaatcttatataagctacgttttgctcgagctaaaaatgtatgtaatgtacttatggtgcgtaaattccccactcgtgaaaactatggtatgggatttcgtttttcggcgttcgctgccgtttttgtgccgcaatttccgctcatccattagaaaaattttttgctccgtcccatttttcttttttgagcttccatccgtccgcccaccaaatttttcgtcctttgggcgtggacagacggacgaccatttattttctttggtcgcatttatttttatcagccatggaaaaatgaaatgacttttctttctccgccccttccaattttcttctttcccttcgttttcttttgctgtttctccttccttattttctcctccctcgttgcctttttaattgtttgttgaaaagccaattttggtgtttctcagccaatgattaatatgtacaaaggcaaaaaattgtggaaacgattgaagaatttgctaatcacacggcacaattatttaattacccaaattaaaattctgagatttttttatgacgcttttttctgtttttattaatagaaattcccttttgattttccccaccaacggaaagacatttttatacaaaaccattccaataaatattttggcacagatggaggggactctgtccaaat

SEQ ID NO: 9001 - DNA, 1830 bp, Heterodera glycines
tttttttgggggggggagtaaatttatggtttttagtttatttattttttccaaaaaactttttatttctaaggcaaatgggaaggaattttttgggttctaagaaaacgaaatacctattttgatgaaaaaattttgtaataaataagttatatactttaaaatctttaaaaatttcaaaattcactgatttttcaattaaaaaaattcctacttatttttgtgccaaagctaccaccaacataaagcagataaatttaaccaagaaaatttcatttttcacatgtgatttaaaattatttaaacgcaataatttagccaaatttttcagataattatgagggacaggcccaataacctaaacacccatacagggtgaattttcaaagaaaatttaaacgaaaagaattttttcgccaaaattttcccgcttttacaacattttgtttttcatgggaaggaattgtcagaaaatgtgtgcaggcagaaacaagtcgtggagaaaatgcattagtgaagtgaatggcgggagaatcctggaaagtgaagcgaagcagacattttgcttcacaaaagtccgaaagtatccaattatagcggcggcgcagtttttatcaaaaaaaagacaaaaaaaaaaaaggaagaaaatttgtgcgcgaaaaattccctccaaaatgaaaggcacaaaacgaagaagaagaaagccaactaattagataattaaggaattaatattattattaatatttgaaccagaggatgatgataggttggaatcggattatttatttttggtttagggaatttttgcagattaaattttttaacgggaaggtatttgccaatttttcaaacagattttgattaaaaaaaaaatgtaaacggtaaaagcttcaattaaatgtaacggtaaaagtttcaattcgggaagaacaatatttgggtaaatttcaaagttaatctagattgtgtatcataataataataataattacaaaaaattagatcaataataaaaaatttttaattactggatcttcaaagggaagcacttgaattgatatcatcttgggacgaattcagtcaacttcaattaattacccaattttggatgataataaaaatattttttgttattatttaaagagaattttccaagagatagattttgaggatttgagtgacataataatgatcgaatttgtggaggctcgaaaattttacaaaatttggtcatccaaattttaaaatttaattcccattttctccatgcattaattaattggtagaattttggggaaaattaattttgtattttaattgcaatcatccaaactgaattcggggaacctccgcaacatttttcacattttataaaattaggtgctaattaattttcaattttcttttcaatgctttagactccttattacattagcacatttctgatcactgatcagagacattctcagagaatggtgaagagctttcctttctttctgcctgctgctgttggaaggctatacctatgcattatttgcgatcggttggggctgtgtcattttcattgtccgatcgctcggctcgctggtctttggtccgctgccctccaaaattattgtcgcgcgggcggaggcggggggggggggggagacaaataaaaattttggaagacaaagtcgggaaaatgggaaatggatgaatgaggaagaaaatggacggatgaatggaagaattaatgggagagtcaaataaggaagaaaattgggtgaaataatggatgaataattgggaaaaaaaagttgaaaatgaatataaattaatcaagga

SEQ ID NO: 9002 - DNA, 2752 bp, Heterodera glycines
  unsure (1)..(2752): unsure at all n locations
aacaacatatagtacaccccgaatattaatcagagctcagcgcagcattcccaccacttgccccattccttcaaaaacgaacataaactntgacgattttccaaagcttgaaaaactgattgatggtcaaccaccggtgtccgacattctaccaccgctaattcaattgtgtaaggatcaaccagatgaaaacaatttgtatcagcaagcaatttgtggggcacttattgtgctttatttgatgctgatcgtcagtcttgtgttacaacaattttgctcgtttttgtggctgaagactaaacctcaaaaggatgaacaccattcaaattatggccatcatgagggaaaatcatcacacagcgcgagtttttcggggatgctttgccagtgatcaattaccaccacccagcgctctacactatcctgctgcgttaatagtgaaccgagaccctcacaacaaagaaggctcccattggtgtgccatttacgccaagggtttggatgtgccagttatttattttgatagcctatttcatcgtcttttttaattaaatttccaaacgggacaaaaaagaatgctcatccttatcaatcacctctgacctctacatgtgcccaccactgcattgtgtttctataccacatgtcgattggagatacatttgatcaatatttacgcattcttgactctaacgcatcaccagatttatttgtgactgtaatgatgaataaaattgtcggaaattacaaattgtaggcggagcttgggtgaccgagtataaaagccttcccgttcatcagatgatttcattctgtcaaaaatggtgttgctgagtgtcttctgcgctgagctgctcaattgccgtgttcagcaactccgcgaccgcctcaatcaccctgaagaccgcacatacattttcaattcactgaaaggtcgtaaggtgaccacaacttataaggatcgaaacggcatgaccaagactttcttcattggcggtttgtctgaaaagggagcagcactcactatggcctatggtcgcctctcgtctcccttcaatgtcaacatagcggcccacttctatgcgcggcaccgcataaagctccatcacccttacatgcattgtgttgttgaacggttcacagctggaaaagaggaccgattttatccaatggagttgcttgagttggccgatgacaatccaatgtggaggcggtgggcaggcccaatgtttaccgagaggatgtccacaccacctacacgccccgatgttcaattcaatcttggatattgtgatgatgatgatgatgacgatgatgaactaattggagacggacgcgaccaatgtacacaacaatcatctcccgacatgtaccgctggtgacacacacacacacacatgcgcatgcatatatgcgcacatatacgcatgcgcatgtaaaattctctaatttacagcatttttatgccttttttacaattgcttcttctaatccttaattatgcattttttctacccaaaactgaccactcccaaacattaattatgcttagcttttaaaattgtgtcttccaatcgttaattttttcaaaattgtgtcttccaatcgttaattatgcactttttctacctaaaagtgacaacttccatcgcttaattattttcaaattttatcttccgttgcttattctgcatgcttttaacgtccttaaatatgcacttttctacctaaaaacgacaacttcgctcacataaaaatagtatcttccattccttaattttttcaaaattgtaacttctttctcttaattatgcactttttctacctaaaagtgacaactcccacgcttaattattttcaaatttcatcttccattcgtttattatacatacatttttatgaaaaacatgaataacacacaaaaaaaaagataaaattacagaaattgttataaaataaagggaaattggggtatataacatttatcggttgtggttcaccagtctcagcatattttaacaccttgtccttgaacgtgtcgtagcgcaacccctggttctggggcaattcaaattgtaaatagccccgcgtcttctgccgtcctttgttaaaaatcccatttctgccagttgagtttgcccctttgtcccattttgtaccatcccttcacaaaaattcaaattcctttcttcgcccggctcaactccggccaattttgtgcaaaaaatttttttctcacaaaatttttcttttgttcaattcgttggctaatttgcatttttttttgttcgtccattttttgtgcaaatttttttcccatcttgccagatgcgcttatttgtgcccgcccctcgcaaaaaattttcctatttaagcgcctccggccaagggatcgctcattttcacttttctgctgctccctctctctcctctctctttctctctgaatccaataaattttacaaaatttgcccccccccctctttgtttgtcatctatcatttttatgaggcgaccaatttttaaatttttcatttttcagtttcaatggctttttcaaaaatcgcagctaatgcaattgccatcgacctcggtacgacgtattcgtgtgttggagagttccagcgcggaaaggtggagatcatcgcgaacgaccaaggtggagcaaaaaggcgcaagttcgacgacccggcggtgcagtcggacatgaagcgctggccgttcaaattggtgcaggagggtgctcgtccga

SEQ ID NO: 9003 - DNA, 2312 bp, Heterodera glycines
  unsure (1)..(2312): unsure at all n locations
tgatcaaattgatttgtatttgtgagatcaaatttgatgtanttgtgacnccaatcaaatttttgtgttaaaaaaatccttttnacgcatcaaagtactgtaggaaaagacaaatatccatccaaatagaataattagtgaccaacttttgaggttgagctttttgtgcacattagttccgatatatcgagcacaaaacaataagggagtaagaaattaattggatttttgaaatttaaatttggctctaattccacaaattaaataaaaataataaaaagcatttttaaattgaaattaattttaaaattataataaataattattatagtagaaggaatatccatttttagacataaatattgacaaatgacaatataaaaaagtgttaaaaattgggggaaaattgttgcatttttttcttcgtccattttcatcatcatcaaattccgttgttgttcattttcttgacaccagcatggcgtactgcacacatttgtcccagtggcgctcatcggaagggtcgtaaatgcgcaaaaagagacccaacggcagcgcactggggtccaaccggccgagcacgaacatctgattgtgagatgacaaaaatggcatttggatttgctaattgggataattagagtttgatctgtactaattattaatgttgtctattctgtacagtgtttaaaggctgagaatttgtaaagttgcttattttagagtttgtgccttattctaaggaccggaaaatctaaaattttctgggaaatttttaaattaattttagatagtttttaaaaagtttaaaattagaaaagttaagttgaaattttttgaataaggttgtaaaagaaagaaatgaaaacaatataaaatttttataaagcggaaattatgcaaaatttatttttatttttttcttgatttctcttggaaatgttccggaacaattcaatttttaaattattttcgctggctgactgaccagctcgatgggcatcatgtcgaccaactgtcgccagtacggagtgcggggcgcttgggcaagttcgtgcaagaagaaaatgatgaaagtgaccggcgggcgcaacgtgcagtcgcgcacaatgcgattgaagcatggcaacggacggattatgattatttaattggtggccaagtaagcgttattagcgaacatgtctaattgagggtgattagctaatatgtttaattaaaagtaattactaattagggaacaaaagtatgtatttaaaggaattaaaatggcattttatagatggaggatcccagccgcagaagttaaagggaggaggattttatttattataccattcattcgaaaataaaaattatttttaaagtattctaaagatgtttgcactacgtttctcgcgccagcccgccaaaaattttctctactaaaattgaaaaaatttcaagctattttttgaaattttatgaaaattaacttttttcaaaatttcccagaaaatcgctagaaaatttctcactatttttagaattttctgaaaaagtttttcaaaattttttttctaaaaaattcgaattttgaaaattaagaaaaaaatttgggggtggggtgacgagcggctgaacaccctaaagatgaagggggggggggcaatacaataagccaacaattccaacaatgatgagtaggtaatggtaaattgagagacagcgataccgttaggcgccgccgtcgggaaaattttgagaattttaatgcaatgtgttaagaaaattgctttgaatttcaaataatttataaaaatttaattatcatttaccggctgatgactgcacggattggtgccgtctcttccggcatgtgccatcaccttttagattaaaaaacaaattaaaaaatgccaaaattgtttggcccacccgtcgtgccgtaaatttgctgcaatcgcttctcccgctcgcgcttgcccagcacactgcgctcgccggcccagaggagcagctgaagaaacggtggacttggaattgtacagtattcaaccaccaccaccgtattttgattgaatggtggaaatggttttgtaagtacctgcaaggcgcggatgagcattcgtgccattacggtggccttgggggacagttcgccgacaattggatggcgctgaaaatgaaaactttttttgaataaaattaaaaattatctgatagcgctggactattttttaaaatttgacaaaatttcttttataattgggccgaaaatcttttaaaatatgctgctatttgcatcttccataaaaaagacaatttttttt

SEQ ID NO: 9004 - DNA, 1068 bp, Heterodera glycines
acaaacgcccaatatttggggggcgctcaacaccgcccctcaaatttgtcgtctgagaattgtcccaaaatgccactattaatttttgatccaaaaatttcaatttaatataaaaacatctttctaggggtaaatgagttcgctgatcaggaatccgatctcagattttcatttctatatttttatccatgatttttcatccatttattcgggttttttgaatttaagtttatgttagaattagagcaaaataactgttagattcggaatctacgtaccaaaaaacccctagaatgactcttttgccatttttcatttttttttgcattttccattttcctgagaaatgttgattaatccttaaggaaaagtgacgacaaacgacaaatttacggtagattttgtcaattgtgattggacgacaattcacacgacagagacaaacgacaaacggaaaatcggcttattcaaacgacaaacgacataattttttgtcgttatgacaaattcggagacaaatgccaaatttgtcgtttgtcgtccgttttgccgttttttgaatttatcattttgcaataaaaattaatttttaaattgacaaactaaaaaattaattttgttttaccttcttattttaaaatatttaaaatcttgtttttttcttattttttaaatcataatttaaaatagttcccaactattttcgctatttaaattcaattttccaaaattttaaagactgccatttaaattaaattctatttttatttgtttttttttactattcatttccactacggaattccaatttgctgatgaagaagccttactcagatgagcctctcttttctgctcctcatctcattcccgcccacattcatccacaatttaccacttaaatttgattatcttttcttcaatttgtttacattttcacaaaatttccacccctttccgcctctggtggcgctgagttggccatttccgacctgcccattttgcctcaggcatttttgcgtgggtgggccggaccggccgagcgctggccagcccggcctcagaacaaaa

SEQ ID NO: 9005 - DNA, 4331 bp, Heterodera glycines
ttgcttcttcatcaatgcgtcgtttttgttcagtagccttgctgtgtccttgggggtggacagtgatccttgaaaaaaaaattttcttgaaattttgataaaaattcaaaaagttcttacgcatccccctccactgccggcgcttcccgcttggccaggtccccccggggcgcccgggtttccgggagatccgggtggtcccgcatcgccagggggcccaggcggaccaggctgtgcgttgccctagaaaaatgacagtttgaatgatacaacaaatcttgataaaaaaaaatacaggtgatccaagttggccagcttgtccgggctgtccaggtggtccaggagggccaggtgggcctggcggagcaccccctgaaaaacaaaaagaacaggggtaaatttgttaaaaaaaattcagttttaccgccagtgatttgtccagggggtccgggagggcctggcgtgcccgagcctccgggtggcccaggcgggcctgagggtccaggcggtccgggaggagaagcaccgctgaacattccaattcattaatgtataatttgcaataaaattacaataatggcaaataaaattctttaaaacatttagagcactaaaaacaagacttactatccgccctccggcgtgctccctggtgctcctgggtttccaggcggaccttttggcccaccgggtccaggcggtcctgaaatggttttatgagtgcgttgtttaaatcagcagcccaagggtatggattcaagagtgatttgagctgaagcttatatcagcaaacgaaattgattggccaatatgattaagagcctatgatcaggtttatctaatcagtgattaaggttttttagaatttccttccccacacggttataattttagtggccatatttgccgatagattttgctgatcagttccgatcagagacatttcgttttgtcttttataatacgatttttttcctccaggtgccatcattggccttcctctccacgttttcccctcacctggcggccctggagggcattccggagtgcagctgccaccatactcctgaggcggcgcttgtccgtccgcaccgggctgccccggtccgcccggctgtccgtcattgcccggctgtccgtccgtgccaggctgtccaggtggaccgggtgggccggtagtgcacgtacattgttggccgccaccggaagtcgcactgctggaggaagcatagccaccaaatttggaatagccagcgcttccgccgccgcttcctccactgcttccgccaccgccaccgctggacgcgtaaccgcctccgctgcttccgcctgcgcgcgcgtagccgccactcccaccgccgctgctgcctccggcctgggcatacccgccgccaccaccgccggttccgccagcgcgagcgtaggaagaccgtttggcccgttcgtttccggtcagatgctggacctaaaagggaaaaagtaattaattagagcacacaaggaaaattattaaatatcgaaaaactataggacgcatttttatataaaatatcactgatcatgaaaggtagttctgcccaaagtaatattatcggatcatttagacgaagttaaggaataaaaatacaataacagtttttatgagggccgaatttgtaccattatacttacgctttgcaattctaaatctggtcaacattaaaaactgattaaaattgatccattcttccacccaccttggcatattcatcccacaagccctgggttcggtgatggcaaaatgccagctcttcctgcaacgatgactgcacatactgcatgtaattgtacagcattggcactgcaatcactgcagtaagcatcgcggcggtgccaatggcaacgccaatgaatgccgaccgtcggagctgtgctgactcgcgcaacgcgcttttcgggtcgtcctgttgcagctcattgtcatcattgccgagcggcctgcggtccaattttgtcattttgacctgaaaattggcaaatattcttaaaaataggcacaaaactggcatacacaaagtcaaattttgatgtaaattgaagtaaccaggccaaactatgaaactttaaaactaaaactgagtaactcaaattttaaaaattaataatctttaaaaaatttttgagcatcactctcatagctttattaaacgttccgataaaggtgggggaaagctaatttgctggcagaagcagtaattattgttcaattgagcggcaagatgaaggtaattggctatgcgcttgtctttgcgcaactcgtcagcaaaattggccatatttggcctttgaaagtggcttatatacattgcgaggaggggagtcagtcgtcgcgcaacagcgacagtgagcggtcgcgaaaaagcaacaaaaaaatgatcacccgcacccttcccacccccttccccagccattcgccacactttccgctcggtgtctgttgcattccctcccctttctctctctctcgctttgatcacttaatcattataggcagaagcagtgatcagaggctttcaattggggtgggacaaagtgatcaattggtgctgctgatgatcggcctgctgccggtgaaagttcgcagagtcacccttccatcgctgcttctcctctcctctccctttgtcacccataaatcaaaatgaagtaaaacgcaatggaatgaattacccattgttttgctaccttttttaaagagaagcattgctttttccgcttcttggtgaatggaattgctcgacccgcgcggggaacggaagaaaagcaaaaaggagcgaaaggtgatgcaagcgcacggcgcaaggccatcaccaatgctgttgttgccactggcccagccaatcaaattaaattaattggctgttaattagtgatgggacagacacaacagagaagtcagacagacagaagcgcctgagggaatttaatggccgaaggaggtgaaaggagaagaagcagttccaccctggccaaaacataggaataactcgcgccagcaacacacccacacccatccaatacacacatgacaaatccgaggcggcgcctttctttgttcattcggtgggacaaaatgagtaattaacggacaattgggaagagaagtgaaaattggtagacgtatgggtgtataaaagcagaaaaaccattaaataatgattaattaatgaaagcattttgtcaataatgcacaaattgtgttattgttgtcccaattggtattatacagcgcaaatggagtggaaatggtagtgacaataaaaatgcctaattacacaattaattcattaaggaggcaaattgatgacactcaattaaacttgaacaataagcaaatattataaattgaataaatgaataacaatggaaattttcgtaatttctattgctattaatatgtttgaatggcaagtgaaagggaatctcgattaaaactgttcattttttctcggtcagctgatttttgtcgcagtgagttttgtctaatgattcgctcccatgaattttgactaatttactgacaaaatcaacaaccgaattatggcaaaaagtaatttatattcaaaatataaaaaaataattggccaatttttaaattttgcacttttgcagtttaggtggcccatatgaaaaaccaataggagaactttttgataataacatgtcattgattagtgactcaaaatgtataatttaataaaaagggtccttttcatcaggccacctaaactgcaaaaagtgccgaatttgtagaaaatcatctaatttgctttagtacctcgcctcctctaatggaaaaaatgaataaggggcattattttatatcggaaaattaaatttaaacgattgagaaagctaagaattaaaaattaaaaaagttccaaatatttaaatttttctttttatttattttttattattaatacaatttaatgctttttcatcatgcaaaatggagacgtattatcatttcaccttcggttccacttttggccatttgtcgccgtcggtccgccgcgggcgaaaaagcaactcatttgtcagtagaaaaagaaagcattcagcaatcagctaataatgaatggaactgtgtgcagaaaaagaatcaaaaagtaattaaagaaaagccaaaattaaagaatttgaaataagaaaaagcgaaagttataaaaacagtataaccaatgaacactgtacaggaaactgattatgccttttgcaacaaaagtatttttgcgccatgaaaaacctcgaaaatagcaaatcgttttttttttataaatttgtatatg

SEQ ID NO: 9006 - DNA, 1637 bp, Heterodera glycines
  unsure (1)..(1637): unsure at all n locations
gcatcacttttgcacggggttcaggttcacatattaactaaaatagtatcacttcaatttttggaatataaacttttcctttattttaatatactaacttcttcaaatatatattttgaataatatgctattttacaattattcagccaaatattctctattttcatcataattattaaaatatgaacttttccacatttttgcttattttttacacaaaattaacattaaagaaacatttaaataaaaaaaacatttttgagaaattttgtaaaaaaaatttttttctgttagttttctaatgaggttaaacaggccatttagctgaggggacgttctacttagtaatagcggttttttgaaaaatccaaaaaattgacataaaacatgtaaataatgccaacatatggacataaatcctgaaacatagaaaaatacgaaaatatggttatcgaaagaaaaatacgaaaatatggaatatcgaactcataacaaaaactccaaacaagctaatacatgtttttcgttcatttcagggcacccacagatcagacaggaaaaaaatatggattccatatattattgtacaaagagttgagcaggaagcaggaccgggaatttttcgggaccggtacttgccggacctgaaacgccgggaccgggacctggattttcgatcgggactgggacaaagtggggcttatccttgagaaaatttttttccagatccatgaatattttcatgcttggttgtataactaataccttttgaattttaaatttgggcacgaaaagagagtgttcgatgaagaaaattgaccaaagtcccgaaaatggaaaatctgtaatggaaacaatcaaataaattggtcatcctagatcaattcgccatttgtgagcttaatccgtgccaaaaatttcatcgtggcgctttttaagttcatctaccgcctcgtggtccgatttgtcgtgtcctccaaaaaagcgctaaaatattttctcccacaatggcaaagtcattctttgtcatttggctaagaatttttctctgaaactaattttaaatgtattaattttctaattttaatttgaccttcatgccaataacaccgtactgatgggccaaacggaatttgaaaatggccaattttttacttttggtcatcaaaaagtcaacacaacgattttcaacagattccaacagataacgattggccaacgcaagaacattttccacacaatcatctgaatattttttgtgtgtaataattatataataattaaatagtgcggtgattttgtccttataaaaactaaagtaggccgngcccgggtgctggctcggacggcaaaggggggcaatttggaaagggcaaaaggggagagagtgcgggaggaataaagggggaaaataaattccgaataaataaaagaagtttatttaataaatataaaagatgtgtgtgtgtgtgaaaacgcaaatgcttataaggagagaaaatgcgggggtggagcaatttgtagagacagaaaaacgtaggaggagcaattttagacagagaattgtgcacaaaatgtagtgactaatgctaaaaatgtacaaatgttcaatggagggacaaaatcacaatttcaaa

SEQ ID NO: 9007 - DNA, 4390 bp, Heterodera glycines
cgccgaaacggcggcgccgaaacggcgtcgccgaaacggcgtcgccgaaacggcggtgccgaaacgatacagactcgtaaatagaaagaagtaaaaatgaatttaagatgaaaaataaaatttgttctgcttcacataattgaacattcttcttcggccttttgcagtaaattgtttcgaagactgattgtgtgtttggtatttgtgtctttgagcaatttgtcaacaacaatctggagaagaatgtattaaacattttagtgaaaatgttttttaacaaccaagtccaatctgtgtaaaagaaacgcccacccgtattaagtaagaggaagtagagggggcggaagggtcgtcgtcgattgcgtagaaaggcgtcatgttcacgcggtctttgaccctccgctcttcacagaacatgttgaatgcttgtgacaaaagctggaatgggaagcgtacaatcggtgatcaggggaattacttaaaacgactgaccaagtcacagtccaacgcaccggcgaaataaatttccttaattcagcgtctttgcatcgttaaaaatgtcgcttattatttactgggtttctctccattattgtagctacaatacaaaacaattcgacaatcagctgacgattttcagggtttgcgatgtcgctcatcatcgactctaaaaagggtgggtaaggaatccaattcaaggaagtcgaaaacaacaccaattttgtatgaaaaattgagctcatgctgcgtcataacatgcagagttgggtactgagaatggatttggacaactttattggtttcaatttgtagaacattctttgattcggattccaacctgaggaaggacatggcctgaaatgacgatgccttgctccactctttcgagtatcttaaacagcaatgccagccattttctctgcgaatattttgaccgaccttccaaactctgtcgtacaaatttgtcggtactcggttcagtgccccgttcaattttttcatttgcaaaggcgaactgaaataagaaaaaataaataaatccaaatgcacaatccaaacttacagcaatctccagacatcttgctttgtcaacagttcagcaagcagatttttgacaactgtcggaggcaaatcgaaggcacaaacgctcttcccactttctattaaaaaacccaaattaaaaaatttttatgcaaaaaaccaaattctctgcgaatggaaccctgccaaatgcgttcaaaaaatgtcaccaaatcattggttttaatcggagaagcggcagttccgttgttcaatttttgacggttctttaggtcttccataacaaagcacagaagcatatcaatcgcatcagtgtacctttaaaacggcatagttaggtaagcattatgatttgcaatgaaatttaatgtttacctaatgaatttttttccaaaaaatagttaaatattggaaaatgcatataagtcaccatgccaaacgaatggtgagaacgccgtcaaaggaggcacttttctgagttatctgtgccaaaaaggaatttagaatgagatatttcccacgttaccaaatctgaacatgcgattatcagctcttgctgaaacaccgcagcgtacgggtctatgcaactgtcgaacaaggccttctgcaattctacgggcgttgacggcgaattgacggtgatttcttttgatgctttttggccgatgataacccaaaagtgcattttcgaatttaattcaaatctataggcaatttttttacctgttttccacggaccaaaagattagtgaccgatctgttgaaagaaaattaacgtgaaaacagagaatgaacaggtgtattacggcgccaaactgatcatagttttgcgtaatttagccgcgcaatagcgcaccaaccaccaatatcggaattggcacgcttggctgtacacacgttccattcgggcgagaagagtttcttaacccaatcgatgtcattattttggatgtgcttgcctttggacaacctccttgtacaacaaaagtaccagggtaacgcatttgcaacacagcgatctaaaaagaagcattttggagggaaagaggaaaataacccacggcaaaagcgactctgcgaaggttttcgatattatttcgggcgattatttgatactaaattaagtgtaaaattgggaggggtgaccaaagcacgccgatttccatcattgtttccgtcctttggctatttacaataataaaggctccaccgaccaattcgtggtctcccattccgctcaattgctgctccgatagtaatccttctaacttttctggcggcactttcctcagtttggtccgtgctcggagcaatgcttcttttgcgtcaatttcttcaaggacatcgacatcaaactcgacatcgtctgggttgaccatgtcaatctgaaaatggggaagaattggcattttgtatagaatggagttttcatttggagtacaaacatgttctatacagccggtgttgatcaattgcttaataaatataaacatttcaataggttatgaagaatgacaccactgacatggattcttcccagccgaactcggacaccatttacgaagccgtttttaagactgaccaaaaggtccagcatatttgaaaagtacctgaaatagttttaaggaggttccatttaaaactattttactcactctccggcgacattttcttcacgcaaaatcatacaaaaagttggcctaaaaggagtattttcgtaaaagaaaactaaattcatgcataattgtaagtgctaaaatgaacctgccactcaatttccaccttctcgaaatgaattccaaatcaccctaaaagcacttcttgtccaaaactcgttttcccaattcaattgcctttatgtcctcaattaaagtcgaagagtccgcgtttgtgtagaaatctttcagctcaaaaatgagcgggtaaatgaccacggtattcccacaaattcgaaatattttcgacgtgttcaatggccccaagggtcgcaacggtcggccgccaaggcccaacttttcgtctcggcccaaacgctcgtacaatttcaccattcgccatgaaggccaaatctgagagaggagacaaacaattagtcaatgttttgttagtttttccaatttgtacttttccaaattcttcggtcagacctgaacgggctcaacttcgtggggagtttgtgtggtgatgccataagtggagagcatcatctgcagctgagccgactcggagataagcgccacttgcaccacgggaaagcctttcatgcgaccctcaaaaaacaaaagtaatccgaatgaacgaagaaaaaggaagagacggacgtgaaaggccgatgaaggcatcaccggcatattccgaggccgttgactggccggcaaatgccgataaatcgggtcaatgtcactgggatggattagccgttcccctgaaaaaaattgcaaaaataggatgagaattaaaccaactggtgcattagccacacccactcaacaataagccgatgacaagcacagcgttggaccaaaggtggtggccaaattcgtcgtgagggaccggataaaactgctgactgttcaattcgtctcgctcgtttttcatgtgttcctcactgatgcaaaagcattcaggacaaatgagcatacaatcgccgttactttcatcatctgaaagaacaatttgcaaattttgagaatgcttcgactgattaagcaactgttgttattgctgccgcagttaaagttttttcggaccaaaagttgttagtatttattccaatatttgtcagccaaaacgttgtcgaccttgaaatagagctgaaatcgataaatgaaaacataggtattttcatgtttttcacctgtgattgaaatgcagaccaagatgtgaaatttgcttattttgtatatcatgtaataagtcattaaagacaacaacagtgtatgatttggcatataacgtaagaagttgtattcagaaaacatgtgttcgtacgaaatcggcctggcccggctaaaatgtacaaatttttgaattccctttttgggcactaaaatgctcattaatctatttaaaattattagttggcattctgtcgtcgtcgtcatcatctccattgtcgccaaacccagaaattgaacctcatcaacaccgtcggcgttggcgccgtggaaaaagtgaaaaaaaactaagtaaaagtgcaaaaaaacaatcagcgagtaaaagtgaaaaaaaagaatttgtgaggagtcttagcagcaaatcgatgaagagcagctcgtatcggaccaagtcaggccgacgtgtgatggaggaattgttgccaaaagaagtgcttaagaagaaatcattt

SEQ ID NO: 9008 - DNA, 1315 bp, Heterodera glycines
  unsure (1)..(1315): unsure at all n locations
cggcgcgtcgaatcctccatttccgtgcgaaatccgtccctaaggaagcgtcgcaggccgaaccgtccctcgaggtggcgcaggcatttgctaagtgtcgtctcaaacttttggtcgtcatgggtcgcaaaggaagnccatccgatggtcaaaatcaatgacgcgtcggtgtttttggagttggactcgcgaggcaacaaagtctcaaaggtcgttctgttgcggttgtgtccgtcaatgtctgtgattttataaaaaagaaaatatgcatcgcaattcgcaatgacacagtaaatgaatgactgaccaacgtaaatgaccgagtcactggtccctttgtgtccatatgcgttaaaaccattgaccgactcgagcgcggcctgtaattggaaaagggaaacaaagtgactaaaaccaataaactgcactaaccttcacaaatcccaggctggatgagtgcagttccgggttgccccggttgtatcgggtccctctctcccaaatgccaaagtccggcgtgcgataagtacgctcaatgtaaaatacgaggttctgcagaaaggccacctcgtggggcgtgtaaatgatttgagcaccggccacagtcatttcgaccaaaacgagaatgaagagggcgatcaggtccatttgcaagtgcggaaagagcgcattttccaacccggcgcccgtctgaaggtcaaagcgcgaatgcaacgcgaattcgggcgagttgttcagtttgaaggcatttaactaaacgaccattgaattgtctaacaatgacaatttgtttctttctccacccattcgtcccctaattgaagttttggtccgatcaatggcataaattgcaataaatgcccaccttgtccaccagttgcatccagcaaaacagcaccccgcgcatcccttttatggcggtctgacacagttccgtctctctgccacggtcatcgtccaatctcctgttattaagtgtaaattttatgcccacgattggcaatcccatcaattacttctccagcagaccagcctttatcttacttgtaagcgagagaacaagcccaacaagcgaacgagcagtaaattgtatcccgaacatagccaaaatcggaatccttagaatagcgcgggaacagaccagtagtgacactttggtggtcaattataaggcgcctgactgttccattatttagcaacattaagcccattaattgtccattacccaaatcaaagacgcggtcaacatcaactcgtatgtgctccaatgttttgggttcattgtgtggaaatgtttaagagtcactcataatac

SEQ ID NO: 9009 - DNA, 2186 bp, Heterodera glycines
cagcagtcgctgagaacgaccctccaaatttccacagtttccgcagacagaacgtcaacctccgaagttgtcgcaattgatggcgttaacggcggtgattccacaaagtcttcggcagatgttgatggtcgcaattcgactgattgtagtgcttcttcttcgatgttcggcgtttgaatagctgaaattttatggagattttttttttgtgttaaaccattggaaaactcactttttctaccccatcgggctccaattgcacgttggacaataggatacctctcttcttgcttaaaagtagtaaatgttttgcggcataaattctttcttgccatcaaataagcaggaaaaatgaataatccctgaaacacaatggaaatgtttattagtgatgccaaacggatgaagacagagggaggcaattataaagtttatccccacactttttcgaaatttctaattgtataaaaagtcatgaaaacatgctttcaaattggtttatgtatattatgtgaattaaattacgatatcaaaaatgtttcttcgattctttaaatctttactcataacacaaaaacaacaacaatgcaaataaggaaatcgctttgtttcccctctgtaaccgctcagaaacgaagttttgtgaataaccatttgctctttccggctttgtagctggtctcaaattcttttttgacgctaatgatggcattcttcttctttcgcggctctttgatccactctttgttcaccaaactcttgtccaaatcggcctcgaatatgcaacgagttggcaacaaatgctggaggctggtgaccttgaggaatggtttgatgcgaattcgcttctccacttgcttcttccccatcttcttggtcactttcagaggatacctttagggattttgataaaaccaagaatcatatcatgaaaatacttgtcgattcccgcaatcaatgcatgtccatacggcctctctgatgagccctcgtcatagctcttaacgacgacagccttacgccccgcatagcgtccactgagcacaatcaccacacgtcccggcttcatgattttgaccatttttgcaaaagcgccaaaaaaaacaaattaatgtgaaatgaaaatcgtcagtataagaatcaaacaaaatgatgaattttaattcttattatttgtgaaaaaatatttttatttggctggcatatcatcacgcaaaagcaaaattcaccagagatttctttgtcatacaaaatacaggatcaacagcctccaaccctttatgtcccaaaagactaaggccgtaaaggccaaaaacagtatggaaagggtcagattcatctccaggccgatcggcgatccctcccttttcatcatcttgactggcgattatgaagtgggtgagagattcgccatcaatccaatgtaatcgttttatgatggccaatgatgcaagcacccaccaagaataacacacatcaggcagtttctcgggccgtccgcaaagtccgccggaagggcattgtctattgaagcaaaagataataaacaaaacatgtatttgaatggaaccgttcagccagccatgttgcggttcgttccacatcaataagctccaagcaaccacaaacagagagtgttccaaggcaacagtaaacctaagcaagttggtagcgatttactcaagatttaaaaataattcaaccccacctgtccagcatgactttcagagccaggccttgttccaaagccgccatcaaaattgtaacagttaataacaaattcaactgctttatgaacgtcaattgaaccaagacgattaagaaaatacagagatgcagcagcacagaaagaaaacctcgtgtcaatctctcccccgtgatcaccggcaaaactcccatcattttgttgtaacgatttaatgaattcgacggtcgcatccaaatttatctgaagatcgtttttttggtgaaaataaaatttgtcacctacaatatcgagtctgccaatgataacagccacttgaatcgcacttagtgtatgcaaaatgtgtgagtcatggccatcagccgcagcaaaaccaccatcttcattttgattttcttttgatgaggtcagctaatttttcttcgtcgtttatattttctcccaatactttgagtgcagctaaacaccagtaaatgccact

SEQ ID NO: 9010 - DNA, 1944 bp, Heterodera glycines
ccaaaaatttttttgaaaaaaactcccccgaaaaagtgttgagaaaaagatcagcagaaataaaaaaaaattttggaaaaaatctgcgggcgcaaaatacaaaccattagaataaaattacccattttcatttcatatgataaatttttacgcgtccttggatttggagaaaattttcccgttatgtccctagaaatcattatactcgtccttgggaggcgagtttttccaatgggaaactctgtataaaatgcttagataatacggtttttggcaagaatattttttgtaaacagaaaaggttgccaaaaacaaacacattttgcctaaatttgcatgttgctggacaaaaaacaaactgttaacaaaaaaagctcttcataatttgctgggcacctgttttgcgtgaagaagaagcatacaaaagcaaattgatggtttgtcaaaaatttgattgttgaaatgaagaaatgcgatgactgagtgatcaatatgatcatgtgtctgaaacagtgatgccaacccgaacccgaaccccgaggtttttctcaacccgaaacccgaagttttttgagtgcccgacccgaaacccgaaaatttttctcaacccgcggcatcactggtctgaaacgcgggggaagtttgggcactaaattaaggatttaaaaaatgaaaatatttttaattgtctataattgcagccatctaatttaaaagcaaagaaattttaatcaagttaggaaccgaacatttttccacgaatatacgctcaattaaccattcttattttgctaaacttattattagggcccgcatttctaagtttttgcttattttttctgcggctttaactcgacgagaaatgcactaaaaacacattttttgttcgaaaattttgcggtttatcgccttattcgaccttagaaatccatattttggatgttcgcccttaaaaatgcatatcttagatgttcgaccttaaaataagtttttgcccttattttggcgttttgtccaaaatttattaacaaaaatgcaataaaaacgaaaaatgcatccctaagaatcgaccccaaaattttttcggaccccaaaaaccggaaaatttccaaaaaaatcattttctaacaaaatttcacgagaatattgaataaatttcaattttcttaaaaattgataaatttatgtcaaaaataagcaaaacagcgaaaatttcgcttttctggttgatttaatcagaaattactttttcatttaaatcacaaaataattttatattttcctttcctcgacccattaattatgtttttacaatttctgtcaataaattgcactgaaattttcaaaaatttcccggcggcgcctatcggcaccgcttgaccctgaaaatccttatttttcttgagaaatttgcctcaaaatcgctaaagtggtcattttttggagaaaatttgttaacaaatctcataaaaattccaaaattttcccggcggcgcctatcggcaccgctggaccctcctccatgttaccaaaaagtttttgaaaaaagcgcgccgttaaaacgtgtaaatagtcactccttttcccaaaaattttctaaaataatgaaaaatgacataaaaaaattttttaaataaaatcatcgaatactttttcaagaaaaatattcaaaaaaccaaaaacatttttgagatcacctaattaaaaaatttagcctattaaaatatttagaaatttttttatgatatttttatatattttgaaaaatttccgatttccgtcttccgatgtttttggggtcggaattccgattttcgacttccgaaaatttttggggcctcggaatgccatccctgtttcccacccaccctttcgcgacggtcatttgcacttccttttttgtctttccctttttctcatcctttgctatactctctcgtttct

SEQ ID NO: 9011 - DNA, 1232 bp, Heterodera glycines
  unsure (1)..(1232): unsure at all n locations
tagggcactggttcccctatagaaaaatttttaagatttttgaaaaattgatgtttatcattggatatatcatttattgacgcctgaagtgaaatagagcagaaatttaacacttgcccatttttggccaattatgttatgatttatttccaaaaaataagccttctccctaattaaaccaatttttattatttttatgcattttttaatttttaataatgttttcatctcaagttttttttgcccttttcccaaatctttcccccgcagttttgcccatttttgggtcaccgtttgcccaacactaaaaggcaacaatttgaataaataaaagagaaaaacggaagaaaattatgagttattcaaatatttattattcttatcttttgcccatcgcatttttctccaattttgggtcatcgttttgcccataaatttatttactttttggcctataaatatgtgcacaattacagcggctatagcagaatttagccttcatttgctcatgttttttctgaatgcattaaacaaattaaaattttaaatttagattttaaaattaaaatgtcatcattcacgacttcttcatcagcggacgaattttctcctctccaacgtaaaaaatttgttaaaattcataattaaaatacaataataaaaacatttttcaataattaaatttgctaaaattaattttttttttttttaattaatttttcatttttagcaatttttccaaatctgagcacatcggaggaaatgagtgttctgattgccagaattgctgagctgaatcgagcgaaaacaatggagccatcaatcgcaagttctgaagtgtttggacaagacggatacggtagagaatttaagcataattgaggggttacagtatgaaattttataatcaaagaaatggttttgaaatttattaataaaagaaagcgaaaaatttggccctattgctgcagttcacacgacaataataaaagaaatggcctaaaattatttgaaaacttgaaactatagcaatttatagaagcaccacccaaattaacattctttgtatcatttatagctccaagagtccttttattctgtaaaatttcataaaatttgttttgtttcaaaaaaagtaatggccaaaaatatttagaaaataactttttttaaatagaccanaattatttatttttaattttattttcattaattntattttgaggaatgaa

SEQ ID NO: 9012 - DNA, 2205 bp, Heterodera glycines
aaaaattttgtaatttttaatgcgatttgctaacagttttttgtcaaaaaataaccaaattttgcacaaaccttatattttcttgataaaacagtgacattctgccataaaatttcaaaattttgaatatatttaagaaataagaacaaaataagaacaatagcccgaaatcagaacatttcttacaaataagaacagatcacatccctggtgtaatgatttttcacgaaaaatttttaccagctccataggaattttttttctgaaaatttcccgatttcaagccattttaggattttcagatcaccatgaaggagtgatcttatcaatttggtgcaattaagttttttgttcaataccaaaagataagttcaaatttattttttcacattttttaatgctcaactcaaaaagttacagccttctgaccccaattttggttagaaatttttttaaattttcgagtgataaattccaaaatttacttaattaagaaagcattaaatattgttaaagagctctgcacaagaaaatatcatcatataatataaaaacaatacataaatctaaaagatgaatttaaaatataaataattaattaattaaatttaagaatatgaaatataaatgaaaatgggtttttttggttttgtattgcagaagaggcgcaaaaagtgaatgaatgtttttggagacgctaaacaacagcacacacatacagctaattttgtatagcaaaaagtttttgtttggtcattaggaaagtggggggcttttgagtcgttgtaaaaaaataaaaaagttgggatggcgttaattagtgatgaaatcattggaaaggtcagtcatcctccgatcagtgtttccatgctaaacactgctattgattgatcgaagtattgattggcattgattggagtcgatcaatcgatttgatcacagcaccgaatgtgtttgtgtggcattgtgttgtcgtcgtcatattgcaaaaacgcagttggcccccttttgcgcgtagcagtcccggcaaatccattccaggcgcgggtccttgcagaattcttggaacgcttccggcgtcagatcggcacattcctgcaagggaagcaaaagggatggcattttttgaaaaactttggatttttcaaaatttcatttttttactttctatgaaatttaaattttgtttgtttttttttaattttcggggcggggatgacgtaatcgattcatgttgatcaggtcgcttaaattgcataagggaaggagaccaacaacaaggcccccctcctcttcaaagtccattccgaaatttgcttttgtgtagaaattttttgcaaatttttaaaaatttgccatccctcaacaaacaaaatcgggtcaaattgaaaaaaaaaattggaataaaatgcctgatcagtgatcacttcaacatataataatgacctttgggtaaagtgggggggagggggggttctaaatttttccggtcagtaaatttgaaagaaaaccagcaaagcaaattcttgaaatatgtttttgtgtgaaaatttttaaaaatttaccaccccccaacaaacaaaatcgggtcagaatgaaaaatgttggaataaaatgactgatcatttcaacaaatgacctttaggtaggggaggaagggaatgatgggacaaaaattttctgatcagatagatttgaagaaagcctacccagtggaacactctgttgcagccctggctgatcgctgtgcattggatgcccttgtgttggtcctgaaattcattttttttaaaagtcatggaaaaatcttggcgttttgttggatttttttttaaatcagaaaacatacactaagttccaagcggcacgcttggcactgcccgctgagttggattcgctgctccggcatcggcatcagcgtggacggcggcgtgaacatggcggaggcgggcggcaacgaggcacgcttcagtgacgagggcgaacggccaggcactggaaaacacaaaaagatttttaaaaaattttaaaaacttcaatcgccaatttccctatgaaaatagtgtgtcaaaaatgtattagaggctaaatgtcattttgatcaggccgatgcctacaactagttgcagatgaattatgccacggcatgatcggtagaactggtcagctcatgggccggaagccaggtcccgaacaatttatccg

SEQ ID NO: 9013 - DNA, 931 bp, Heterodera glycines
tttttcacgcagccacaatttttatatatttaaataaatatcgtctactttattatttatctggtttaccaagaaattaagtgagctgtgaccgctcattctttctcatcagatgggctgagtgatagtgtaaacgtactttacacatacttttttattataattattttttattgtttagagttttatgtttaatttgcaattttataaattttttgatattttcagttttcactactaataagttccactttctttgagaccaagagttcttacaattagcacttttttttagtataacttttggtttatttcacgatattttagaaatattgttgaataagataattggaatatcagttcggttcaatttaaaattaattatatttttaaggtaaatataataatttttgaccgaaagtttccagaatcttggaaaacttggtaatcatttttttataattttgaaattgtttttctttatgattcttgtggtatcttttattttacaaaagaattttattaaaattttatccctttttttaattttttagccatttcctttatccgcgaattagaaatattaaaaataaatatactaatttcttctaaaataaaatttagagaatgttttttacatagatggtaagcttaaatatttatttttattgataattgtttatatttacatttattctcatcttgttcttcttcacaagctattgtattttcttaaggatatttaaattatgaatatctgcattggaaaaatatggttgataaggcctagactcaaattaaacaagcaaaagtggccaaatgccttcggtactgaatgattcgtttttctgcgttgaaatttttcatttgaacatcattgcaataaaacggaaaatactccactaagaatcgaccaaaatttaaaaaaaaa

SEQ ID NO: 9014 - DNA, 4174 bp, Heterodera glycines
tggctccccttcggtcatttctgagtgattttcctccttttttgccctttgactcgtccgacacttttccggcaaaatgtttattgatgatgataaaaaatggtcagaaattggtcggtgattaaaaggcaagatgtcgttggatatatggtaaaagaaattggaggagaaaaaagcgataaggattatgatgggggggtcaaaaagtgggaataattcagagggaagaagattacgatgatgataaattggacgagtgaaaaagtgaagccaaaattagacgccgaagggcacaaattggcggggaaaaaggctaaacaaaggaaaaataatgaatgcaaatggccaaatggaaatgtccgatctgagaaagtgtaaacaaaggaatagaaatcggagtcagatgtgaataggcagaaaatttggaaagaaaaggcaagtggtgaagttgaagaaaacattatgtaaatggcaaaaatgaaaagaagtgaaatttaaagcaaaagaaagaaatgaaaatttttgtaaggagaaaaaataggaggggtgaaaatgtcgacaaatttaagaaatggtcttcatccgggaatgtcccctccggattcctgattagcatcgtcctccccggcgcttcttccctcctttgttcgggtgaagcggttgggcgggggagggtgacagaaaattccccagcccactcattttcctcatcctctgacaattccctcgccatgccgtcggcgttgaagaccaagttgccgcttcttcctcctccggccctctcgttggcaacaaaattgccgacattcccgccggacggcgcagcaatggcaccgcctcctcctccaatgataaggtgtcgtcgacgtcctgtccgccctctttcgggttgtccgagcggggagtttccacgtttcctcccccactttgccctccccggtgaatctcccttcccggggtttttgccggttttgccaccgttttccacctcagccagcatgactcgcagttctaccgcctgtttctccagctctttaagtttcttctccttctgcttcttggcttcttctgctttcttcggctcttcctcctccttcttctcaagctcacttttcaccaaggcttcagctgccatcctggccttcttcgccttgacaaccttttcggcgcactcccgcaattccgcctcttttttttcgcttgaaggaaacaaaaatttaattaacaggtatttatttgtaagataaacaaaacgaaagtcctcagattacttgactgttttcgctaaattaataatgttaagtgtggttttgaaattttttatttaattttttaggtataaaaaatagtttaaaaattattgttaattttttccgttttggggaacgaattcgaggaaaattttttaaaattttatttcaggggggattcttggaattttctaagcccaaaattctgggtttaaaataaattttcaatctttttaaatttttttgctttttaaatagctgtttttaaaaatataaaaaaaaatttctccttcttgaccaattccctctctttctcacccagacttgaaattttgaattaataatatggtatttttctttaatacatcattcagaaactaattgcgattttcttcgagtatttgttaaagaaaatatcagtgacaaaaaaattatatttttcgaattaacttaaatcccagacaaacaatatttttactgctaattgtaagaattcaaaatgattcataattattttgtgcctcaaatttttttgcttggtgaatgttcaccccctaaggatcgattttttgtaattttaaaaatacacccttaaaaactgaaatttttgagccttttgtaagaatacttggaaaaaatttgtttataagaaatgtaatattcttttagctgtaaattttgaaatcaaaatttatccaattgtctaaatctattagatggttgtgatgtttttcaatcacatctgaattttgtaaaaatttttggcatttttttagtactaaaaggcatttttggtagtttttaaggcatattttaatgcaggtttctaaatttttatttctttcatcataaaaaataattgtttatattagtaaatttcaaataagaatatagcatccattatcctcatacaacaagttgaagagttgtttttaaactttgttcaagtattccttttgaattttaaagttttaaatatataattttctgtgcgtgtaatattattatttttagagattctttttatcccagcgaattagcgaaaatttatcaactatttttttataactttcaattctatcattttttttaatatcaaggttaattcctttatgaataatttataatcttctacaaaattctttcccatggtgatgttactccatgtgttgggtaataagagctttcgtttttggttcctttcacataaaaagtggtaaatcaacatttaattatttattcttaatatttatcgcttaatttttaattcgatatttcttatattaatatctcttttatttttatttttgcaaaattcggcttttcacgtcatcattgacccctctccacgacctaaaattactattatcatttgccttgaatatctttggtagaaatttgaaggtgttcatttatttttttatgccaattctgggtaaaacaaatagtttaatgcgtttcatttaataaaaatgtttcaaaattttcgatcattttatatagaaatgaacgtgatattaatacgctgtttttcaatattatttgaataattttgtaatttaattttaattttcattgagtaaataaatttaaatgaaaattaggattggttatatatatttttatttgcttcaaaagcgttttgtcggctcgtcacaatcgcggcaattctgtacctgttaaggattttaaaaattttagttaaaccaattatttaataatgaagattagttttggtaattatttgctattttaattgtgtttgtattaatttacttggacaaagtgcgaatgtattactgtattaataccgtaggccaatctttgaaatgctttggaattgatttttagttgcccttttttgttttgccaatatttagggctgaattttgccattgaatttgggccaatgataaatttgttttgcatctttaataatgggctttttggtttgccgttatttgccaattgtgctttgaggattgggcttttattttgccatattttagggctcaatacgtcatagatgtttgggccttgtgaaagtatttatttgccttatttttagtttttggcttatatttgagtttggcattccttttacagaattgttatattatgctgtcgcccgcgcgcggttcaatttttctttggaattggtcctttacattgccttttgcctttgttttctgcccatttttggcttaaaattcagtttggcgacgcacttaatgattttcatttcttttcatgttcaaaatttgagcggtaggtatagttttatcagcggccaggatttttatgttgggctatcgcccttgcgcataaaattgtacaatgaggggaaaaatggtcgaccttctcccgaatgcatcccgaggtcggtggaaaggttgtcattcgacaaccatccggtactagcagttaagccgtgccgggtttcgggatccggtcctgcttcgttccaaccccggagattgatctccactaggccgtagcccccgcggaatggctcggtcggcttagggggagggccagtagtggtagtgatgactggagaactggctaattgacctcgatggctgggaaagccatcgcttaagggaaaatcccggtgggcgttccaatgaggaggagcctctccctcctctcaaataaccatcctagtcgggactcggaaccgctcagttgggcgccggcacgtttgggcgccagcatgtttttagctataacttttttctttgtcaaccaaatacaacattgttgatatcattgtaaagcgtgctgggacgtttcgtaaaatccgccaccttgggcgtttcgtaaaatccgccattttagcgattttttcgacaaaacatggtataactttgcttaaaaccaaccaaattttacattcttggtaccattcgatagccaagctt

SEQ ID NO: 9015 - DNA, 1486 bp, Heterodera glycines
cattggaaagctctaagtgtcctctattagcctgcaaaaattttaggttcaaaaaagttatggccagaagaattcaaaaaaccaaattttccaagttttttggccataaatttgttcaaaattaacaaaaaattttgaaattttgcagactattagagcatctgaagagctctcgaatgataccaagattgttggatttggatgacaaagaaaaaaagttatagtcgaaaaacatgtgctggcgcccaaccgtgcgcgcccaaaaattttgaaattttgcagactattagagcatctgaagagttgggactttttgcttgtcaataaatgattatcaaccgtgaatatgacctagaatacagttgcttaaaatacaaaataaaagcagaaatccctttatttttcacaaaatcccataaaattttttatttgtttatttgtaacaaaatttaattatattatttgtcatattaaatttctttgccggtgatcatatatacttataatatcgctatggcgagaatttgagttgaacaaaatatatcaaatttattgcattgtgtgatttttattgtttatctttaatgccttctttatcttaatttattttcattaacatttaaacagcagacagcagtttattgttttatttcagtttatttttaaatttttcatggatagaagagcaaccaaacacggtactttgcaggaaacgtgaagtgaaagagttacgctcactttttgtttcatattttctaatatttttaacagatttttaatatcattcatttaataaaaaaagatgcctacaattgctaaaggcaaattcacatagcttaatcagtcaattttaaattttaattgaattttttttgaaatcgaatttaaccatagaccaaaacacaaagtcaaattcattttaatgaattaatttagaggataagaaaacgtttgtaataattttcttcgtaatactttaactcatttttaatacaattagtattaaatacattaattaaattttttatgtaaaattttaatccaataataagctttttatttttgatttaaaagacagttttttaaaattaattacattgaaaattttgatattttaaatatttatcaaattaattttattttaatattattataaaactgcgaaggatttcattatgcagatccttttcacattttcttttatcgttctgtggactacttaatttttttcatttttgccgattttaaattttttatatttaaaattgttaattcattagattttttaaatttagatctttccattactcgaagataaattttttatatttaaaattgttaattcattagatttttaaatttagatctttccattactcgaagatatatatcttatattttatttgattgtcagggataaaaatattcaccagattttggctgctttagcgcacaatgctgtcattattacatgtttctaactttt

SEQ ID NO: 9016 - DNA, 6423 bp, Heterodera glycines
gaaattcaaaaattttccaaaatattctggaagaaattcgataccaatatccactataattgtggctttacttttgtatttgcaattttaggctgacagtttgaaaaataaagttggactcaaaactttattaaaaaaaattagagaccggcgggatcgggactggatgccgaattcgcgatcagcgactccgaaaacccatggaagcatgtttttatgacttttaaaacaaaaaaatttttttcaaaaaaggaaggcaaccatcgtaactattacaccaaaaaattcattgtcaaattatccactgcccgtcccactgtaatagatgcctgatatcccgaaataaatgcatcaacaccgaaatctccggagtgcccgtcagtttttgctgctgtaacactgaagatttgtgcaatggacagtgaaaggagaaacaataataaaactggacgactctcaatacatatattgtcatattttatattaaaacaattttcaagacaaaaacatttaaatatttgggcccgtaacgagaggcaaactctgaaaaaaattaaagcgaagtttacggagtcttttttcgaactcgttacaagccatcggacatccgtccgccttttctcttcacatccgtatcatccatcccttacaaaacatcggcagatcagtcgtcaaatgcgtccatgctttgtcttcctccgttattcaaaagttgggtttgcgccaccgattgagtcgtctgctggggggtgacggcctcaaattcaaaacaaacagtcattcattgacaataagtcaacaaaatcagaagattgacctgctgctgtgaagtgccctggacaccgctaactggcgattgactttggtaatactgaaagattcgcaaatggcaaaaagtgttttaaacgaccacctgcaattggtaggccatgggactgatcttaaacccatataatctgaaaacattgcaattagtcgattgtttgccgatgtgtccgagggaggacttgccttggcacgtactgtttgttcggacgtttgggtctcagtcccgggtggacaaagaaaaacatgtgaggaaagccagtgccttaaagggatgggatgctttaagtaaagcgaaaagaataccgctgaccgaaataggcaccatcggtgtgctgatgcttggaagagcgcggcacgtacacatcgcagcaacgcggacaatacacacggaccatgcactcaccgacaacgtcagaaagacctgaaccatggaacagtgagaggccaacagataaaacaccaaccgatgggaagaactgcctgattttcgcagtgtacccgagggcatgtgccaaactcctcattcttccacttctccatcatttgctggatgccacgattagttagaacataacgtgcatgtatcagtccgtatagcatctaagaatggctggcaatgagtagagctggggaaaatgtgtatcatacggcccagagccaaaacacccaacgacatctgacaatgagtctttaaagcggttcaattttttaaccgggcttgacgtcttaaaagattaagcatgcttctttccccatttttaagttttaaacaaatttaaagattgaaacagtatttttgagtttgtttttggtaataaggtagttttttttttcgttttggctctgggccaatgatacacatttaccagagttagagtgcttttttacctccgccgcctgctccaccaaatccgactgtccctcctcatagtcatcatctggttctaaatccaaaatcatgtcgagagcctgtcgaaagtgcggcacttgttcagaaagtccagtcaaattgaagcggtcttggatgtactcctcgtcaacctacaataaaatgtcaagatttatattatatgtcataaaacttcgcaaaagaagtcattgccacgcaaaccacaaaaccaagagatccaagaaacttcttcggaactgctcattctaagtcacaaccaatctaaagaacaaatatgctatgtattaagccaaaaatcatcgagtattttagattaaaaaaaaacacaataggatttataaataggcgctatttgcaaagcaaccttttgaaattttttttcactttttttggtcaatttttttttttttgtttttttgacacataatgatgaatattaagtattaacagcataattatggcgaataaaaaatatattcacgattttttatctcaaaaaaattttgcaaaacaatagggtcccccctttggtttttgataaaactcaaaatttgtcaatttttaactagcgctaaattttcttttaaaatgtttttttcagtttattaaatagtatgcaatacgttccatgttaaaaaaacaaattctgcattaaaaataaacaaaaaaaaaattgaccaaaaaaaagtgaaaaaaaatttcaaaaggttgctctttgcaaatagcgccaaatcgggcaaatttactagagtgccacgagaccgggaatttttgccaaaaccgggaccgggacttgccgggacctgagaagccgggaccgggacctcgattttttttcgggaccgggaccgggaccgcaagaaaaaccgggaaccgggaccaaccgggaaattttaaaaattcaaaaaaattttaaaaatttaaaaaaaaattcaaattttaatttatatcaagtgaaaataatacaaaattatttggttttttatttaataaattaaattaatgaaattttcaaacaaatttctttaattatttcaaacaattaatatttttttggactaaatgattgatattattataaattaatatttgcttttcacataacattttttcggcgcgctttttcaaaaaatttttgggaaattttgaaatttgggtgtaatttgttacagattttcaacaaaaaaaagttggtttttgtgattattaagctcaattggtaggattttcatttaaaaaatgataaaatatgtatcaatttaaaaaaaaactatgaggaatcatattttctctataggaaacccacgagtatacaaaaagaaaattcaaaataatttaattactgtagaggaattaaactatgggaaagaaaaagggaaagacagggagactagccactaggccatccgcacaatcgtcgactttacttttaaagaatatattaattattattttttatttttccctttgactccaattttcttcactaatttttcactcagacccccattcttaccagtgcttgtttttcccggttcccggttcccggttgccctaccgggaccgggacctgagcttttcaaaacccgggaccgggacctcggatgaccgggaattcccggcccggtcccggtcccggtcccgtggcactctaaaatttactatttgtcctaattttctgatttgtacttattcggaggggttcttagaaatttgcgaaatccttaattcgaagattctaccaccttattttcattttttcctttttttctcgattttggtataaaatttaaaaaaatagttattttttagtccaatttttatgtataatatttagagctgggatttttatgtgctaaaaatcctgaaatatgtaataaaatatgttctaaaaaatgctgaaatatgtgctaaaaataggaaaaatattaattttcgcccgcacaatcgcaaatcaaatacgtgtcaaggcgtcctagggtaaaattgttttttgttttttgataaattattttttaaattgaaagtttcagcagagaacttcgaaatccaatgactcaattaagaactcgatttggctatttttgcattcgaaataaataaaaaaacattttgaaaatttgttagaagtgcttgatttttacaggccaggacgttttcgtacgagttgatttgcaaaaaaaattgcatttaaataattttgttaatctttaagtaattacttttaatgttttgacaatctaagcttttattaactacaaaataaaccagcaacaagtatgtcgattggagaaaatgctatttttgggcttatctcgtcgtaactaagccgcaaagaaatatatgtaaaaacataaaaatcccagctctaataatattcaatggcgcaaaatctgtgaaaaatgaataaattttaaaaatttcccggcggtatcctggccttacagaagcaggcgagtggataagaattttttctctattaaaaagcaaaaaaaaaaagttttatcttctatttgttggcacatttaaaaaaacaattaccgtaatatcaccgtatataaacattgtaattgtttgtttcgctggtgaatttattattttttgttccccttaattaatttgtgatttttgctggccgaagttctgcgaaaaattttttcaaacgaaactgtgtcaaaaatttccaaaaaatttagattttctttttcaaaaaggtggcttcgtttgatgcacgacttggcccataaagaaattttttttatggattattatgctattttttgtaattttctcttttatttcaaccgcaaaaaatatatacagtaaaacaattcaaaagcaatgaaattcgtgccgaaattgagggccagtgccaaaaaacacaacaacacaacattgctccatttttcttgtcattgtgaaaactggaaataaaatttgccaagagacttgagactgacaagaggggcccgcccatcaatggtcgagattcccgagaattattagacaatttcttgacattgtgacaaaaaacaaacaaaaaactttggcaaaatgcctcctgcgacttggcactactgtcgagattctcgatgagtcccatttatggccgagattctcgagagagaattctcacaactgatggtgggttttcctcctctctagcgtccatggcgaaaatttgtccggcaccgtgatcaccaccaacttttcctcgtccgccttgtcctcctcctcctcccccgtcttggccacattctttggcaatctgtcctggccgataccgtattcgtccgcccacttggcgttgtattccttcacttctgtaaccgctccatttccaccatcattcttccgacgactgtccatcgctgaataagttggcatactgtatggcagctaccgtcccctacagtgtgcccatgtaagtttatgaacaggggctatacagtaccatctcaggcttatacggtaccccaaattccttaaaactaaattgtgcgtactctgcagggccgttctttgcgctaagcgccttataatgggcttacgctacgattttgggtggaatggcgctccgagtggctgtaaacgggctatacggtctctgcccgaccgtacggtaccctaagtcccgtgaattattcgccttattgtacaccaatatctagccatttcccgatgaattattaacaagcatttgccttccagtttgtgccgcttctcgtcaaacacataggagacggtaaaaccaccgtactcgtcctggaactgttcaagatacggattacggtggtcgtttcgccgacgccgcttcagcccgatgattgtgcatgtgtagccgggcattggaagaggcgagtaaaagttggccggaaatggtggggccaaaaagggagaagccgctgggaacgggggaggaagtggaggcggcaacactgaaatggtgtcaaagttgggttaaatcatgccatgccatacaacgggcggcctgtgacaatgccatttttggaaaacattttaaaagtgccagcgacccgggcaccgaagaaatgcttgagaaaaacagaaaggcccctgaatcaaaaattttttgtgggggggggggtgtggcgtgaaaattggagttgccgtcagattagtagaatttttgtgtcattgatctcgaatattaatctcggcataattcttcttgcttttgagtctctgggtcaaatctgagtcttgagaaaaatcgcggggtttttttaaacgcgcttctcttcaatatattagtgaaccgagaaaaatttctaattagagtttcaatctcgggtattgggttgaagtcccggtcgcaaggcttggtctcgtctcggttttttagtcgctttcttgaatctcggtatcaagtagagattggacaatgggttccatcgatttttacaatgaaaattgaaaaaatcgaaaaaatcggccatgcaggtcactagcctcatgccttgggctctattctcggccttgagtcttgattattcgtttttcaagcacatgctacgaaaaagtccaccggtaccgtcaagactccctaccgtacctggtggtggtgggggcggtagaggaggcactgctggcccaaatgggggcataatgagcggtggcgtttctcgaagaattggcggcgggggcagtgccggcggcgaaag

SEQ ID NO: 9017 - DNA, 3676 bp, Heterodera glycines
aaatgcttcattaaaattaatgaaaattctttcgttttagcattcaatcataaaaactgtctataaaacacttctatgtttttcgttcaacaaagtgaatgatttaaaaaacataaatattcatcacccgtaagtgatttgtcattttatttaacttttaatttggctgtgccaacaaacgacgaaatgtaaccgcataaagattttacgaaaaaagggtgggacaattaacatttttactttaaattgaattttatatttataaaataaaaatgaaagaataacatagataaatgtttgacataaaatatatgaggtcatcagctcatgaaaataataaacgaacacggaaataaagtttttaatattattaaataaagagaatcaaaacttaacattgcgcatacttaataaacaacataagcaataaaaaaatttctaaggaataaaacacagacagaaaatcacatatcgccataaatttgaaagattggtagtttttggtagcagttttacataaaaatggccgatttttgaggattttttccaaaaatcagagtaaatcagtaaactttctcaactcgtaaattttcggtctcaagctacactactaattagggggtccaattttaccaaatcccccccccctccctttaccacccatcaattaaaaaatgccgcaaatattttgacacaacattctgttataccaccaccatctccgttctcttctcccgcatcgacagcaaaacaacaaaattgtcacccctacgtcatgactcccccggcgttgtcattgaagcggacgcaattttcggtgttggcgaagtgatttgattttgtgatcgatggggttggcgaaatgcgcaacccccgccggggcgaagcgaccaaaaatataaaaataatcacatttttcgcgtcgttatcgacgtacgagcagctttgactgcttctatttattcccgaaattagcatagctccctgttagtcgttcattggatcaattataattagagcttggcacggtaaaataatcgcgataaatgtcgactttaggaaaaccctctaaaagatagataataataattgcggcatttattaccgcttactaatttatggaaaatcgcgcttaccaaaggaaattatatagtgttggaatttggcaatttgatactattttcaccgaaatttttagcattgttttggcattttgaattaattttacatttactatacatttactgttgttacagtaaaaattgaaatgggcttaacactgttggccaccatacccgcttcatcatgtttacagtccgagcagcgcgagctgtacattgacaactttacattgatgttcttcgacagcttaatggtacagttcaatggtgtttagaatgaacttttctacgatagtaatggaattaattggtgcctaaaatttggaaattaaaataataataatttcattaaggttgctttgaactctgcttttccggaacatcaagttcaatacgacttctttgaatgtaattttattttaaattaattacctttataaaaaatattttaattttttataaaatgtctttcgaattcaatctttctgaatttcatcaaataatttttttacacaaaatgtgaatttaatatatgcaaaaataaaaatttaattcgatagcattatttattgattaatgatgacaaacttaatatcactactaattatcataattatgagtaattcaagctgattttaagatgaggatgaggacggtgaaattatgcgagtgcgtacggacgaagagttggccacctttttgtccgatttagcaccaaattgtgggcggcaacggcaaccgctcaaaatttgtttgagtaaattgataaaattaatacactaattaagtgtgattaatttgaaggaacgtcgaccaattgccatcggcaacaaagcattgattttgaggacgatgaacatgaacaacaacaacaaaaccaacagcaccaatttgagccggaagagctgcagtttgttgaacgactgtcagatggccaatttggcagtgtgtataagtgagaaaattaattgaatgaatcagtccttgaaaaatccttatttcgaggatttttccgaggttggccacttccacaaaaagtgcaaaaatcaaatatctgattttttaatatgttttttatcaatgtttttaataataaacatgttataatttaataaatgatgctgaaatttcaatttttgtgaagtgactccttatatcaggtaaaacatttcttttttgtcaatttaaatatacttttcatcaatttctagcaaattcggaggaatttccgaatcccacacaatttattctctcctcccttggaacaaacaaaattgttctggggaaaagttcctcgtgttttagagatttattcttaaatttttaggtataaaaaatttctgacaaaaaattattggaaaacgggattctttgaatggcgcaatttattaaaataaaaaggacatttatcctatattttttaattttctcccccttggaacaacaaaatgaggcctacaaaattcctggctagcggttttcgagtcgagaaatctctcgggtttttggtggcctcgactctcggacttacttttttcatctctcaactaacatacagagcattggacacccgaaatgatcggatgatggcggtgaaatgtatcgcggtggatggcacaagcggcacacggcaaagtctgctcaacgaaattgccattcttaaggtgctcctgtgatctgatgcaggacagcagcagatctataatccaagcaatttaaagaaaattaaacaattattatttaattggagcccattaattaatttattaaaatttcgcattttagattggataaaaaaaccaacaaatataggaaactgaagctatcaaaatgcttgaaatttgtccaattaattttatttcacttttcatacttctcagtagaggtgtgcccatgcgaacattgtccaattccatgcggcactttttgtggacaatcaactgctcatttgcatggtcaagcaaatactaattacttttcaatctcctacttaggaactaatggatgccctgtcgttagaccgttatggccaaataactccgcatgttctgggtaaaatttaaaaaattcaaatgtgtactacgccaaaatgaaaattactaatacaatataagtgtgtagaaagagggggcgggggctgagggggctaatgcccccccccttcagcaagatttttgaaattttaagcaattttcttaccaaaaattctcaaagaatttcccggcggcgcctcgctaccgccggaacccatgttaccttatttttgaaaaatggagaccaaaatggcaaaaaaataataacttcttttggcgaataacggctaaaaatttgtaaaatacacccccctaattcgggatttcaaaaaaaacgaaaaatgcacgcctaaaaatcgaatgaaaaatacaccccctaaaaatcgaatttttgacttcggccctcccccccccccgaagccaagggtctggctaggcccttgataccatatttgcttgaaaaaacgctctctatgttgatgggtacaggctttattaagggggtcagagggttatgctttt

SEQ ID NO: 9018 - DNA, 1673 bp, Heterodera glycines
  unsure (1)..(1673): unsure at all n locations
gttataatagcaaataattatttttaaatcatacagaaaaatttgttttataattttttatttttgccaaaagcatcatggaaatttaatgaataatgtgtaatttatcataaatcacatttttatttaaattgatttatttatttaaattttaaattattttgacgaaagctcaggcaaaaataaagttacttaaatgactttttgtttagttttttttaaatttaatattttatttatatttacataagtgtggccagtgatgtgtggagtttgggcatttcattggctgaaatggcattgggccgtttcccatttgggcctggatcagcagttatggtgccaaatctgttcacaatcgaatcactgatcagcaggccggaaacgatcgccaccgtaatccgtcagccggaactgagtgccgttgggtacggtttcgaccgtctgatcgctggatggtaatcgggaaatattcaaaaatgatttgaaatgatgagcagtaacattaataataagctggaacataaattgattgaaggaaaatcccatttttgggtattcaattgtccgaagaaagaaaacggtatgccaaaattttgtaaaattaacgcattaaattggaatgtgcgctaaatgggcgtaattttgggaatttcgatcacaaaccttccttgatttttataattttctaattttatttcacctgaaagccgacaatttttagggttgatgaaaattttaaagagtttcaaagggaattgccatttaaattgaaaaattattaaaaaattgcatctcaaatggatttttattcactaagtttggaatttccagtctcaatttaaattttataattaattagtttttttgctttagagagatatatttaaaagaataattaaaataaaaatttaataatattttttaaaatatttttaaaaatttctttcagtctttcactaaatccgaaagaacgtctcagacccgaacaaatttatcaacacgactttttggcagctcatagaccaatggaccaaagtttggtggccaaatttattgctgaaaagaggcaaaattcacaattttgcggaaataacggaataatttgagaaaattcacaccgtgtcaatgtttaaatttgaatctatgtaaaggaaactatttaattgaatataagaaaatgcataacttggtagtagaattttcattaaaaaacaatttttttttaatgaatgttttatgtaagtaatcattgtgattgtccaaaatgatcacataaaaaattctcgagggggtggaacgagacgggaggggggaggggatgacaaatggacaaatggacagtgtgaacaatcggacagtaaaataacaaaaagataagaaaatctcgtcgctgaaagggatcgattgtagaaaaaagaaaaaataggcaaataagttgatgattttttggggataaccctaaaatgaaaagatgtgaatcgaaggtgtggggcagctcattcaacgccaatttcgttttcttcgttcaccattaagctatttagttaaacaaaaaaaatgtagccgggggcgggggaaaccatcggcagaaaaacggcgacgactgaacacttaggactatcgaatgatgagaaggaaaatcttgttggcttttgagcanaaattataaa

SEQ ID NO: 9019 - DNA, 3577 bp, Heterodera glycines
tatttaaaaagtggcaattaaaaaaattcaaataatttatttttgtatttatttactaatctaatcatacatttggatttttgctcaaattccgatatggcaccagcacaaaattccattcccacagtaacaacgcccatttcccaattactgtcatttttgtgtgaattgcccattatccccttgagcagttcgatttcgctgctgctttttgtggacttaactcgtcccgaattgttccaatcggtcgccgattctctgctgaccgtttgtcgcaagagaattgagcgattaaaatcgggcgacgaaatggcgaaattaattgggcaaattgagtcgcaagtaaaggcaaaaagcatttttgggaaacgttcaaatacatatttaggacaaaaaggcaattcgccccctcggaattcaattggccattgtttgtgcacgatacgacgaatttcaggcaaaggaaaaaacaaaaaagagagaaatggacaaatggacacaaataaatggacaaatgggcaaaaacaaaataatataaataataattttgaatttcctttttcatttcacagaatgcgaacagtgagcaaaagcgtcaaatgtatcgtttaattcgccaattcgcgcatataaacggcgctgcgataattgtgggaatttgaattttaattgcataattaaattaagtttatctcagactttgagcattcgcatggacactttgctgaccaaagcgcgcaactttctgtccgatctgatcagtggagttcctctccaccagtttcaaaagtcattgtcaactgatccgcaacagccccttttcgttgtcccccatgggatcgattcgtttgaggtgaatcattttttgaactccctccatctctatcgtgatgctccttccgttcactctgtctcccctcgtttctctcatttctttgttgtctctctagctttttatatttctcagcctccttctctgttcatcattctctcttccttcctgttcattctttcaacgtatctctctcccctctctctcccccctctttctctctctctctctgctaatcattcctcttccttcctctacccctctttatctgctctttcctctctccctcctgtctctctctgctggtcattctctctccctcccactctttctctctctctctgtctctctctgctggtcattctctctccctcccactctttctctctctctgtttctctctgctggtcattctctctccctcccactctttctctctctctgtttctctctgctggtcattctctctccctcccactctttctctctctctgtttctctctgctggtcattctctctctccccctcccccaaggtcattaatccgtcgttgcgctctttgggctctttcagcgaggcgatgcttaactttttgcaatcgcttaaccaaacatttgctcaacagcaacaaaaggcgccggacgatgaagcggaggaaggagaggaaatgaaagagcaattggcagagccaacaatcgacgcattggtggaggaacggatgaaagtcaattgaggggagggggggggggaggggaatgatcaaatttaaaaaaaattaaaaaaaaaagtcgaaaaatgattgggcttaattaatccctgaccaaaagtggtcgtctacattttcacggattgccgatgcatttctcattttcatttttttcttgtaaattttagcaattggagcgttttacgcgtgaaaaacgcgaccgaaaagaagcggagaaaagagcagcggacagaagaaactaatgggaaatgaattgaagaattaattaattaattaataattaacaaaggataattaattaatttttcagaattattttttaatgagaaataaaaataattaattttttaaattaatgtcgtcattagcccatttaaccttttagattaattatttgcctatatttatttgtaattctttctccttcttttattaatcttttcttatcaattattttttgcttatttgtcgatttttacaatttttgataataataataataaatttttatttttatcatcagggattaattttgaaaccaattttttagtgcaagagttttaataaactttctgccattttgcacaaattatttttgctttttggcaccattttcaaatgccattccaattaattatgttaatgttcgccttaattagcccctttcactttgtctcctcccgtttctttgacctcgatggaatttggcacttttcttctcaaaattggtctaaattttcgggaaatgcgaaaggttccggggggagtggcggcataagtgccgtttttaaataatcatcgtttttaagtgcccggcgatatttacgccgatttattcaccaacggatttattgaagtagattgattcatttaaattaattttttattttaattttttctaattttggaggaccctttgtttgggaacggcgacggcttttgccgatgggtgccacggcaccgatggatttacgaaaagaaattcgaacttccggacgaagcgcacaaggcgagaagagagttttactggtcaaaggcaatgcgcagtaaattgctcatttcgtgcgcagaaattcaactttggatatttcgaaattgaccaattattgtgattaataattgccatttaaattcccatttaatttaattattttccccattttttggctaattttttgcttctccatttgtccggcatcgattcacccgcctctgttctgctgaacaatcggacaattgcccaattggacaaccaatttgtgtccaattccgttgacgtttggtccgatgttttgccccgtgaaaatattcttcgaattgaattcgaatcgcccgttgaggaggccaatttcagggcggaaaaatacgaagtgagagagaaaaagcacagattgaaaagcgaatttcatttatgctcacattaaacaataattaaatcaaaattttataaattcattaaattttattttttattttttaattttaggcttttcatggccacaaattgccccccgtaaaatttgtttaaataactaaaaatgctttcgagtgttttgcagcagtgcaccccgcccatttacaacggggagtgccatgtgcaatttttgcgcaaaatgcaggccaattttggctgggattggggcccgaggtctgtccatttggcatccaattaaagcaaatggcactaattagttgctcaattgccttttgagttttcccaccgttggcatttggcgtccaattcgcttagaatttttcgatttgctttccattcgacgcttttccccggtgatcagtctgggcaacggttaaaaaattccccaaaatttttattgtgaaattagtttagctgaatgttttgtgatttccgtccgcctttctttgatttgtgccgtcgaccatcaaatttccatcaaattgagcttaatcgaactcggaatggacaaagtccctaattatttgtccttcaattcattagctaattaacaccgctttaaggaatttatttttcaacggga

SEQ ID NO: 9020 - DNA, 4336 bp, Heterodera glycines
  unsure (1)..(4336): unsure at all n locations
ttcaccctcttttctgcactaaaagcaaatgcaaatgttttgaggatttggggcggcggattttacgaattggacgaattttatgagcaggcggacgaattgggtaaaaggcaattaattaattgctgctaattatttattaattaatgagttaatacgcatttatttgtaatccttcgataatttctgatggttaattttcaattttcgggcttctcatttggcaagattttatgttcgcctgctcattgtatcccatcgatcctcattttttgcgttcggtggaagccgaaattgaggaacaagtaaataaaaaatagggaaaagggacgagtgaatggcacggattggcattttgtggaaatgccattgtttaaccgaaaaaacatgatctctcccaacagcattctgatgaatgatagttacgtcaagataaacaatcacaaatcatctctgttttccgattgcgatcggatcattttttctggctcaatgccaacatttgtccgtgccctttgtgtatgatcggcttcacttgtccagactgatcagtgtgatcagtgatcagtctgtccttcccccctcttttggcactatccacattctctgtccttttcatgtgcttcgccttcggcaccatccgtcggtgctctgttgggcggggaacaatgaaaacgaattggccgtgcgttcgcaatggtatccttcgtgggattaccccgaggaggcccaagcgcgggactatgtgaaactgtacaaaaaacacattcaaacattggccgtcaagttggacccgaccagaccatttctgctgtccagcccatcgaatggaatcgaaacggaaaggcaaattaattaaaataaaataaattaaattaaaaaagtaacgaatttcagggagggcggagtgtctaaaaacccgggcgacccggcgtacggcgacgtgcacttttactcggagtcggtcaatctttggaagccgtccaatttccccgtgccgcgctgctcctccgaattcggtgttcagtcaatgcctttgcggtgattgggcacccgccgaagtgttgaatgaattcgcttttccatcagtgggacaatggcacgttggattggtccgtccgattggaattacaaaagcggcactttggtcagtcggcaacatcaccccggcggcgttttgaatttgccggcaatcgtttcgcaacatttcaatgtcttcgtttggtccccccattttcaattcctttttcattttaagctcctctcctccaacttttcttctctctctttgtccgccccttttttcatcgacaaattcgcttttctctcccaaattcatcaggcaattgcacttcaagcgcaaattgagcattaccgaaggtgaaaatagcaaaactgaacaaacccagcgaagggatggaatggcatttccatttcatcattttgcattttgattttgggtcgttttggcaaagtgccagttcagtgttccttggctgttacagtcactttttgcccttctgcttggaatttatctttgattactccaaaatgctctctctctttttctgaaggttccgttctcatttggacgaggccgggcttggccacacaatgtgcgcgatgtattggcaattgaacggtctgtctgtccattgcgtaattacaagcaactaattaacaaatttttcaattcaattaacagatgtttgggcagcgcccacttggtcaaccgttgactttgacttgcgttggaaagttggccaccatttcgtgcgccgttcgttctctccgctaatcgtttcaatggtccgtttggaaatgaaaggacaatcactcgattcaattttcatttattttttagtttttggactcaaatggcattttccgcctttggactgtctccgatttgtctctgtccgtccaaaatgccattgtgcgactgtcacttttcccccttcgcaacggactttccccccttttcactgccaatgtttccgtcccaaatatttctccgctttcctcccaagagattcctctcccgtaaggcattaattaattaataattaagggtaattaatgatcaaagcatttctctttgttttcctaattgttcagtgattggcctcccattgcctttgttcgtcctttctcttcttatgacgagggtgacttccttctcatcgccgatctgatcagttcccgtggtgatttgctaagtccccgtgccgttttgtaccccgacaaaatgttccacgcggggctctacggaagtgccgcggtgtcctccctcagagacaacaaaaacggcactttctccgtgaaggtcactctcaccaacaatgttttgccattgctttggctcgacctcagtgacgcgtttaaaaagtgccaaacatttgccaattttcttttatttttacgtttttttcagtgccaaccctgaagtgcttttcttttttgaggtcatccacgggcatatttcactaactgccatttttccatttacatttttaggaaaatgcatttccccgcagttttcgtcccaccattttttcacgctttcaaatttgtagaaaacccaaaagagttcgaatttggcaaagatgacatttgctttgatggcattgtgacganacaaatgtaaaaaggggataaattttatcatttttttactaatatttattttcattttcacttatttttgcacaaaatgtcattgaagtgataaaacagcaaaaacaaacaaattaaaaggaataaaagtaatataaacacacacaagaaagatgcacattatttaaatagccaagtgaaataaaccggtaaaaatatgaaaagtgaaaaaaagggaaaagctttggcattggcacataaaattgagaaagacatggaatttccgccgtttgatcagatcctaaatgatcggcccaagtgatcagaagccctccgggtgcatattcgtcctccgccggtagtcgccgttgacgtggacaaatccgtcttcgccgacgacaatcccttggacaattccctcaaagccggtggtcggcttgaacttttgtccaaatttcacctccaagtctttgagcaacggctgaaaagcaataatttacataatatactttatccatttaccgtatttgctctttttatatgccagtctccattaatctgccggtctccaattatataccccctttgaactaggttgaaaaataatctcccagtctccatttatgtgccgggggggggggggggataaatagaattttttaataatttatttggccggcttcttcgtgatcgtttcgtccatctttaaccgtttcagttgccctaaactcgcgcaaaaaagcccagaaggctgtttctatgcctcaaaacataaaaaattacaaaaaaaaacttcattttgatcacgttaaaaatttcgacattttgaccgacttgtcgacactttgtcccactactcccaaacattgttagacctgtcaaaacattgtttaacccatttaaaaacaaatatcaagctctacgcactcaattacccccaaaatctcccactcactgcgaaagccgacttttttgaccaaatttttagacaaatgaccaactcaactttgggctagggactcaaattttttaaaagaaccgcctcaaaatgctctaaccaaaaaccacctcgcccattacccacggcaacttaaaagccgctacgggcgcaaaaaaaacatgcaactctaaaaaaattcggaaaaattccctttttgaccagtttttcggacaaatgacctacttaactttgagctaggggtccaaaatttttttttaaatgtgactaggtgagctctacaataatatacaatagcgcctgagctaatatttcgctaaagcacacccgcccgagtctaactttttgagaccccttcctggccaggggctaaaggggggtcaccccttcaacttagtgctggcgcacaatttttttttttttttttaaagatcaaaacgattccatattttcttaacttttcattaaaaattccaattttttatgcataccggaagcaagaaaattacatatttttgccattttggggtcattttcagaagttctttaacaaaaaattcaatagaaaaaattttttttttgacgagatgacattttttggcgacatgttcaacatattcaaaaaattttccactaaataaatcaaccgaaaaataatctcccagtctccattagtctgccagtctccaattatatacccccttctgagaaggttgaaaaataatataccatggtatataaaaagagcaaatacggtatata

SEQ ID NO: 9021 - DNA, 4793 bp, Heterodera glycines
ggtttattgttttttttgggaaaagataaaaaaattaaaaaaacccgaaaccgaaacggtataccgaaaatttttttcggtttttttcggttttttaaccgaaaccgaccgaccgacaaatttttgagtttttcggtttttttcggtttttttttcggtttttaaccgaaaccgaccgaccgaccccctcttgtccggtctctaattttcagtgtcaatttccgtcggacggtggtcatcgtatggcggcatattgtgtgcgcgcgatggtccgatgcgaaagacatgcaacaacagttgcacgaccaccgctgcaacaccagcacgctcgcctaccaagcgtcgaccaagcgcttgttgcccaacgtgccgtgcagcggcagtaacctgaacctgcaccacgctcaacacgcagcggcggggacgacagtggcaccaccggcggtggtgctgtcacggccgggcagcggacagcgcatttcgctcgaagtggaagagggcacgccgatggtggccaaacgaatgccatgacgacgtggggagagggagaagcatcgcctggccaattcgagagtctcgaccaaattccgtccagggacacagaaattttaatcaaattgaatttaaaattcaaacccaatgaaatttatttgttattattgttcgtgttttcattcttcaaatatcaaaaatatttttgacatatcgcccgccaccttcatttgagaaaaaacaactgtgagtccctaattttatcatttaaattaataattcatatttatatttttgtttgtccattagttcgttcattttttctcaattaaatgattaattaattttgtataatcatttgccattatttccaatgattgtaaatatttgtacgataaaacatatgaataaattaataaataaccatatttaaaaaaacttttttccgcttatttttgtatggaattaaatttatgcatatttgaacatgtcctttttgcatttgttgattgccgttttgtttgactgttaattggtccattaattaattaatcggtcttcggttcgtcctttccttccctttcctcggcttcgttcggtcttttccgttcagtaagatggatttttgaacttcccaaattcatcgattttatcgatgttctccatcggcttcaacatcagctgatccttctttgtgtattgataattccccgaatcgtcagtccattgtttggcagtgccgtcgctcattctcagctcgagtccgcgcatttcctgcacacggccctacaaaaaatttttattggcacaattaggaacaaaaaataacttttattaaaccaatcacaaataaatggattaatgcgtcttataattaatgattttgaatttgaaaaaagaaattgaatgctgcctgaacatttgctgctaaaactcatcatgtgagtgtgtccgaccgattccattcgaccgatcccctctttttgcttttccctcactttgcttgcgtccacgtccttgagtttgaagctttgcgactcgcaactgaacaaatatttagtgggaaagtgattggatgtaattggtgttcaatgcttactcgccgccgctgattgtgagagtgatgtccttgaacgtgttgtccatggtggcactgccgagtccgctgcacttgcgatgctgcaacagcacgggcaacgtgaacacggtgctgtcgtctgcttgttctaatgaattaaggaattaatttaaaaaataaataaatttccaccggtgatagtgccattctcgtctttttcagaaaaaccagaaaggtcattccctttgctgagttcgaaactgcaaaaattataatgtacagccaaaccagctaagtgctgacaagtttccaaatcgtccttattttccaacctttgccaaagtctggccactaattcagcaatgatagatagtgttttgggcccggacactcactcgttctcgagcgcagttttggcttcttcgtaacaatttccggagaagaagccggtgcccggctcggtgaactcgactttcactttgcctttgcatgcggttttcactccgctcacgcacccgtccaacagcaaaagagtcccttaaaagcccgtggaatgaatggccatgttttttttaaagtttacgcttaaactcggcgccttcgggttcgcttgccggatcgttcttgtagaagtgaacctttgagataaaatgattaaattaaaaagtaaataaataaaatataaaatgttggtacaatggcacagtgacggatatggtcgtagttttcatttccgcattttggcatctaagcaacaaagaaataattttaaatgtagttgatttaattggtttgctctgaattcaattcgtacagtatcaatccgaaccctacagtaccaaagaaactgacatacagtaccaaatcttcaccaaaaatttaggcgaaagggcaacggccaattaaatgcctaccaaagcaactttgtagaagttatccacgcaactgtcgagtttatcgctcaattggatggagccaaataagtttccaaatttaatgtccggggctttgttttcatactgaagaagttttaaaaattaatgaccgatcataaaactaaagaaagtgagccaaaacaaatcccaaaccaaagattggccaaaagtctgctggtttttttatttaacaaaaaacccaagaaaagtaaaatcagagagaattttgtcagggtcttatttttttgcaaaaacaaaaagtttttgaaaagcaaaaatttgaaaaacaaatgtttgatttttctaaaatgtcaattgtgcagttttaaccctcaaaaacaaacatggcatgcgcagtattcctcctcatcgaattttccaccgctcgccatgctgcccttgtagcaggcgtagcaattgctgtccaccttttccgctctgttgtccccgaatatgtcaagggccaaccacggagggcgcaaatgcttcgggatgaatcccttttgtttgaccacctccgacttcaagcattcatcgtaaaagcccttgtccttgtccttcaatggagcgcacaccttttcagaatgtccggtctctgaatttgtaagttaagtgcaaagaacaaaaaaaagaaaaagaaaaaaagggactgtcggcggcatttgccacgaggacggcaaatgcaagcagttcagccgcgagaaggacgacggcactgacggaggagcacattttggggagagggcacacgaaatcggtgaacaaagaatgaagggagaagagggtaaagtgctgggtacggtaagtgtgtgggtgggttcctgtaaataacgaccattcaaaattttcactcaaggactgacattctcgacaacactctcacacggtatttgagttgttggttaggatgtaattacaactttacaacttaatgacccccctcccctctccttccataaatgaagctattatttacaaaaccctcagatcaattggttttggctattaaataaatatttttatcaattagatggaaaatattttttggaaaaattatatttaatggaacgaatgaatgaatgaaaaatgtaagcgaaaagaatggacagcaaaagtgatgacaaaaaaaaactgatgctgacgaatcattttcactgattcgctgctgctgatcgctttttcattcactgcttcggacggacaaatccaatggcagttttttgatttacatatcaaatgaatgcataattaactattttatgagtattcattatgaaaattgttggtgtacaatgaatgatttgtgcaaattagaaggactgaaaatatttccgatcaaccccagttttttgctaaaaagtcgtgaaaaagtgaagggtttttggggttgttgatcacgaatatggcatccattttggcctacttcaaatcccggacccgaattcaaacaaaaagtcgaaaattcgaatttttcagaaactcacatttatgttcgagcctgtgcacaatgattattttttgatgttgtaatgatttgagtttatttttgcttgttttaatttattttagaacaaaaagtgaattttaaaaattttatttcagactttttgttcgaatttgggtccggggttcgtaatatgtccaaatacatgtcagattcgagaccaatgttacaaactagcctagaacagggggggggggtgacaaaacccggaagtaccaaaagttgtgggtttatatattttttaggtttttgaccatttcgaggatttctaaaatgcgccagcacgagctgagataagttatgacgatttatttgcaaaaaataaataaagcagatagtctaatttttaaaaaagtttctttaaaatgacccattatttgaattttcataaattttattttttcctcgaacactttcatgaaattagtgcattttttcttagtccggtgatggtttgtcgtttgatcatttgtctgtccgtctttccttcccctctttccgtcctcgcccaattcaaatgtttggcacaatttggcccggtttcacccatccaccgaatccgcgttccaattctttggcggcagcgatcagaagcgcctcgttgaacggtgcggcgatcagctgcacgcccaacggcatgccagtgacccaacttttgctggtcggagcggtcaaagcggggaagccgagcacattgaccatgtgaagggcacggctttattgcttagttgcaattgaataaaggaactcgtattggactttcttatatccgctaccttcgtta

SEQ ID NO: 9022 - DNA, 1635 bp, Heterodera glycines
gttgcgcatcattaatgcgctttttcttcccttgcgctgttaatgatgctttcgttttgggagtgcgccaaaattggctgggtgccaacaaacaccgacacaaagcataataatatttagaattgattgcctaaggccaataaaattttttcaaaatgccgatttttgggtggcatcgaaatttcccaatggctaatgtcatcaactaattagtcgctaaaccatttaacggttaaacatctggtgggggactatctttgtgtgtgcaccgcgcgccgccacttagttctttgtcactgggtctcttctggtcggacatctttttttagtttaattaacactaattgatgcatttgtccttctctctctcctttccgtcgaccaccccgcgggggggggggggttcctataatttatgacaaattgatataaaattctcaaattaggaaaactcattaaaatagggagcgcgatcgctgtgttgcctttggcccattaacttttggtttttgcgcataacgctttctttttcttttcccttcattctctcgactcctttctctctctcaccgtccctctctctcttttgccctctttctttccctctcgttctctatctctctttctccctttatttgctcctctttctctcttaccgcctctctctctttctctctctctctcctctctctcctattttcgccttgtttctttctccctctcccccctctctgtttctctctccacgtcccatccgccgctctctttttttacatctttcgttctctgttcaaagggatgtcatctactgctttgtctgctgctgctcctcctgtgatcactaataccctttctgcctgtctgctcaccctcctcctgttgcccactctctgcgcctgctctgccggcgatgcgtctcccattttccggcactgtcttgccgcctgtgttcttccatcgtcccccgagcaacaggcgcttcatccgcttcaccaccactgtcccatcaaagagccaaccgcttttgcgtggtgggcccgcgaacattgctttaggtgacaattagttgaatgaccaacaaaatgccaaaagaaatgagtgccaagtttggcgacgggcgttattggcaaaacgttgtattcaattagacattattgggttcgaattcctgttttcgaaatttttttgagccgtcgggatgctgatttccgattgtcgaaatttagaattttcttgaaatttcaatttttcttattttcctttttcccatttgaaaaagatgtcgccaaagttgcatttggcataccgtcgacgaattcgcgcgccgttcgctgcccccgtcgtccggcaccaaaccgatcccaccccaattcttcggcaaatggccattcattccgctgattttgcgcattggcccactgtttgttccggtccaagtgcgtgtgggccattaattaaatttaattgtttattaaattaattaattgcaattttccaccatttaaaggagcccgcctcggtgttcttctcggtgttgaatttgtgctcggtggtcgcaatgcaaaagcgcattcgccgctgtgtgcccgcgaattttcattgccgcaatgaatgggtgaattttgggtggccggc

SEQ ID NO: 9023 - DNA, 2987 bp, Heterodera glycines
tacagagtcttgccaatattttgaataccgtcattttgccgcaaaaaacaaaaatttttgtccaaatttttttttaagtttacactacagccgatttaaacattattatttattgcatttaattttaatttataaatttttatttatttatcctataaaatcccttttcattaatttattgattttaaattttaataaattaaataattatttttaaattaaataaaagattatctgtttttcatttcttcttctttatctcacaaaaacaaaaaggttggcctccgctattttccatctgtgcgaccaccgtatcacggaggcgatggattacggtgcggcccttggcctcatactgtacacattttatgccagcacttgcttcattttgtccccgccggtgctccaattttgctgccctattcaaatgtcataaaaaacaaataaaaatatatttaaattaatttttgtattttttaagtgtccctcaaaggctcaaaaatggcattggcattgcactttctgttttttatatgcgctatttgctgtacatttttggcacggttagagagacaaaactaaatttgaattaaaaaattaaactaattacttaattagcttaaatgtactatatgatgttaatgggaaattagtgtaatttttctaagacgtcattttttcttttaaattgtaaaaaatcaaaaaaaaattaaccataaagttaaatcatttttggtaaaaaaaaaaaaaaaatttcatcatttttgatctgtaaacattataagaaattcatcgacggcaattaaagtatttattaggaacatggcctgatcacggattaaaaattatgaatttttgagtcattttttacctaaaaaaatttgcctcatggatggaaaagcgtaaccattttcactatcaaagtagcaaaaatcttcgttatggctaccaaaatgccaaccattgtgacttaatttgtgtcgaattaagccccgctttgactacggttggcacatccgttgctgtgtcattttgtccatggccaccgttttgctctttttggcatgggcattcgcattgacttggcttggccgtgcccatctccattcactgcgcattttggccacaactgtcagtttattactgtagtaaatttttgttttactgtaatttggctcggtttttttttgtgtatacggtgttcgggcgaatattacatcgtgatgatgtagcttgaggctaaaaccttgaccaaacccgggacccaaaatataaacatttctcgagaccggtaattgatggattccgagccccaaaattttcaaacctttctcagaccgagacttgttgactccaagacccaaaacctttctcaagaccatgaattgaccgaacaattgacctaatcccgggaaccaaaacatttcaaacatttctcgagaccaaaacttgacaaaacccaccggggcgggcccaaagcatttcacgaccccgagactcttgaacaaaaaagtttgctaatcgcataaattttaatgttttttaaattctttgttttatcagtgatttgttttgtttttgttttaagttccttctcggctggttctccgcttcgttcgatgtgttcttcgattttccgcctctcttttggcttgtcgacgcccacgcgcttttccatctcttttcaattccggtgctaattaattagttgcctaattatgcacttttgttggcatttccacacactttttcaggtgccattgctttgggccaatttcatttgtgccgaggcggcgattgggcaaaaaaagcgaaaagaaaaaaaaattgattggacttcataaaatgtagtgaaagttttctgcttacaattaacacttttgtacattccttttggtgtgatgctcgagacccaaatttcccgagactcgacaccaaaaaccgaggcgcttttctcgagtcaaaaccaaaaaactgagaatttgaatccaaaacagtgacttttctcgagtcgggaccgagactccgagcatcactaatatcctcatgtcagcttttgcggccgagcttaattatttttttaaagccttgaattttatgttgtttgacgatttcttgtttatgtaattagactcagactgaatgccgggccggtctacctcagttgggcacgcacggttgggcgccagcatgtttttcgactataacttttttctttgcatccaaatccattatattcgcatcattcgaaagcttaacatgtttaaagctttttctatgctattgcttcgcgattagcgcgaccaaccgtaagcgcccaactgagcggttccgtgcccgggcaccccgaaaagcggacaatttggcaatgtgaaattccaaaaaattcaaattcacaattcttttttgatcaaatttgtttaaattatccaatttggcacttaaacatagaaatttaaagtaattttcacaattcatttttcttcgtcttctgtttcctctctttttgagattctttctgtcattttccatcaattatttctttttcatcttctccttttgctcagttttctgagtgcaaattgagcggcgctcaattggggcgaagaaaacagtggcccattgagcgcgggcgagtcagtatggcgatggactggcgaggcctaaaatggaaattctgtcccgtctatttatgtactgtattattgtaacgaaacccgggtgtacggtatgcccgtgattatttgcacattgtcggtcacccttttttggtgcaggaaaatttggtgccaagtttaatcacacattacccctgataactgttattgatcatagagcccggaaccgggatttcggtactgaatcgggattttcgctcaaaaattctcaatgaaaactcatggaaattttctcaaaatattctttttgcctattttcgaattaggtaactaaatgtttttctagaacattgtttatatagaaaatgc

SEQ ID NO: 9024 - DNA, 2127 bp, Heterodera glycines
  unsure (1)..(2127): unsure at all n locations
atagagaaanatgccggctcaataaagttttcttagctctaattgatcctacaacccctgacactcttttgtcggttaattgctgctaattgattactcccgctattttttctccaattttctcactgaccaacaaaactggtgtcatcatgtcccattgctgttgttgttgcctgttaatcagcagttgctgttgttgttgctgctgctgtacagccgcggctaatggcaccgccgctaattgtgccgtttgtgcgcctccaacgccgagcgggaccagtccaaggccggcggcggcactgcccgccgcagttggcacttggccaattggtggcagcggttgtggcggaaagcgcaacgcgttggccagcaacaattgttgttgtacttaattttatttttttgactttcagtacgccgtaaaaattttgagaaatttcggaaattttaccagtaatcaaaccatgtctgatcaaatgtgatcagggaactcttaaatggagctcactgatcagtccaaaaaatctcatcatgtttaatcaccgataggttgtgtgtgaactgtttcgatttttagcaaatcataggctaattccaggaccaaagcctttgtttcggattcaataaaactgattgggttaaattaaaaacatttgatcaaactgctgatcagacttatcattaaattaaaaacatttgatcaaactgctgatcagacttatcattaaattaaaaacatttgatcaaactgctgatcaggcttatccaaattaaaaacatttgatcaaactgctgatcaggcttatcattaaattaaaaacatttgatcaaactgctgatcaggcttatcatctcaaattatgcgccaaaaaatgcggctaaattcataataaatataagcattaaaaatttatacattcagcagttgctgcccggggcaacgccgtgccggcatttgcgcccccgggcgcctccagcagagggggcccaagctggccaagtgttggcaataacggaaacattggccaaaccacgggcggcggcactacaaatgagcgagtgagaagcatgtatgaaatgccaaagcagttttttggattagaggctgaacatttcccgaggaatgtctttcacattattaattatgaagcagatgatcatcggaccaactctttctggtttttcgagagtctcgcttcaaaatgtgtatcccgattccgtttatgttataaaatatggtaaaaaacaacttttactttgccaattcgtactggtatcccttactcgtattagttttccctactcgatttcgttatttaaaaccatcagaatgggcgttatttaaaaaacaatgaacggtctcgagtctcgactcgagaaaagtcttggttctcgcgttttttgggtctcgggatttgtggtctcgagtctcagcattagaaaactcaaatatctgtctagattctcaagtaatggggttttcactctcgaacggcactaccgctcacccgccgccgccgacgttccagcgccgtttgtcgctgattggttggcggtcagtgccgcgtttgcgcgagcggcagccgccgccgagcccaggaagctggcggtctgcacgtacagtccggtaaccgcggtgcagcgacagttgtgcacaaagggcggcacaccaaagtcggcacaactttcgcaccaaccgacgcggaacaaatcccttgaggggcgggaaagggaggagaagcgtcgtcggcttttatttgaagtgccgtttttttccaaagcgaagggaccaacgggaaaattttgctttttttttatttgccaaaaaatgactaatttttaattacgtcaaaattccgtttccgatttccaaaattttttgagccgtcggaattccgattcggcgaaatttcggcggcgaaattatgtcccgtcccccctattttgtgtacttgcaggacagcgtgatcaggtcccagttgcagccgagctgctcaaactgttcagcacgtggtggtgggctgtgccgtcgttgttgttgttgttgttgttgctgtgattgttggtgttggtgctgatgtgcccgagaggactgagatgaacgggggactctagagatccccggtc

SEQ ID NO: 9025 - DNA, 3584 bp, Heterodera glycines
aaaaatgccattgtttaaaatgccttcagaattgagtgttctcctctttcttaccacgctgcctttctttggtgcgagcacttcgtttctccaatgctgaaaatgccaaattaagtacaaaaaaaagcacacaatttggcattacgtcgattgcattgcgccaaatttggtcgtcacgttgatcagcactaccacccgcgccgtcatttctgtacatgtcacagctgacgccttgcgtaacaccgcgcagaatgcccttcatcgactcgtgcagcgcgtccacaaagaattggatgaactcctggctgtcatgttggaacgaatcagcgaacaaattggtacggctggagatgaattcctgaaaaaacggcgagtcatgaaacgcaacaccaccatcaccacggcacactgttcaccacaccttcagttcgaatggcgccgccggttgtcgcaacaccaaaatgcttttgatcatttgcacatattccatgacgagtttgttgttgggcagtcggttttcgctgaaaaagaggggtgaaaacataaattgatggcattggacattggcattattggcacccacttttccatcagaaaattgctgagtgccgtcacgttggccaatgcttggagtgcagcgcccatgtagcatgtgttgccgatgttcataattccgcccacttccttctttttgtcgtctgcttttggtggtgtgctcatttttgcttaaaaaagaaaagcaaattaatttaattttatttgaaaatttgtcaggaaaaaaggaaagggggaagttggtttgaagcagggttggcgagtccggtttttgtaacctctgccggatcaagaaacgctgagtcagtgggtccaaatttttcaaatggattttgccgggttttgaaaaacataaccaaaacattttttggtggaatgaaaaacaaaaatttagacatttttgagcaatgaaaaccataacgacgctttagcgtaagaattaaaaaatagaatggagcagcagctgaagagaattcaaaaatagagaaaggcgtttgttgggagaaattaaaatgagagaattttttaaaaaatggtcccttttatagagaattttggcaatcgtttgcttttcaatttttaacttttcgatcattttgcctgaatttacaggggtataaaggggactgggtcgttttggcgcccacgttttggcgccagcgcgagttttttgattaacttttttcattgttgaccaaatctaacaagcttggtatcattcgaaagcccttcataagctctattagccttacaaaaaaaaaaaaaatttttagcttgtaaaaaagttattaagaaaaaacttccaaaattttggtttttttgttatttcaggttataacttttttgataattgtctaatcacgaaacaattgcttagaaatagcttctaaacacgttaagctttcgaatgataccaagaatgttaaatttggttaacaataaaaaaagttataatcaaaaaacttgcgctggcgccaaaacgtcggcgccaaaacgaccccgacccaaataaatctgtcgaaaaataatccccccttctccatttatccccccgtgtctaattatccccccccctttctgaggaggttgaaaaataatccccccggggggataaaaagaaaatacggtaagttatagccccaccatttaaaaagcaaaccgtaacaaatttgtgctctttccctcaaaatttccaaagaattttaccaaccctctagggtttttttcgattttttcgaaaatccctatttcactatttggggtgtccaggtcaccataaagaagctttctgaccaggttgagagagagatacaatagaaaaacccacaaaaatgctacaaaaaatgccaaaacatttaaacgtcaaacctgtacttttttttggataaaacaagagctcatttttataatatgatctattaaaaaattctttttttcttcttcactcatttccattttaatttaaggaaaaagaaaaaataataatttttcgtatgaaagctaatttgttctatgaaaactaatggcgaaggtgaaggacaatttgcatcaatggaggttggaggcataacagtccttccgtcccgtctcttagcaaatttctcccatattctgtcagtggcgaaaacgaagcgccaacggaaaagaatggatcggatcaattaaatgcaatggaccaatgaccaacaataatttggcaaaacagcaacagcagcaattattgcctaacccttcgctgatacgccgtgctcgattcataagacgtaggacaaccaatgtttactgtgaaacactcaaacaactgaaggaacaggacgccgcattgatcagccaaatattattgatcggacttaagccgaggtgaaaacgaaaagtaaaactgaaattgaagggataggatggaaagagagtcttttcagaggctatcaataagaatgggtttctaaaatgtatttatatattcatattaatttggtaatactatagatggtaccccccattttttcgaaaaaattttttttttgttttttaaagtcatgaaatatgtttccactagttttcggggtcgctgatcacaaatctggtgtctatttcgaccaattacgaaacccagacccgaattcgaacaaaagttcgaacatacaaatttttcggactgtgtttttggttcaaaaccgggctaaatacgcggaaacaaatagaaaagaaactcattaatacttcacaataaaacattatttaagccattttgaaccaaaaatcaaagtaacaaaaagtttgaatgttcgaactttggttcgaattcaggtctggggttcggaattggtctaaatggacaccggatttgtgatcggtgaccctgaaaaccctcggaaacatactttcatgattttagaaaacaaaaatattttttgaaaaaaggggtatcatctatagtattaccttatatttgtaaaaattgataagtacaacaaagacatttagatcggaggcctcggaattcgaatgttcgtgttcgggttcttccagttcgtctgtgattccctccgttgaatttgcgtaacattttcttgctttacagttctctcaaagccttcacttttcctctcctttccatttcatcatcccttcagttgcccttctttgagttccaactttttgctttttccgcccacccttttctatccggactttatgaaggggacaatccaacgaagagaagaacgcgaggcattccaagtgattttgacgaacgaaaagggcgacaggtgagtacaaagaagcgttgatttgtttctttctattatttactgttgctcactgtcaggaagttcgccttttgcttcaaatttcccagaccgcaaattcacaggggtaaacgcgggtcgatgcattcggctgacagcggaatcgacactcttcgttcaattggtgttggatggaattacatggaataattaagaccatacaggcacaaggggtgtctcagcccaagggtcatacgacggacgattgggaagggggggggg

SEQ ID NO: 9026 - DNA, 1361 bp, Heterodera glycines
tagggttgcgtccccgaccccgaccccgaaccccgacatttttggccattttcggggaaaaccccgacccccgacgcttcataccccgacaaccccgaaccccgacccttaaccccgatcggggtcggggttaaatatacacccctaagaatggcattttcgtgggagaaaatgcaaaaaagttagacaaaatttgaatttttttaaccattcgccaaatttttattaaataaagaaaatttgctcgattttggacatttggaatgtgttgtagaggttagtgcatcacattgacattactttctgtcgtgagttcgataccgtttgacgttttcttctttaattattttctttgtgacaaattgttttttttaaattaaatactcatagaaatcgaccaatcttggaatattttgacaaaatacatatcgaagaaaaacaaaaatttaccgaaattcataaatttttttggtgaaaaatcttagaaaatagagcttaattccaaaatttagcgctgcctatcggcatcacagggcccaaaaagtcataaaccttattaaaaaaattggctcaaaatcgcaaaaatttagcatattttggacaaaatctgttaacagatctaaccaaattttcaaaattttcccggcggcgcctgtcggcaccgccggacgccgtaccctttctccttaagtctttagaaaagagcgacgtgaaaaaagatgttttggaaaacaaaaaggtaataaaaaattttaaaatttcaagaaaaaaaaattaattctatacaaaatttctgataaaaaataaataaaaaaatataaaaacaatacaaatattattatggaaattaataaatattatttccgaaaaaatattaaaaaatttttgactatttggcataaggcaaaaattgaaaaaccccgaccccgaaccccgaacgatttggcaaccccgaccccgaaccccgacacttccaaccccgacaaccccgaaccccgaattttccaaccccgacgtcggggacgcaaccctaatttgcactatgggtacgccccagtgtcagacaaaaatgctcataacgccaaatagcgcatttggcgtaaatttttgcccgctatttcaaaatttacactgaaaaatgccttttgtattttttattttgatctgccataactcgtttcattcccaactaaactgagcaaatttggtataaaaaaaaagtttgtgaaaaggagaatctttttataagcgaatgctaagcaatttgacatcccagaaaaaagttgtgatactttcaaatttttatctcgttatagctcaagtcttaaactgctgttttcagcaaaaatgataaaactatt

SEQ ID NO: 9027 - DNA, 1236 bp, Heterodera glycines
atggcccacccccggttaagaatagtttctgattatgagcgaatacctttccaatggccttcgcagccacaaatgggttatccgaagaagaaacaaagtcggccacaatcgtcgaaagggcgtcccattttgaaatcattccgtcaaagagatatttgcaaatgaccgctgacccgtcttcttgaatgaaggaatcaatcaacctgcaattcgtaattgtttctcgtcaattatgtatttacagtttttacttatgagttttcctccaaatggcgaataattcctgcaaaactgtccacaaagtgcgctcattcgattcgtcttcaatgaaacatttgattttgtttctcgcaaaattgccaaaattggactcgaaaactcaaaagagataaatttaaaagaaaatcaaaatttatttgtaataaaagagaaaaccttcgattcgatctaatgaataatacttctcctttatgctgtccaaatgcttcacgtcaccgatatcgatggcgtgaactgtggccggagaataccatgaaaggaattcgtcctttagcttttcaaatgtttgggccttttcatcgtccagtgaatactaaaaatgttgtttaattttattccaataaaagtgcaacttttcgcatgatttcaaagctttgctgaagtgcaaccaatttttggtaacgcatggccccgtcagaaacatccaacaattgtaattcctggtatgcattggaccatatcaatttggcctgagttgacaacacaataacagtctcaaaagaggccgtgccgttttactttaagcacttccgcaagtttgtccactttcctcttggccatgtcacactccaaaaccgcagtcggctgtttggttgagttctcattctgcctaagcattctcaggtgttcttgcaaccgtttgttcaacgcgtcaacacttgttccaagttgattcgtttttgcggcacttccaaacaatgtttagcgtgtggttgttttttttttaggggaacatttttccatatacattttttagatgccctataaatgtgttttcagatattaatgaaaatatgtgttaaggggttctcgaggtcgctgatcacgaatccgggctcggatcagcgctaccgttcactacatgagctgtacatggtcaagaaatgataggcttcctgtaccaatattaccctcattggcaagatgcccatgaggatatcattcgtacccattttt

SEQ ID NO: 9028 - DNA, 1102 bp, Heterodera glycines
ttaccactatgggtacgccccactgtgcagagaaaagcctagtactatctcgtcgtttctctttttctttgtattttctctcactttggcgtactatctcttcattttaattatgtaaaaagcaacatttacttcgctacgtttaactttttttctgtacgttaaatctataccaaattttgcatactgatagagaaaaaaattctgcataatgtaatacagccattttatgttttatacaatttttcaaaagatatatataaaacatgaaaatgcattactttttctctctttttggcgtactattttcacatctctaacacacaaaaaacatcaaattcgtaaatgctaacaattttggttatatggataaaaaatcactttggacatttagaatcaatagagaaattaatagttttagcatttttgctgaaaacagcagtttaggacttgagttataacgtgataaaaatttgaaagtatcacaacttttttctgggatgtcaaattgcttagcattcgcttagaaaaagattctcgttttcaaaaactttttttagataccaaatttgttcagtttagttgggaatgaaacgagttatggcagatcaaaataaaaaatacaaaaaaggcatttttcagtgtaaattttgaaatagcgggcaaaaatttacgccaaatgcgctatttagcgttatgagtagggctggtaaaaatatggatataaaatcgcgaaatatggccataaaatatggaccaaaaaacgcaaaatatggacataaaattgcgaaaatctcaaaatatggacataaatggcaaaaacgtcaaaatatggacataaatttttcaaaattgagtgtaaaatttcttcaaatttattggttgaaattgcatatgagatatatttccaaattttttgactcggtaaggcgctttgacaaagacggctttcgttttgcaattagtcggtcaacattcggaaattggtctcgaattttttcggcaattacgtgcaatcaagagaaaagaaaaaaaacataaaagctaaaatttattaataattggggcgcaaaatcaacaacaaaagcgaaattttcgcttt

SEQ ID NO: 9029 - DNA, 2261 bp, Heterodera glycines
  unsure (1)..(2261): unsure at all n locations
cgagaaattttggcgaaaaaatgatttttgaaaaattntcggttttttgggctcaaaaaggctaatttagctgatgggggcgtttctaatagaggtttttttntgaaaaatgccaaaatatggacataaaatatggaccaaaatgccnaaaatatggaaaaatatggaaatatggacataaatcgcgaaatatggaaaaatatggaaaatatggatatagaaatccatcctagaagcttcaaaccaagctaaaaacatgtttttcgtgcgtttcaggccttccacagtccaggaaaaaaatatggatttccatataattcccagccctagtaatcactgatcagcgaccccgaaaacaattggaaacatattttcatggttcttgaaaataaaatttaaaaaatttacggggtgttcccttaagaaaaaaaaaattgattatgcctaaaattaaatccaaatctgaatgggtgcgcgagaggatcaacagtgagcttcactgctgaaaaccttgagaaatttttggttcgcaattgcaaaaacaaccgataaaatttatgatgaaaaaattttttaaattaatttccatccctaattttcaagttttttgtgcatatttttcgatttttgtgcatgttttttaatttccatccctaattttcaagttttttgtgcatatttttcgatttttgtgcatgttttttaatttccacccctaattttcaagttttttatgcatatttttcgatttttgtgcatgttttatgactttatttgcatttttggtcatttttcgtgcatactatttcttacagccctgtttataaaaatagaaatattcaaatttaagaaattgtaaacttataaaattgagcagtttttaaaaaaaaatttaaaacttcttatgaatagggctcagatttttaagcgcgaaaaagttcaaaataagtgcttaaataagggcgaaaaaagcgcgaagtaagtgcgaaaataagcatgaaaattttcaaatgtatggggtgaaatttgttaaaattgctgttttctcaatgtaaattagttaaaattaagtcaaacaattttatttactggttgcagttagaaatgaagtacatttagaattttcaggatttaagggtccattctcaggggtgtatttttttgaaaatttttaagtcaatttcttaggggtgtattttccccaaattttttttgtcgattcttatgggtgtattttttgtttttattgcatttttgttaataaatttctcaaaaatcgcgaaataagaacgaaaataaacataaaacgctaaaataagtacaaaaacatattttaagagcaaacctaattgaacccgagcagagggaaaaatccacgagggtagaagctaatgtcaatagaattcattgtttattatgcccataacaacaacaaaggacatttttgatgaaggaacagagatgccagaaaagtgtttgtcactccaactaatcatccgattgcggtgcctcaaccgacgggaggtcctcgagagaattggccgaattttttggcgacgattcggtaatgtacgccggcatgtcaccattctcgagctaaatgttaaataagactgattgattattttggaaaataaagaattgtacactttgcttatttgtccattataaaataatgccaattatttgctgtaaatgataggctcaccgaagtgatgacttcgtccaggtacgtaaaaagggggtcccaaatatttcccatggtttctgcgtagaacttcaacacggcaatgtcccaaggctgaaaagggaatatttcaatttaattcaacacaattattttgtttcattctgtgattctaaatcctgaagattttgtataaaattccgaagaccgggtccgaaatcgaacaaaaagtcgaaaatttaaatttttcaatttctgaaattagaaaaatttgaatttcgactttttgttcgagttcggatccggtgtccggaattggtcaaaatggacaaatgatgctttgcgaaaaacgccgaaatcccatttaccaattcattgatagcaaaaaattggagttcgcagaaataatattttttggtgaacccagcctcgttgtcgtgaaagaaagtgcggaccatctctctctgaatatcgaataagaaaaatgattcttaagtattgactacgatggtgcccatttgccaatttacaccacttcagcagaggggatggagatttcggggaacgctaacat

SEQ ID NO: 9030 - DNA, 4583 bp, Heterodera glycines
ggaattaatattaattctgtaataaaagtaatatttttttaagctgaattatttaagcaaaaattaaaattagattaaaaaaatattaaaatttttaaacttaaaacttttcatttgatcagagctcaaaaaaaacaaaaaatatttatttaaaaaatttcaattgctaccgattcagatgaagaaaaataatgttttatttgtacatattataaaattattaattttgtagcggcaatcgaattaagattgattaaatatttgtatacaaataaaatacaattagcaaagaaagaaaaaattaaacataatttgaaaaatccataattgaatccaactaaattactttaaattggaatgaagagcattatttgaaataatataataataaaatatttaataataaatgaatacaataattattacaatgtgaattataaaaatagcaaaaatatctgtagaactaaaaattaaaagaacgatattatacaatttcactcgtagataactgtgcaagtatttattcagataattcttgaataatttaagctaaccgattatgtcttattaataattaaaaataaaatttccatgtaaaatattttcatttaaatataataaaaatttcaagtttaaaaaatgttaaagatgtaaaaacaaaataactataaaaaatacaaaattgacgtattatttgctactaattcagttttacaatgtagcctttttcaatatttttagaaaaaactgtaaattttttgaaaattttgcaactaaatggttattttttgatgcaaacccattaaaaattcctttttttcgcccggcgctgaaatgtgatataacactgcccctaaatcgtcgtgaatttttaaaaatcccctagaaattaaaaaactttcactagatttaatcttaaattattttttcttaatacatttttactacattgatagaatccctgacagaggtgtgcaaaaaacaaaaaaattttcgaaaaacaaaaagaacgaaaactttttttgattcatcagtgcgaaaaaaaattgagaattttttttgttaatttaacaaaaaattttttgtcaaaagtgttaatttttatgactttttaaactttttgttcattttttattcatttttcacatttttcgttcctgttttaggtgcctatttatgaaattttcgtgccaaaaagtccgagcctattcataatttcaaatcgttcctaatttgtcaaatccacccgttgccgacgcaaacagtagaacggcgtgagttaaaaaaactttttaattttctaaaaagaataaaacgaaatagcaaaaaagataatagtaaaaaataattacaattaaaaacaattaaagaaggctaatggtaattatcaaactgaaggactataaaaattatacggaaaacgaaataattacctttaaaaaacagaaatgaccaaagaagattcagctggaagattaatcaaattttaaaaataatgaagaacactcaaaaattgaccaaatatgaaaaatataaaaaaaacacataaaaatatataattcaataaataagatacaattaaaactaaataaaaagttaaaataataattttgatttgataaaaaaattatcaaagaatttattttcatattttaatgagccaaagcaatttaaataaatataatctattaagaaaattaaaaacatcattatattctcattgtacattcatcattcgtgttcgtgttacataaaacggaaatttgtacgtgaatttggaaaaaaaagaataaagttaaaatatattacacaataaaattaatggcaattaaaataaaagaatagatgacaaaaaattaaatttaaaacattaaaaaatggcccaattaacacagagaaaccttacaaattttattaattttttttgcattaatcctgttgaaaatacaattaattaaataataattttaaaataaaccaaaatacttaattaacaaaaacaatttattattaaatattaaactaaatattgctcaaatatcattgataaagctaaaaaataaaaaatgaagctaatgttataaaacctggtttattgcgtacttttagtcatacctttgttaaaactagatagacgaaaaattttttgaattttgcaggctaatagagaaaaagatcagctgaatgttaccaagaatttaaaatttggttgctttaagcaaagttatgccatgttctgtcgaaaaaattgctaaaatagcggattttacgaaaagacccagcacgtgaaaaaaccatcaaatgaaaatttcaacaataaactacacataactttggagggaagaagggacaaacaaagggtcagagatcacaaaggtcaatggtcactatttctaacacctcccttcttaaattctgatcacttcctgatcagtggcggcggcgcttcttgatcgggctgggcgagtaaaattgccgcggcttgacgatccgttctgatctgcgcactgccaattggggaacatcatcagcgggctgctcgggttgttgctgttgctcatcattttgtccacgatcaatgtgaatcggttgatttccgatcactttttgttcatcttcgaagatgaaacgtcggcgcagctgatttgtgtgccggtggacaattcttcctcccaagatcggtacttcaactcgaaaagttggggaatttttaaccctttccaaaattgtgccctgcagccagtgggatttgttgttcctgtaattaaagagtaaaacggggtcacccggaccaaaatcagtgcgtttgctccgtgctcttgtcaaattgattagacatttttgaagcatattcctttttcgcctgtctgatcagtcatgatcaatattctcaattggctctcccctcgggtgaacaagcgacattttggtacggagcttccgtccaaagaataactgatcaggtgagtagccgttcgatgtcgcgttgggagtcgtccgataagaaaggagcgctttctcggcccaatctttgtcgtttttcgagcacttcttcattgcacgcttgaacgtgtcgacgaatctttctgcctgtccgttcgattgtggatggtatggcggggtgaaagtgtgtttgatgccgaattctgtgcaaaatttggcaaaatcagcggaacgaaattgtgttccattgtctgacacaatttcttccgggactcccagtctgtaaatgatcgatcggaggaaaccaaccgtggcctgagaatttatgctcttcatttggcagacttcgggccattttgagtaggaatccaccataatcaaatacacaaatccgtcgtcgcatgggcccgcaaaatcaatgtgaactctttcagagactttgcttgttggcgtccatggagcaagtgtgctttttgtcggatttttctgtgcgttttggcattcttcacaggatttgacggttttctcaatttccgaatccaatcctggccaataaatgtgacggcgtccgagcgctttcattcgcacaattcctggatgtgacaaatgtaaagccttcaatgctcgaccccgtagaattcctgggatgatgacgcgctgttggtacagcaaacaaccttccacttccacgatttcgtctcgtttcggaaagaatggagcgatgtttgggtcgttgcatttgtttggccaaccattctttggcagtctcaaaagttctgagagaatttcgtctttggctgttgcatccgcaatctcagccgctgtcaatggcaattgatcaatttggacttggaatacactgttgatgaagcattccgtttctgtgcaaatgtttgcaatcaaaatgtcttcttctggccttgggtaatttgcgatgagccgggaaaggacgtcggcttgtccaaatgctgctgtgttgacatatttgatgtcgaactcgtaatttgacaaaattaaggcccatctttgcagtcggctcgcggcataaattggtatgcccttcttggaaccaaagatggccagcagcggtttgtgatcggtgagcagagtgaattttctgccaaacaccattttgtgaaatttttgcactgcaaaaacgagtgccaaagcctctttctcgatttggctgtaattgcgttgtgcgctcgacagtgtgcacgatgcgtgttcgatcactttctctcttttgtcggggaaaatgtggctaattgtcgcgccgattccatcttttgaagcgtctgctgcgacgacaattggcaatgacgggtcgtaatgcgtcaatagcagttccgacgtcataatttcctttgccttttcgaaggcttgctgttgttctgcctcccatttccaattttcatcctttttgagcagttggtctaatggtgtgcggatttggcgcatttcctttatgaaacgaccataataatttaatgctccaaggaatgatcggagggtcgtcttttcatgcggtggcggcattttgcaaatagcctctgatcgttttgggtcagggcgaattccttctgcggaaatgatgtgaccgaggaaaagcaattctttttggagaaatttgcattttt

SEQ ID NO: 9031 - DNA, 1631 bp, Heterodera glycines
aaataatgcattttagttgctcctttgtgaggctcaaattcgcattttcacaggacgcattgatttgtgcgatcaatgaagtgatgtcctgatttggctgttgtctgattttgaagcactcatagcgtctgacaaatagcgatcgtgtttcggcgtacaaacttttcaatttgtcgagagtgtccgcccatgaaatttgatcgggttgggtcggacttacgctgtctcggtatttgttgtagtcctcgtccgataattttcccaatagaagacggacttttgtcgcttcaggtaagtcttttccatcgtcctcgattagtgtgccaaaacgtttgaaccattgttcaaatgtgtttgcgctctccgcgtcgtaataaaatttcgaaattcgggcgtcaattgaactcgccaaattggcattgctgaggttgttgttcgctggcactgcatttccaagcagttgctgcatccttgtttcggattgcgtaagcacagcgttcaaaatttgttccaattttgccgcgttcatgtcgaatttttgtcgaaaatttgttgaattttcaaaaccgcacccagcggaaacttacaccccccaggtgatcagtttttttgtcgatgaaaaccgcacccagcggaaacttacaccacccaggtgatcagttttttttgtcgatgaaaaccgcacccagcggaaacttacaccacccaggtgatcagttttttaaaatgtccaatgaaagccgcttaggcttttgttgctgactgcgccaaatttgttgtgtccttacccaaaggaacgacaacaaatataaacaataaagtttattgaagaaaataaaataataaattggtgacggagagaggcgaatatcgattggctttatgccacaataaaattggagaatgaatgaaggaagtccaaatgtggggaagggagccaacattaaatagacagaaatgggggagggaagaagggacaaacaaagggtcagagatcacaaatgtcaatggtcactatctctaacagaaacatattcaaaaaattggattgataaatattaaaatagtaaaatattctaaaatttagaaaatttatttttattatgtttatcattataaaaaatttcactataagataatacaaaacattaacgttcattaaattttcattcccactaaagataatttaaaaaataaaaaaaaaataataatacatttaaaggcttgaatgttaaataaaatattaattagattaagtgcaatttttgaaaacttcattattttatttcaattcatactcaaatttaaaaaatatattgaaataataacaattaaaaattgttaataatttatttattttttcaatgagttaaaaatactaatgaatttaaaaaattatttatcttcttactaaaatatcaaataataggactattaaacgcatttttataagaaataataaacagcttccttaaatatttattgaaatattaaaattgtaattatatatttttaattaaaattttatattatgttaccgaaaataaacattaattattataacacgcgacgtgagaatattaattataaaaatatacatataaaaaataaaaacataacatttatttctt

SEQ ID NO: 9032 - DNA, 3364 bp, Heterodera glycines
tccccaaatgtcgggatccccaaatgtcggaatgcctaagtgtcggatccccaaaagtcgggattgtcgggtccccaaatgtcgggatccccaaaagtcgggtccccaaatgtcgcgtccccaagctacaaatccccaaaagacgcaccacgcttccataaaggaataggaaaaagtgcaatgcgatttcttaaatgagagcactcaccattatttaccaattctatactacccttattcaatgaaatttacaataaatcacctaaattcaatgcctcgatacgatcccgtatccaggcatctgcgcgccctcccatgttttctccattttgatcaatgatcggctcttcttcttcaacaattcgtcggggccaatccaagtgtttacaaaatatatgacgagttctttaaagtttttcatataggacgcattaatttaatcccaaattcccagctttttcatattgatttaccttgcaattcagcagttggttccaaagttgacatcaatgcacaaaaataattgtacacatagtgatctggcacaaatggccttgatttaaaaaaaaaataaaaattatagtctcattaaaacggaaaagggccttttttccacaaaaatgcaaatgaccaaacgaagaactgcactttcaactccaaaacaaggtaagaaccataaaaaagataacgcgaagaacggcgaatgcaaatatagtaattattctcgagtttcgctattatcacaaatgtttggctattgcatatcaccaattttttgttaaggaaatgattggactttccgctcaaactgcttaacgaaagtatatcaaactttaaaaactgttgtgaattcttgtccccagttatataatgagaaaattatatgtacaaatatttgaagtttatttatatttcgtttttgaccaatcttcaaattttggcatgaatttttttcaaaaaactctttagtgtcgaaattactcagtgtccaaaatactcagtgtcgaaattacccagtgtcgggattacatggcaccatttttaattattccaaaatttaaacagggcggggactatatatttttagaatttttagtagaaaaaacctgtttaaaatactggggtcattttcgcgaggccgtttttgcgcgagtgcctgttttagcattagaattgttcagatgttattgtacgaggcattggcataataattgtggtaaaattcattttaaaaattgtaacagtctatatcaagtaggttagtgcacgaccggttattaataaaggcgaggatttttaggggcgaaaaatccaaaattgggacctaaataggggcaaaaaattcgcaaaataggggcgaaaataggggcaaaaagtttcaaatataggggtgaaatttattaaaattgctgttttttctatgtaaataagtaaaaattaaggcaaacaattttattcattgattacagttagaaatgaagtacatttcgaaattttcgggatttaagggtcgattcttaggggtgtatttttttgaaaatttttaggtcgattcttaggtgtgtatttttccgaaatttttttggcgattcttaagggtgtatttttcatttttattaataaattttggacaaaacaccaaaataatggcgaaaatagaggtgaagcgccaaaatagggacaaaaacttattttaggggcgaacattcaaaatagggatttctagggtcgaataggggcgttaaaacgaaagtttttcgaacaaaaagtgtgtttttcgttttggcgcccatttggctggcgccaatttgtttggcagcgcccatttgtttggcgcccatttggctggcgcccatttggcagcgcccatttgtttggcgcccatttggctggcgcccatttggcagcgcccatttgtttggcgcccattcgacagccaccgactttctctatgggtcctttgaaaggataccctacgttcgaccctaattaagaacgagaatctcatatatatttttaaattatttttaattatgcgtcgatttttatgagagcacattcaaaattttttttgactttttcataagaattttatataaatttataggcagaaaatttttttttatactaggcattcgtatgcaaaaatcaacctaaaagaacagctcaaagagcaaacaaataaatatccaaaacaaaaaggataaagctttcccaacaaataattaatcgtttcatttccttcctcaaattatcacttcttcttcttgcgcttatcattgctgggcccggcgggactcgaggacacttcttttgcatcgccacctaaatgaagaacaatttgaaaaacacacttattaataggaatatggaattacaaatacgggatagaaaaatagccaaatattgatgtaaattaaaatttttttttttgataaattatttgtttcgggaggcaaacgatggtgcacccgattttctcaatcccatgcgattgtgggggctttattagagggtgggggcactaatagagagcattatgaaatatttattacggtaattacccgtttccttcgcttggtcagcgcctgccccggctttcaccagtcgcttgacgatgtctttcagccccaacttcgttgcacacattaacgcggtatggccctttgggtcgctatgattcacattggcaccacttttgatcagaagatcaactgcaacagtcagaatgaaaataacagaatttatgatggcacgctgagataagcatcaccgactggcttagtcagggattttttttttaataaaatttaatttaaattttgggtatgtttagaaatgaaaaaaagaccagtgtccagccgggcattgatgttacatgcggccatcagtggtgacatggcaaattgcggcgcgcccaagtcgacgtcggccccgtgtttgaccaacgcttggcacacttcgaagtggccatccattgcgccaacccaaaggggcgtcacaactgaaaattgatggaaaaataaataaaaattcgaatttttccgccgttagaaatgaaaatttgatgggaaatcgatgtctttaagcaatcttttcaaacatttttctgccaaaaaggtgggtaccctcagcagtattacgaaaatctttttttttaatttgcggtaagttatgtcccggtgaagtttcgcccgtcgatgttttgaggtgtacccttcgttttgacccccccccccccggtgtgcgaaggggtcacccttttgaatcactgacccccaaaaagcaattttttaatgaatcttctcactcactggtcatggtggaggaacctcttgcgtcgatgagtttgcgaaggcacatt

SEQ ID NO: 9033 - DNA, 2170 bp, Heterodera glycines
atttgattaaaaatttttttgtcaaccatttgctgtttgaactcacttcttcgcgctccaattcaccgtccgatttcagtgcatccgcttcatattccttaattgtttacaatatcgtttcaagcactgtcacggcattttttttttaaattttcaactttttcatttctgccagcgccgttagcatcaacggttttttttctgaatttatgaataaatccaaaaaaaattgacgtttttgggtgtaaaaccgttccaaatcaacttctagatggtgggccaccttttttgaagaatttttgttcaaaaagtcatgaaaatatgttatgggtggttttcgggttgccgctgatcacaaatctgacattcattttgatcaatttcgaatatcgaacccgaaaatgtcagattcgttcgtgatcagtgagaaacccgccccataaatcacgattagggatcaaatttcaattttttgtgaattttaaccgcaccaaccttccatgagatggtttgcacatgaattttgtagttggttttgctaccgccaggcatggacaggaggaaattcattggaagagattggtaaataaatcagtttcaaatcactaaatttcggatttggggattgattatatattagcaaaaattaagaaaattgaacaacaaatggttttatgtatcggcaatggcgtgccccaacatttgcgcctttgtccaaaatcggattcaaaactaagttttttcaatacctgatcgcctaaacagctttatatgagtggtagaaagtgattgtgtctgataatttggtcgtcaattaatttcgaaaaaaacatcaattaatcaaaacaactgaattaatgctcttaataagctaaaagactttgctttcttaatttttgttgttgtttatgctatcagagcttgaaaaaacgcaactttgaatccgatttggacatagttcatgtagtatgtttggaagtgatcgataatgttgaaatgctgatcaaaacaaatcacgcaggggtggataggttagtcgtaaacaaaaattatgaaaatagtgcccaatttttgccaaatttttttgttggggagggatgacgcaaaaatggagggtgatgaaattcagtacaagtcatacaaaagtctattgacgaagaaaattagagaaaaaaccatttcagtagagattgttattgcagaatttcactggtccgctttttcactgattcttttggtcatagacgcagaattatccttgtgtttctctattctctctgtgtctttaaatctcttcacgttacactctctattgaaatagcttttctttattcttcttagtcaaaaaagcttttgtatgtatgacctgcactgaatttcaaaacccaattattaatgcgttatctctagggtcaaaattttaggtatttaacttcttttctttttttgctcgattgttttgaatattctgatgtcactatccgtcactagaaatcaactcttttggcgccgcttaatccagggtttggatcgaaaatttcaaaatcagaatatcgggtccaaaaatcagattttgaggtcgaaaatcagaacattttgcaaaaaattgctttaagtcggattgtgtaataatttaatcaattaatatacagtcaggtgcaaaagtattgcataaaatatatgtttgttttttgaaaaatccgattttctcaaaaaatgaatggcgtgaaaaagttttatttactccaaaagaaatgtcaattagggcactaataaaccccaaaaactgcactgataagtttcttagtcaacgagaaaatttgccgagtcccaaacaacggtatgggtcaactccgtccgccaactccgtcccagccaagtttaataagccattgttttttctcaattgacctaacatagcaacctttatatcattcaaaatctctgaatgttggaagatatttttaagctatttctaagtgattatacaactcacaaagaagttgtcgcttgaaaaccgcaaaaaaaccaaaaaaactcagaatttttgtatatttttatttataacttttttgtatcattgcgaactagtatgattttggttatctaatacttattaagagcttctgaatcataccaagtttgttgtacttggtaaacaaaggaaaaa

SEQ ID NO: 9034 - DNA, 3805 bp, Heterodera glycines
ccactggaaaatcggaacatggaagaatgggagagatccttccaagtggcggccaaacgatggaaaaacgacggacaaggtgtaccgcaacacaacagaagaccaatgggacgagtcgcgacacccgtcatgtcgtatttggacgggatttttcagcggcgtgccaaagtgccgtccgtcgccagcatgagagtgacgaacacagcgcgagaatggatcaatcgaaatcgagacgagatgggggcgttccccccagcaacagcccatcggccggcactgatgcaaccaaaaatcgaaaagcatcaggctcacgtgaacgacgactatcgggagcgtcagacataccccattcgacggcatgctcgagacgagggagaacatgatcggaagcacgggagggacgaaatcacgggaatgacaacattcgagactgttcggctgcaaccgccgataccgttctgcgtgtagtgctgatcggagtagtgggctcgctcccggggtacttcattcgtatgtcgtctgtctccgcattccattcgagtcccaagactttggccgtcgtcttgccgaggaattccgcatccgaaaagctgttgttgagtgtctcgtcattgctcaagaattcccgaaggttcatccgcgcgtccgcaaacattcgtttcgcttctcgtcctttaatggctgcttcttccgcagtgtccgccgggatgagcacattatccacgtatgtgtcccgaatgagttcctccgcgaagttggagtcgtatttgcgcaggtggtgtcgtacaacggcggcgagacaaaaggggcttggcgtgagcccaaatgcgaggcgtcgaaatcggtatgtcacctgctttctcgacatcggcgatcactggtactcggcatgctcggaaccgaatgagcatgtcggccaaatccggcagccaaactgggcctctgagtaggcagccgtcgagggaaggtgcccctcgtgtgtgtgcgctcgcatcgtagacgacccgcaactttttgggcgtgatcactgcttggtgagggatgaagtgttcgtgtttaccagctccgatcgtcgtttcctcgattattgctgcattgagctgatcggtgatcactgtggtgtactgcttgagcacctcgggagtcttctgcagtcgttgaagcattgtcgttagccgtcgataggccatgctgaaattggtgggcaaagcggggtggcactcccgccatggcaatcgaatggagtagcgcccgtcgttgagttggcgcactgatcgttcgaattgtatcactgcttgcgcatccgcgtcgtctgtcgggtcgtctcttatccagattgcttccaatgaccaaaattgttcaactgctctgatcggcggcatttgatcgcgttcatcttctccgcatggcaaggtcatgaacacggacggagcgggagttgccccgctactcacttggaaccgttcgccgcacacgattggcccaaaaaccgtgtcgacaatgtacgtgcccctttccgttttccgaaagccggtcacgaaatcccagaattttcgaatcccgatcaacagctgcggttgtgttgtctgtgtgatagtcctcatgtcgctgtcgggtactgctcccgactcgatgagctctgttctgatcggggtgcagatcagaggcacttccgccacttcaatgctctcccatccgccatcgatccgcttgagtcgcaagcgataagttgcggatcggatccgctgctttctccctccaaaaacttgaactgttagtggccgcttttcggtcggcttcggtccgagatgttgaattagctcagtctcggcgcagtcaaggtggcttcctggatcaaacagcaatgttgtttggcactcgttcttcgccttcttctgctgctgcggtcactcttcggatcatttgctgggccgggactcggcttccaaaagctgtgaaagcccgttgctccccggcattcgtctcggatatgtctcgactgttcggctcgtctcgtgctgtagtgacgtgagtgggttggtccatcccactgatcagcatcgcgtggttgttctccttccgttcaggttctccggagagccgggattggtttcccggttggttcttccagcacataagccaatgatgatcgtcctttcggcatgcgtcacatcggaccgttcgttggcactgttcgaatgtgtgatcagagcccaggcaacgcaggcatcgcttttgctcaattagtcgcttcctccgttcctgcggcgtcggataggcgcggcattcactcggccgatgtccgctctccagacaaaacgaacaattccccctcccgaagcttggagggagcccattttgcgcgaagcggggtccattcccgcccccgcccgtgtgtccgttctcgttgccgcgtgccactgttcgcccggtgaaacgggcactcgtcccgcactgctcttcttttcgtgttccgttgggctgcgcacgggttttgttggctgtcccgtaccataaatgctctttgaaaggttctcgacctgctttgcctcctcgtcccgtatgatcacgttcggttcggtgatcagtgcgtacttccgggtctttcattgccgccagtgctgactcagctgatcgcatgcaccgcacttgtgccgacaccgctctcctgaaatcgcgcactgaccatttcgagcccatcatgctttctctgatccgcaattccgtgagcagtcgcaccggcaattttgcctccagcaatgggccaaatgagtcgtcgtccacgttcgctccgagctgctcgagttggcacacgcaccgctcaaactcgtcgatcatcgtcgtcaggctgttcacattgtcctttgccggtgccaaatgaagaagccgggcccgaattgcccgctgtaaatcgtccgtgtcgccgaatcgctctttcaaaagttgcacgaccaccgggtagttgccgtcggagggagggtagacttcgacagcccgccgggctggcgatccctcctttaagcagcgcaggagatgaagctgcttctcgaacccgggaatgggtttgtcgtccacagctcgcttgaaataggcccaaaatgtcgtccaatcctcgggctttccggaaaaaatcgccggttgcagccgaacagtttcgaatgttgtcattcccgtgatttcgtccctcccgtgcttccgatcatgttctccctcgtctcgagcatgccgtcgaatggggtatgtctgacgctcccgatagtcgtcgttcacgtgagcctgatgcttttcgatttttggttgcatcagtgccagccgatgggctgttgctggggggaacgcccccatctcgtctcgatttcgattgatccattctcgcgctgtgttcgtcactctcatgctggcgacggacggcactttggcacgccgctgaaaaatcccgtccaaatacgacatgacgggtgtcgcgactcgtcccattggtcttctgttgtgttgcggtacaccttgtccgtcgtttttccatcgtttggccgccacttggaaggatctctcccattcttccatgttccgattttccagtggaggtgggtcgtcccccaccggatggctgttgttggtcccgaatgacccgctcaatcgagaccgcgcgattgcttcttcttcatcctcgagtgcccgtcgcatcgtccttaagtctccgatgtgctcgtccgcaatttgaagcagttcagctggtgttggatggtttcgcaactgcaactctttcgtcgccgccggcagtggcgctgtcagtatgtcgtagaag

SEQ ID NO: 9035 - DNA, 821 bp, Heterodera glycines
agcagaaatcgggcggccgcatgttgtcaatatttgctgttggatttgcttttttgtgtccgattcgcatggcttttgcttttgtgggatattcctcccccctaaaatgttgtgttgatatttcatctctcatttttcgttttccgttttttacacttccattaatttcgtcttacgacaaaggcttcgaattcttcaatttcgacatttttcactattgttttttacatatatatttatttattctgctaatatcttcatttaatcttcgttttttctattctaccaaatatttcttagtctgttttttcccactttttcaatgtgcgaccgtttaacacaaatccaagaccttgtcaatgatttggccaaccacatgtgcaattcggtcggtgttctgcaggcgagtgccgggccgtgcgaatttgggacagctccggaggtgtaataaattttttaaattgccataattctatttactcaaccagcaggaggcccgtagccaaaaaaaaaattatgtttggaatcagatttttgttcgtcgggccaaaaaagttcactagttttacgtcaaaatttgcacgccagagaggaaaagcatgaatttgtaccagttatgcgtcaaaaaagacaaatttttgccattttgggatcaaattttcaggaagtaatggtaaatgggatctgatgagggcccctgacaaaaatttttgaaaataaaaattgcctgttcttgaatttttttttaggaggggggggggggggttgtcttccgctcccattcactacgcgcttcttctacatcatcccactcttcatca

SEQ ID NO: 9036 - DNA, 3474 bp, Heterodera glycines
  unsure (1)..(3474): unsure at all n locations
ccctgttcgggctcgaaacggaatcgaaaaagttntaaattggaaaccaaaaaacatttcattaccaaatgaaaaaaaccctaattttcgagtgttttttgattttcatccactgaatttcttctaattcccttgcacaggaactgaagaatgaacccaactgtcgcctcttcgctcagcaaattgcacggaccgccaaagacatcgaaattctgatcgattctttgcccgccgacgaacaatcggtgcgcaaattaagccatttaagcgtcaattaattaattgtcccttaattatccccagttgtccgtggaagagcatgagaaggcgttgttggagttggacgacgaacgcgcacgggcggccaaagtgcgtgaagcatttgcatttatgggaaaccgataaaaaaaattgaatcagagaagggattaatcggccacagttattcatgccatcgtaaatgtccggcaatatcagaaattttaattggaccaaatttaaaacccgcaaaaatataccaattttttccaaaaaacactttttacatttaatggacacttttggattttcgaattgaacctaactgttatctcaatcatctaaccgagctgtccagccgaaattcaaagttgtgccgtaaagctagagtgcagcgggacctaaacacggacaactgagtaccgaggtcccggttttgaccggggccgggactagtcccgggtttcccagccaaaaattcccggtttttcaacccgaaaaggtctcgtttaagcccaaaattcccggtcccgctgcactctacgtaaaactcataaacgatgggggaggggaaacaatttaatttggataatttatttggtctaatggatttaatttgtttatgcaggagcttgaacaagcagtggaaaaggcggagaaactgacggatcagttgggcgaacttttgtcacgcattgcgcgccttcaaatggaatcgcgcccgatggcattttccacctgaaaacaaccttttcaacccacattttttttgtcgaatttatttgaatattaatacgcataaattaattttattaatggtttacggtatattgccaatttgtatttagtgttaaatcggcaaaagggagtctgaaagcgtgctgatggtttaaaatttagaaaagtttcagatttaaccaattctgacttccaacctaaatttgaacaaaaaaaggaaatttaaaatgagcaattttaatttttgacaggttcaagtttggttagagattagggcaatattgccgttggtaccccacctttttctaaaaaaatattttgttttcaaaatccataaaaacatgtttctgggggttttcggggtcgctgatcaagaatataaaatctatttcaactaatttcgaacccggacccgaattcgaacaaaaagtcgaagcttcgaattttgcatttttggttcaaaaccggcttaagaacaaggaaagcaactaaaagtcaacaatggttcaataaaaataaagatcaaaccatttttagaccaaaaatccgaaattcgaaaatttgaagtttcgactttttgttcgaattcgggttcgaaattggtcgaaatggatactctattcgtgatcagcgaccccgttaccgagattagaaatcggtcaaaagatgtcagattcgtgatcatgcaacccaaaaacgctaaaataatttgtaaatcaaaagggtccctcccctcttttgtttttcataaaatccaaacttttatggacaaatgcaaaaagaataaagaaatacataaaaagtcaaaatttaacccaaacaaaagaaagagaaacacaaaatgaataaatttatgtatgtgttgaataataataaaattgtgctgccaataatgtgaacaattgtcatttttttcatttctcattttgccacccaattaaaaattgtccccaaaatgtaatatttaagaaattggaagggcttcattcaaccagtcaatcgatcaatacacatatttcggcaattttcaaaagggggctatgagggattggcgggcggagtgacggagcgagacgaataggtgcgagtggaagcgctgaaaatgagaaaagtgtgttgaacaagtacttaaaagcagaagtggcagtcagcaggtgatttgccttgagcttgaagaggaagaagcggaccgggttttgccacgattccttgaccgactacggtcccgcgaacgactactacggttgcgcgagcggctgtggtcgcgagagcggctgcgctcgcgcgagtggctgcgatcgcgtgaacgactacggtcgcgcgagcgactcctacggcgtctgtcgcgcgaacgacgccggcgactgtagcggtcacgagagcgggatctgccaagttgagaattgattagatgcaaccaaattggcaatgaacgggcacacctgctgcgcgagcgacgccgacgacgccgatcgggcggaggccgatagcgatgattgaagtacgaatcgccggccgaggaacggatgggcgaaatgtaacgcccggaagtgccacgacgccgagggcgactgaacgaaaaaagcgatcactcaaaagagttattttttgtcaagttgagagtgtgggatgaagccaaaaaagggggatggaaggacaaatgagacgaaataaagtggaaaacggattctgctggtcagtactgtttttaagcgtggcacaaatagttaatcgggaatttaaacaaattgtatatatattaatcaacctattttctgggcagtttaatagtgatgctcgagagtctcggtctcgactcgagaaaggtctcgggtttttggtctctgtctcgaggtcaagtttcggtctcgaaaaatttttggtctcgagcatcactatagttaagtcaaagcacgaaacatttgcatggggaaaatgcccgaattatctggcaatgggacgcatttaagtgaccagcagaaccggcaaaagtgattagaatcaaaaaaaaaaaaattatcgtcgagcaaagaaaacacacttttcgtccgggttttgctgttcggaattgcccgcttcgtctgactgcgatcggaagccgccgccacgaccgatgaacgccccgcgccctccgcgcgcagcgcccccacggacagtcagtcgcacgccgcgcattgcctataaagcaaatggggggaagcagttagaaaaagccaagttgattgaaaactgatcgatcgcaccatttggacgccataagtgaccgagtcttggtcatgggcgaatttgcaacggtcgccgaatttgcaggtgttgtgacgcttgaagaattggcacggaccggcccctggaaacggcgttaacatatacaatgatttatggaagtaattgcatcatcacaatggtttaatcgcaaaattgtctcggtttcccgtgtgaaattcgaaactgacgctccccccccccatgggtgatcaa

SEQ ID NO: 9037 - DNA, 2479 bp, Heterodera glycines
gaggagacaaaagcattttggccaaattgctaaagcttttctggcacagaattcgaataaaaccgagcagtgcgctgttgcgcgatggctttccacgggtgctccccagcggcagcgatgatgcggcacaagagcaaccgcagcagcaaaggcaccacgcgacacccacggcacgcggcacgcgtcgaaacggcacgcggaagggcagcaaccaaactcagcataaaaatgccataatcgcaccagcagagacgaacagctgcagcagcattgacgtggcgatgatggatatggacggagcggacgaagcggcgacacagcgccagcaacgcggacaaaggcaagtggtgaagccggagggggtgttatgggcgggagggagagataaagctgatgggagagggagaggcggcgggggagggcgacgtttccggcataattttgccgatgattcaacttccgcaattttttgagttttatgtcgcttaatgagccatgaatcggaccacttttgtgcctgtttagtgccgacttccctctgccagacgccttttcggcgtccgccggcgccgcccttccgcgcgtctctttgccgttggatgactctttggacgaggctttgttgccgcttgggttgacggtcggtgctgcgcgcttcctttgcctttgtttcatttcactttgcttcaggtgcaacatgcactcaaattccaaatggactacgaggcgcacaattcggtcccgtcccctttaatggcatttaattgactttaattgattgtacttttaatggcatttaattgcctttatttgcttgccatttcaggaagtgttggagtgtttgcgccacttgcgactcgaatcagtggagaatgtgtgggctcgtttttgggccggtgcctccgattcggacaacggccgaggcaccgccggcgcggaggaggaactgtcagtgttttgttgttgttttgttcgttcgctgattgttttgccaattcggcagattgcccgggggtcatcagatgcaattgtgccgtgatgttctgtttcggctttgttctgtgccgcaacttttggccttcgtccagaacgtcgacctgtgcttctaccaattgctgctcgaccaacttttgcccgatccgctccgtccatctccctcggctggtgcgtctcacagatttggccaaggataaattcaaaatcagtccgaccgatttggaatttatcaaatcttgagagattttggcttccatttttcactcaaatgccctccctcctctgctctcagctcacccaccaaatcggcttcaccttttgttaccccaaatgcgtccttttgccaaaaatctttgcgcttcaatggccaaagcgttgggcgccgctgctccgtccgcgctgcgtgagctcaaattggccggcgtgcggcttctgtccaatgcgatcactcggctcagttcggtcgcccatttggcggtcaccgcgcgcgaagtgctccaaagcgacgaacaaatggcacaaatgcacgccgacttcgccaggtaaaacgcacagaattccaacattttcaaatttattgcattttcaggttggactttgctgtgctgcacgaacaggtcgaggttcgtttattgccttgggaaatgttcgtttttttgtcctttctttcgagagtctcgacttcgtttcctcccctttctttcactcctttctttcctttctcaatttgcttcagtggtgttgcgattggtcttctggttggcttcgttcgttggaggaacagttcggtgccgggttgtctcagcgccggcgcttggaagaatgggccgattggctggactgtctcgccgcgcgagtgctgcaaacaccggcaccgcttacaccggcgcgttccccgcaggacactccgccgacggcgcccgaggcgcaattcgtccgtggcaaacagttgcttctcgcgtggaccttttggaggtgccaaaggaagcaaagagcggggcgaatcatcgttttttttgcagctctttggtgctgcgcgacttcactctccgctccgccgcctctttcggccaatttcacttggtaaatgccaaagtcggtttgtgtcaatggcatagccttgcagatccgtctgctgttcgacgactatttgtccatttcggttgaacgccgtctcgcgcagctcagcggacagccggcgatcgccttaatggcacccgaggcaaaaagtcgacaaagtacctttatataattaattttagtggctccaactgcgcccatcgcccctttcgctgcctcctcagccgcaacagtaccccgcgctgctctcctccgcccccctttttttccgttcccatccgcccccgccctcctctgtttcggtgtacgccccgccgaattttccttcacctccgccaacgacgacaatttctagcagtacagcggcagttgctgttcagcaacagcccttctttgctgggcg

SEQ ID NO: 9038 - DNA, 2565 bp, Heterodera glycines
caacggcacggacgaaggagtaaacgcttcagaagactgtcgaggcggcggaaacgccgacggcgccattcgttttttcggggtcggcgaaagggacggaggagaaagacgaaggatcaagcaggagcaggacgaagccgaagatgaacaaacggcggttgttaggtgaaaagatgcaaattgctgggagtacttcggttttcatttcccaaaacattccattcgatggcactcattcattttatattttttgataataaatttatgagatcactttcattcgctcccattgtcctttgttggtacggtatttttagccaacagtggcagtttggttacggtgcgtcttcgacttctccgtctgccaattaaaccaccgaatggccgtcggaagcgattttgaattagcgcgggtcgcatggacaaagccaaaagaaaaagagacaacgaaactgaagaagggaggaaaggaagagctctgctggtcgggtggaagggcgcacttccgattagcgaagcacagaaaagcaccgaaaaaaacacaggaccaaggcacagccgaaaaagcggcggcatttgatcatttggccaaagggacagaaacaccgcgatgggttggcccgtgaacagtgccgaacaatgggactgagacggcagcgaagtgtcggaactttccgcggaaaaagtcccgtaaatgagcaaaagccctaaagggaaagagaagcgatggacagagagcgaaagccgaaccacgaccattctccaagaagagcagagaacacagagccaagcaggcaaagcaactggagaagagcagcaaaagcgaggcacgatcatttggacgggacctttgacaattaggggaggcaaattagggcaattagacaaattaagggaaattaacttgttaaattaaaaattcattggaaattaatgcaaaatgatcaaaaccttgcaacgataaaggcaaaaactgcacaaaacaccgaagccaaagcggaagaaacggcgaaacgcgactcggtcaaaacattggacaacgcgtcgacgccaagcagtaacagggcgaacagcagatgaacaacgcccatccacaagaaaagggcacgagaaggaggcgaagatgggacaattttggagggaccaatgggaggagaaaagttattggggagggcgaggggaagagagtttggggaagagacaacggaagacaaacggaggggagaagagaggggacagatggaacggtctttgacactttggcccgaattgggaaggaaaagggacggatggtcagcagaagaagtagcagcagcaacagcagaagcggaggaagtgcggaaaatggaaaggtaatcgaaggacgaacgggcggaaggaagctcaaaggggacgtgggcagaagaacaggaagaaggaatcatctgacggaccaaatgaaaatgaaaatgaaaatgaaaatgaaacatttcattgtttgggggggaaacttcgaaattcgaatccgtccttgctgaacatatcaattgatccgccgatcagtgttcgttctttcgctgtgccttatcaattgcgttgtcgaacatttgtgaacaaatgaatccgcttatttccgccccccattttttcaatggcaaatgcttttgctttctttgccttctctcaaatgaacatttgtgccctttaactgatcaattagctcataaagttctttcttcagcagaaatccctttgtttttccgattgttaagtgatgaaagcttttggcaattgcccatggaaagcattgacaacggaaatcacttcgaatcccacaaatccaattaaccaattaattggtctgtccgggttgcccaacggaaattcacaataaggagaagcagcaatgagaaattgacgacaagcatattttaaaggtgacgagagaggaaaagaaaagggtaaaaggaccattcgaaaggggaggagagagagagagagagtgataaggggagagggaggagagaaagagagtgcgtggggagggggagggggtgtaggtaaagagagtgagaaaaacaattagaggggagagcgagacgagtgagaagcaggaagagggagagataaagcatagtgtggagggcggggggagggcaggaaaggggaaaaaagactttgtccatcgcctgaacctccaccggtggacggggcggtgtccctttgtcccatgtgccatttgtccatcatttcccttcccctccccctttgtccttttcgtcattcattcgcttcagtttttcccacgatgaatagacagacatatttatagaaaagaaaaagggttctgaaatggcgtggcaaagcgattttttttttgatgagtgatcctttaagggagaaagacaatggtggggagagagaaacagacagttagagagagagagagagagagagatgtgagagagagagatgagagagagagagagagagagagagagagatagagagaaagagaaagagagagagaaagaaagagagaaagagtgagaaagagaaagagagagagagagagagggagagaga

SEQ ID NO: 9039 - DNA, 1684 bp, Heterodera glycines
  unsure (1)..(1684): unsure at all n locations
cataattgtacttggagcccaaaattgggccgctgtgcattattattattttttaattatgtaaaagttgcatcgccgtctttcatttttatttattggatatttagttcacccaattttcatgtgattgtcattgtttataagaaacgtctgcgtcaatacaattaatgaaaactgctcttcttcagcagatcttttgtttgtgttttgcagtgttacaaatacattttcaatttaaaccctttttaatttaatcattttaatttacataatttttagcgagtccgcaatttcatggacaacatttccccgcattaaaagagttggaaacaccgacaaaatagagcatatttttatttttataaataatcattaattaatccatcacattattcaatttccaattttcaacatttttttcggtgtcttcaaaaagaaaatattaaacaaaaatcacttttcgagcttccctcgtaaaaagttaacttcaaaaaagtaaaaatatataaagtcagccacacataaaaatattttagcgctttttcttgattatggcaaattataaatgttgttaataatacataaatttcgtttaaaatttttctaaaatggttaataatacataaatggcatttaaacatgtgttcatcattcattcattgtcaggtgggacattccaagcccgtgatcccctcaagccatttctggtcaattgggacgtaataatttattgagtctgtgaaaagcaaaaaacaattaatttagcagctttcataattanacagataatattttaaaattgaaatgtttttgtgtcatatttttgccaagttttacttttgttctctttcacatcgcatgagccggccgaaaggatggcaatttggacaaaatgagtgccattgctggccaaaagtgctccgccgctgtccccctcaaacagaaaagtgacaagagaaaaatgttggggtgggcaaatcatttttaaattataattataaatattaattatttctgtttttgtagaatagaaattattttttttttccaatttaaatttgttttcattttttattatttagaggcgttttcactttcattaattccctaatatttcggattatcccacaaattgcctgcatgacagtgttcgactcaacacaaatgttccctttgctgtcgctaattgattcacagccaacgatttgcactcggcgaccttttagcattttggcattcctcgtttcgcccttacaatcatctaaaaactcatcgactagtcaaccccccgaaaaaaatggcacaaatgatataccaatcgattcgtcttgacgagctatgcacgaaaaagtaggtctccagttgcggaaatgccagaaaaccggtttttgaaccggtttaaaactcgaaaaattgagtgaaaaaggtgggccctgaccatttaaaacggtcaaattcggacaaatttggtatcattcaaaagctcttgatcagctaagtctaaaaaacaaggtataaattcgaaccgatgacatctaggcactgggacaactgagtccagtgaaaatggacacttcagtacgaaagaaataaccatttaaaagcaaaaatttcgcaaaagggaacatgcgaagacggagcaagtagtggggcgagacggaagacgtctgacgagcgccacagg

SEQ ID NO: 9040 - DNA, 1079 bp, Heterodera glycines
tcgactgtgcgacggttttttagcgcaatactcgatattctaggataaacgattttcatgcattatataagaagaaaactttttttattttttggtactgaagtgtccattttcactggactcagttgtcccagtgcctagatggcatcggttcgaacttataccttgttttttagacttagctgatcaagagcttttgaatgataccaaatttgtccgaatttgaccgttttaaatggtcagggcccacctttttcactcaatttttcgagttttaaaccggttcaaaaaccggttttctggcatttccgcaactggagacctattttttcgtgcatagctcgtcaagacgaatcgattggtatatcatttgtgccattttttccggggggttgactatagtatatcccataatttgaatcaatttaaaccaaataataattcatggtatcttgcaatcgctctaggtgttctctatcagaatattaatttagaaattttattttacaaaatagtaaaaaaaaaagttatggccatacattttcaataagtcttgagtcaaatttgtttgaccaggacttttttgaaactcgatgaaattttcttgaaattttattatttaatagattttatagaggaattgaagttcttaaaagaaatttaatctaattgcttctgaaaaaagttataaagcattgaacaagctattttttgacatggtcatgcaaatataattataaacatttaaattttaaagtccttaaaatgacaattgagccaaacttaattaatatcattcgatagctataagaattctctattatctttaaaatttcaaaaaatttcattgggtttcaaaaaagttctggtcaaacaatttagactcaagactattgaaattttatgaccataacttttttataattttgtaaaattaatttcgaaattaaaattgttattgagaacacctagagccttgaaatattaatttagttgaaattgagccaagttattaatttatatattttacattttttattttcctacaccttggcggtttttaggaaatgacccagcac

SEQ ID NO: 9041 - DNA, 2669 bp, Heterodera glycines
cccctaagaatcgacccgaaaattttcaaaaatgcacccataagaaatggaaattatttcaaaaaatcatctccaaaattaatttaattattttattgacgataatttttgattttgaaaattatgtatctcattaatgatttggcataatatttttgctttttgaagaaattttcgattttactcccctaaatttgaaagtttttagcaaatatttacccatttttagcaactattttgggggttttttagaaactaaaaactaattatattggcagtttttagcaattataaattggagccctagttatgactagaggaactcaaaaaaccttggtttttgaggccataacttttttgaaagttaacaaatttttttgaaatttggcagactaatagaaaacatttagtctatcgtatgatatcgagaattaaaattggattgtttagagcaaagttataagcaaagcatttaaagagcatttaaattgtttttgttttttacccaaatgaaagtattttccctctttggttttgtcaaaacaatgcgcggctaacagcacaaattccggcgaaataaatgtgctagcgcaattttgaaatattttcattttattttgttcatttcttttcactaagccttgaaatagcactgtccacggcacagtttttatgtcaatttcgacaccgccaaccatctgaaaatatgagggagagagatttaaaatgaattctttaattgtagggccaattttgaaattggaaattgaatttcaaaatcaaaaaatagccaatttcataattttagaatttaaaaatatttattttaaaaattgaaagtcaaataataatttttttaaatcattttcaataaaatctcttaggtttttcttttgattttttatatgttttaaaatttatccattatttaattaatcttttacatattttttccatttttttaccatcggccgaattcctaaaaccccgtggagtttggcagaagaagagaatgtaacacacgcagaagaagcgtatttacaattttcacactaaattaaattcttttttttattttttactttcaaattttaatttatttttcacctccaattggcaatttttcggcttttccattgaaatttccgttgttttcggcccaaattttgggagtatgtccaacccgagcagccaaagtccggcgtaatcatccaaaaatgggccaaaattaaattggtcggaaaattctttgccaaaatcgagcaacggtttattggctaaattttcaattttttattttatatattttctttccatttattactttcatttaagttaatttgtgccgaacatttgttggcatcgaattgaatttcgattttcgaatgaggcgttatgctaaaaaatgtaatgaaattgatagtgaataatggtaattaaaacagatgataattagaacgagcagttttttttataaaaccaaatttattgaaaatgtttaaccgagtaaattaaaaaaaagaaatgaaaaaaagtatttcattcatttgaatttgaaatttgaagataagatattttcctaaattttaaatttaaaagtcactttttgttttattttttatttatttactgaatttggtaattccgttttaactttactttttatatgtaaaaataaattcaataagttttaagcatttggtcacccacttgaagcattctcttcccattgaaaattgcgtgccattcattgcaatacgaacttttttgccacattttccgcttttatccaacaaataggaaaagaagcgaaaccgacgcgacactttccacgggaaattctcttcgccggacaacacacttttgtagcacatggccaggcttaattaacaccccaattacttatttattggctttttaagccttaaaaccctttgcaattgccgcagtttttcagccgaatggtccgatcagtgccatttaaatccaaaaacaattttcttaaaataataataatttaaatgtgattaattttgcaaagaaacttcttttctccattttcagcaaaaactttttcattggagataatataataaatgagcagcaaaaaatatatggaaaaaggcattttatttttacaaaattggataaatggaaaatttcaaatgttttgtggtgtataaaaattattcctatgattcactaaacgacggaattttatgttggacaattttaaacaaatgggaaattgaatattttgatactaaagtaaaaaataaaaatgaataaattgcatgccttattgtttttgtcaatgatgtctaatcaaaattgaaagtcactaaatatttaaaaaacaatttattggttattgactgaaattataatccttaaacggattatatgactttgatcccatcgtttgtcgaggcatttgccatctgattgggagtagaaatagacgtaatttgacgatagatttttttctgcaaaaagtgtttgaaaatttaatggccgactgactgataaatagggatttatgaaaatccatattttttcctgactgtgcgaggcttgaaacgcacgaagaaacaataagaaaagcggctattacaataattaattagtaagatgaaataattaaatgataaattttcccactgtttcta

SEQ ID NO: 9042 - DNA, 852 bp, Heterodera glycines
cttcgctcgcgcacctcgcgctagccgagctttgaaaaaatttattatcttctctctctctctcacctctctttctttctccctctcctctttttctctctctctctcttcctcctcttttctatctctctcctcttctctccctcctctttctttctctctctctctctctcctcttttctctcccttctctcctctctttctttctccctcttctctttttctctctctctcttcctctctctccttttttctttctctctctcctcttctccctttctttctctttctccctcttctgtttctctctcctcgatttttccaataatgaagaaatatgtgctcgctcataacacaaaaaagacgtaaacaacaaacaaaaaagaaaagaaaaaaagactgaactattttccaaaaggaattcgtttcgataaattgtttacttttaaatgtattagttacagcgcaaaattaatatatagatagcccgaaataaggacaaatcttacaaataaggacatttttattttgtaagatttggaccctccaaataaggacaaatcttataaataaggacagatacgcgccctgggttaaatatgcacccctaagaatggcattttcgtgggagaaaatgcaaaaaagttagacgaaatttgaatttttttaaccatttgccaaatttttattaaataaagaagatttgctcaattttggacatttggaatgtgttgtagaggttagtgccattgacattactttctgtcgtgagttcgataccgtttgacgttttcttctttaattattttctttgtgacaaattgttttttttaaattaaatactcataaaaa

SEQ ID NO: 9043 - DNA, 2633 bp, Heterodera glycines
  unsure (1)..(2633): unsure at all n locations
tgatgttggatttagtcgattttgtcacgaatgggttgcctnttcttcaccaaattgtcattcatttctgtccttctccccaatcgctctttttcagttaatgcccgcccttcgctgtgtggccgtcgaacgccgcgctctcagccgtccgtttggccgtcgaacggacgaaaacgttcacattggcaccatcgacgcactgcggctgtttcgctgtcccggcaccagcgaggacggccccattctctgcttgagcggcgcgcgcgaccgccaaattacgcttcggaaatgccaatgcggcgaaatgccagcgtcggtatcctcaccaaatgataacgtaagaagaactcacaataactcaaaaatgttgacagaaaaatggagtatggaattgtccaatggacaacccgacaaaaattgagtcaatttttagaaataaacggtcaatgcttacaaaaataacaaaattttggacctatcacatttgggtgcacaccaaaacgtcgccgcaaaaaaaataataaaaaattttcaaaatttcaagaaacttaaaagtattttagctttatgaaaatctaagattaataaaaactaaatttgctaaatttccggaaaaaaacaaaaaacttgaattttttaactttcctttaattttcttgataaaatttttttttgaatttttctagaattttttttgtttgtattaagctagctaactaaatttttgacaatttttctagatttttttctaaaattattttgtttattcataaaaaataaaaaagtcatcagaagggcgaaaccacttactctgacgactattccggtaaatgtgtcgtagagtaagtgacaaaatatatggatgatcacaggaattaaaaaaagacaaaaatatgtgaaaataaatgtgtgggtaaatatgagaatagacagcttctcccctccattaattagacaatatccaaatttaaatgggcaattaataaatatcaaatttagcagaatggtcccgtgaatgaaattgcgcgcattgacaacgcccacacgggatggatttggtgcatttcggtggcccccgacggacgccaattttattccgccggatgggacgcacaaattcagcaatggcacttggccgaaagcagaatcgaggcacaacaattattttttcctaattagctttaattaaacaattagcgtggccttgcgctcaatttcccctctttggccgcgctttggtgcgttttggaggatcaaaatgtgctgtacgccagcacgtacagacgtggcccaattctgttcgacttacgggccggcacccatccgcaacatgagctgaacgtgcacaacaatttcccagtgttcgaattggccacgggggtcaggcagccggggagggggcggcaaattttgaaatttaattttaaacgctggccgaattttcagccaaattgcaaccaattgttttctattggtgaggataatcggctcgtttcggtggacaaacgacgcttttcggttcgcatttctgttgatttattctttgtccaaccgattttccaattcattttaccattacccaaattccattgccattggtttctttccgctttttcggcattgctttctgaacatcgtgcgcccgtcagtcacgtggactatgcggacgggcatttgtgcctcagtctgaggaatgggcagctgcgcttcttcgaccccggcacattgcaaatggaaaatgtgcggtaaaatgcaaaaaaataaaaataaaattgcaaatttgaaaaatcaattcagcaattgactgtcaccaaaacggaccaaggcccatacaacatagtcaaactgacgcggggcgccacattctgtgccaacaagtggtcagtaaatggtggacgaactaattatgtgtgtcataaataccaattaacaggaaattatttttcatttttttaacaattttgtttcccatattaaacaaattcatatttgcaatgagatcgtcgggttggatctgtaaatacatcttttttgaacatgtccaaacgtaatttgaaaaaagccaaccacttccttttggtggctaagtggagcatggatggtttggagtgggcttttggcttgggttcgattccgcattatgtttaaataattagaatgaattgttgtcccaatgatgaaaaccccagctttccaaagtaaaacgatgtcgaaactaaaagtgttccctaatcattgttatctgagggacattttttcatttttttaaaattcaaatccctttattatctattttatttaacaaaatttatttattttcggttaatttgggaaaacaaatagccaattttcgcttaaattgtgccttccgtcctctcttgcttataaccggtttcttccccttctgtccagtgacaacatgctgcgtatgtacactcccggccttcgtcctcggctgatggccagcaccaaacttgacgcgaatgtgacccgcttggacgtgctcgacggcgcggtggtggccgcgctgagcaccggcgcactcgcttactttcttgaccgatgaaaaagcgagggaagaagagaacggcactgacgaagcgatgcctggaattgggccttttgcgggcgaa

SEQ ID NO: 9044 - DNA, 3404 bp, Heterodera glycines
  unsure (1)..(3404): unsure at all n locations
aaaaacgattttaaagcgccggggacaaaaaaaataataaaatttaaaaccggaaaaaggaaaaattctcgcgagggatggcagtgaaagtgaacaattgccacaccattcatccgcacccattcaactgctgcaaattcaattaattaatattgtaatgagttggccaataaatggaccgtttttatcgcttccgccgtttccatccctccaaagggtcggcaaaataatcggcgccggccaattggacatcgtccagctaaaacattatttatacattccaactttgctaattgcctctctaattgatccgctaattaccctcccttccccttttacttggccgcctttctcttccttgccgcaggcgctttcgcaggtgcggaaccctctcagctcaattcggccgaccttaaacaatggacatacaaaaattagaacgataaacatatttcaactttaaaaaaaattaaaaatgtttatttctaagttcactaattgatcaattaattaattgtttaattaattgattgattgtccgtcccccacgacttctctcgtcgcgtgtcgcccgtgccgtcgccggcggtgccgcaattcttttgctctgtcggcgaatttgcgcggccttcggagtaagcgaaaatgaaaagagaaaggggcggaggaggacatccactgagaaggggtaattgagaagaaaatgggaaaataaaacttaaaatataataattttggggaaaattaaaattaaaataaatataaaaataaaattataaataaaatgcaaaattaaaaaatatattcggaaaaaagttaatttttaacaataaataaaaattttaaattttaattaaaaaagttataacaaaaaaataaatatttgaaaatttaaatagaaaatttaaattctaaaatatataatttataaatttaaattttttaaaaaatgaattaaatggtaacgcacgggctgaagcttatggcacgagtccagcggagaagggttggccgagtccaaaaactgtttcagcgttgtggtggccaaaaatttgtccaacacacaaatgccaccctcggccatgtgacaagtgtacattaaaagtctggcaaaattggaattgaaattggaaataaatttaaaaataattaatgagagaaaatattttaaacaaaatttaattttggagccaattaattttgactgataatctgatcaatttattcttcttcttttctgcccatttttagcattaaaacgaaaaaacttaaaataatttttacaaaaatttaatttttcttattcatttcaattttgtcatattttctgctttatgttttcacttttcgttttgttttgcctccatttgcaccactttcccatgcccacctcgtccgttttccctccactcggaagtgcgcctccatgcattggttgggccgcagcagccatgtcgccgtgcgcacgtgcatttgcgtttgattggcacggaatgccaattcggcacggggcccaacgacgggcagctgagaagggaaagggtgggcgaaggtcaaacagcaaaatgacaaggccaaaaacgtctcattatcagtcagaaaatgtgccaaaaaatattttgcaattcgaaaatgtgccgaaaagagtaatttaaaaaatatactaatcaatgggacagcaaaaaagcatttagccggcatgaatgactatcaaaattttgatccatcttaaaattttgggaaatgccgggaaatggcagataaaatttatttaaaaaaaccgcccataaaacccggaatgctaaaaattcttccattgcgtcaatcacttcttcaagtgggacagccttctcggcgcttggccatcgccaatcggcggacaattcgcccggcgcggcggtgccattccttccgccactcgtcgtccgcacgtcgtcgcttttgctggtgtcgccgtttcgctttcgcttcgctttcgcaatgcccttgtcgtgcactcgcttatgtctgattctgaaatggcactttgtccgctggtcatccttctaattatgtgcccgtccacctgaatggtcccagttcgtccccccatggattatgccattggatttgatgccgtcgccgctgtggcgaagcggcgttgtcaccaccagcggagggcactgctgaaagactgtcgatggaataatacaacgactgaggcggcggtgccgtcgccgcagtcagccaaaaaaggacaagaactgcgctggaggacttcattagcatgccaatggccggaagaccaactggcaaaccgccggcagcacccggagggcgcaatgagtgccaattccgacgatggcacattccctgcgggtgggaaatgggctaattagtcaggacgggttggaccctacggtgggaaaaactaaaagttaaattcattgaattttattggaatccgagacaattaattatacgccttggaaaagcaattcaggcaaagtaaaacgcgaatttcatttttaaacattttattttgttgcaaaatgctgcttccctccccccccccctctcccaccactccaatgtttccctccccccggggctttgtgttggattgtttcgcagtcgccccgcggcgtttttattatgaataagttgcccccccccaaggaagccaaaacaaaaatgaaataataaaatgaaataataataataatgatggtgatgatgatgatgatactaaagatgcctgttctgttgtttcatgaaaaattctgcattcatgcacactgacgccttttgaaaattattattctcccgaagaaatgattactgaatgaatttaattaaaattaattaatttaaacgaaactcattaaatgtttaataaaaatgaaaaaaataatatagaaaatcacttagttcgccgggatccgaacctgatgacccaactcaccctcagaatgatgcctcagaatcctcatttatgcagggattctgagtccttaacgttgtactaacaaccaaaatctaatttcaaattctgatcagagccctaaataagcaggaaaatttttccactcgaaaaccatatgaactcactttggtcccgaatcccaaaatgagttttattgttaaaactttcttcaaaaaaaagataaaaaaatcttaaaataaataccctcttataattangggcaaaggaattatatgcattatacattgaaaattgcgaaaagccgaaaatttttgaagtttttttcttaataaaaattttttcccaggcttgaaaatctttttcgcttttttgtaaagaataatagagaatgttaaaagttttcgattgatataaacaatgttggattggatgccaaagaaaaaaagctatcggtgaaaaaacgagcttggcgcctaaa

SEQ ID NO: 9045 - DNA, 3179 bp, Heterodera glycines
  unsure (1)..(3179): unsure at all n locations
ttttgattgatcatctaaactttatttcgcctttcttgccactttttactctgacatttctatttattaattgaaaaatagccttacatcaattcagatctcctatgagaaaaatgaaattataaaacaatgccataaaaataatacaaatgacacaaactgttaggagtcaactttttgaaaatttaaaaagcgcaataaagaaactaatttactttagtattataatattatctcattttaattaaaattgactcgtttcttaaatacaatgaaataataaatagggactccatttttaggcacaaaaaatcgcgaaataagcacctaaaaaggcggggaaaaaaagtcacaaaaatcctcaaataggcaaataaaattttttgttaacactttttaggtagcaaaacacataaaaattttcaattgtaaatgaaattattattagagaccgcaaaaaaaggcaccaaaaatcgcgaaaaagacactataataggcacgaaaaaattgaaaaaaagcacgaaaatcccgaaaaaggcatttaaaaaattttttctaaggttttagggagcaaaacacgtaaaacttaaccaaaaacttaattttggtcatttaaatggttattaaatattttataatgtttttcgaataaggaaaatttttaaaccgagaattttttttatcaagaaaaaaatgaatttaggcgatcaatttttgagaaaatttttcaattcttaggggtgtattttctgaaaattttcaagtcatttcttaagggtgtattttcccgattttattctatttttaatggaattttcggtaaaaacgccaaaaaaggcatttaaggcacgaaaatcctgaaaaaggcaaaaaaaggcataataaaagtcaacatagaagcctcaaaccaagtggaaaatgtgttatttatgcttaatatatcgaaacaagtgcgcagaaaaaaaggcatatgcctcaaaatgcggtctctaattattatatattttagttttttttcagaaaagaacaaatttgaaaaccaaaattttttatgaaaaaatattaaattttgtgggtctagttttgggaaaaattttcaattcttaggagtgtattttctaaaaattttttcggaccatttcttaggggtgtgttttcgtttttattgcatttttgttaaggattttttcaaaaaccccaaaataggcattataaaagtcatcgtagacaccccaaaccaagcggaaaatgcgtttttcaagtgcgcaaaaattttggcatttgcctaaaaatggagtccctattaataaaagacaaaatgaaaattagaaatttttaaaaatttcaaataaaataataattaaaattattcccgttaaaattttttttcagaatttattaaaaaatgaacgcttttctgtctctgttcggcattttgctaggccttcaatttcacgcacaaatcgtttcggccaccgttacggcctcgctaaaaactgcgaccacttggaatggtggtggccaatacatggtgaacttcaagaacaatgatggctccaaaacagtgtgctctgtcaaattctctctgactccaaaatcaggggtacggtacctactgatactattgattaccaaagtttaataatacttcaataaatatattaggactggttaataacactaatcactagggtcataatttgtatgcattaaaaatgccaagtatgcgcataaaatatgcactaaaaattcgccaaatataccctaaaaacacgaaaaatgcccaaatatgcactaaaatatgccttaaaaaactgccaaaagtggtttttaaccttcaaaatgccaaaaattgtgtgtataaattaagaattgacttttaaaacaccaaaacatgagctaaggagcattttttagacaattgcaaaaatattgaatttccaaatttgtaaatttttattatatgtaaaacaaaattacattttatatacataaattttttttcaaaagttcttacaaaaattgaaaattttttcgatttttaagggtgtattttttaaaaaaatccaaaaagtcgatctttagggtgtatttttcgcttttttcgcatttttcttattgccaaaagtgaccgaattatgctctaaaaatggaaaaatgtcaaaatatgcatttattctcaaaaacctctcaaaatatgcttttatatgcactaaaaacctttaccaaatcaaaaaattttaacgtagaaatgctattttacagcctctttcttagcatatgcgcagaaaaaatatgcaaaatcatacaatttataaccctactaatcacaagtggggcaacaaattattatatctttgattaattacccccgccattccctaatagacgtccatctcgtccaagtggggctttgaagcggtcagtggcgcttccaaccagttcactctgtccaacaatgccgacatagcaccgggtgcgacaaatggaaatggtggactgaacattcaaggcaacggcgcaccgactctcaaactgattgaagcaaaatattacagcggcggtaatggtgcaaatattaaaaaaaaattcgaaattaattaattttataattaaaacgcggcatttttaatcttttaatttttctcgataaaaaaagaattaattttacattttctgcaggagtgtgcggtggatcatcttcttctggcggtagcagcagcgattcttcttcatgtaccattagcataataatccattaaggcttatccgatatcatgaagagtatcgcaaaatttaggcatgggctgtctgtcgaacaccaaaacggccgggcccatcgattcattcctgggcaagccagtcacgaacagcattttcactttctacggtgccggcggacgcggcgcatgcggtctcgacgccggagtggtaagtcgagaattaagtcatgataatgggatgtctgaggaatcacagtttcgaaaaagacccccccccccttcgatactatctttatgagcatgccattgttttagccaaaaatgtcagccgccggctccggccaattgttcaagtcggacgggcagtggaaagacgcatgccgagccgacaaacagtacatgttggacgacccgatttngcagaacatttgcatcnaagttgatttacatgggaaa

SEQ ID NO: 9046 - DNA, 3969 bp, Heterodera glycines
ttctttgcgaatttcttacttaaggtttataaaaaataagtaaaaaacggtactatacttttggtaacaatgtacttgtgcaaaagaaaattaaaaagaaatttaaatattttttattatatgattatataaataataaattttaaattgatcaccttagctccttgccctcctcggagacaaccagccatactgcttgccaccgtccgttggaccaattcattgggaatgtactgaaatggatgacggggaattggtcaaaattaataaaggacgaataaaaatagtcattaaagaagttaatttaaaaaatattcactcccaaattgagaccggaaaacccttggaatttcttaagccgggtctttgacggctcccgataaattggacaccgaaaattggacaccgaaaattggacactagaatactggacaccaatgaaaattagacaccggaaaattggacactatttgataaaaaataaatagttaaaaataaataaacaaaaattttaattgaaataaattatgtattattatttgtagcatcagcagcagaaagccatcatacattcataacgaaaaaagtttttatttttacggaattcccattttttctgcattttttggtacattgatcaatcatcgtctaattttgtacacttttttgccacatttgatcaatcattgtgcatattgaatatttaaattcctgggtttatattttaaaagaggaatttagtgtccaattttcctttggtgtccaaaattccgacagtgtccaattttccgcttggtgtccaattttttttaggcataatttcatagaaagataagaaaattagtctttttgggtggaaggacacagcaaagaaaaagcaactaatcttctgaagaaggacttagccatccatattctctagggcccggttaaaattgcggattcttctgtggaatgaagacccaaaagtttagctggacgcataccggtgggattaatcccgcaatttccaaaattataaaatttttcaaatataggacaattaactggagaaatttatgcccataaaagtccattcctgatggacaattttaaccgggcccgggccgccagataaaaaaagcctattttgccgggcgcgcaaatgcaagtcgggcccgtccgatctcgaaaatttattttttttcatcgccaaacgaaaattttggccattttggcatgggaaaatcaattagccaataaatcaattacaatgaatgtgccattatatgtagacattaataacaaacgttatatcacccttataatccatcgcaaattgccaaaataaaataaaaacattaaaatgaagcggcgatttgctgttgtggcaatggttgcctatttgctgatcggtgcgctcactacgacttgtgaagcgaccctttacgcaaaactgaaatttctttcacttctatgcctgtggccaaagatgatcaaaatgaatccggtgtcattcccgaacaaagccccgagaatcaatcatcattaaatcggatacactcattctccgattcatcttcctcctcatcatcgcccgcctcaccgccccatttacaagcaaaagtgccatttgagcgagttgactcattttcatccgcttcatcgtcaactttatcagcccatttccaaccaagcaagctgcacaatatcaatgccaattccgaacaaaaaaatgaaaacaaaatcaatccagcggataaagcagactcccaattatggtcgtcattaacggctgatttaaacccaaccgttgacaatcaaattgatacactgccacccaaaaagcgcttctcgaaattgcggatcacaaaaacaaaagaatgagagccggcaacagagaatttgattgctgttgctgaagtttcatgatttattgagatttactgatcagttgatccttagtttgtcattttttaaggattcaagaaaaatgttaacaatttatggaataaaattagataattaatcaaaaaattatttcgaccaaagaacccacaaaaataatcattattgctaaataaatttttgctttgagcagttatataaaatttttttttattatttggagtaacgtcatagcaccataacttttataatgcctattgttgcctatttcggggtttttcgcttaatgcctgcctatgcgctatttttgtgcatttttcaccatttttaacatctatttcagaattttaggaaatatcctttaaaaattcaatataacgaaaaaaacaactcctaagaaatgaaacattttcccagaaatttattacttaaaatatttttttttcttgctaaagtttttgctttaaaaatttgtcattattcgaaaataaagctttaaaatattcaataatttcattttgaaattgaaaaataatcgaattaagttttttgattaagtttataagtgtattcctacctaaatgtgataataaaattttttatttgccttttttcagccttttggttgcctatttctcggttttttgtgccttaaaaacgaagcctacctaccagggatgcattccgaggccccaaaaattttcggtaatcagaaccggaattccgggggtcaaaaatttttcggaaattggaattggaaatcggaattccgatcccaaaaacgtcgtaaattggaagctggaaatcggaattccgtgccatccctgctacctactgataacaatagataaaatgttttttttggatattttcaagagtattaattacttttcaaacaaagattaaaaacagtgaaccgaattccaaaatcggtcaaacatgtttttgggttttttgttttaatcgattaaagtaaagcaaattgcttttccatttgcaatggaagtgccatagatgtaaatattattaaattattacatatttccatatcctccattaccaagccatcataaaaaaagattaaaatctgatctaatgagtccggtgccattcaccaacaaagccccgaaaatcaatcgtcattcatcgttaaccacatcggccctttcaagccaaccaatactcacactgtcaatgccaattcccaatcaaaaatccaatacaaaaatatcccgaggataaagcataatatcccttatggtcgtcctcagcggatcattgaaatttttatcggtgtctatcgtttccggcggattattgtattttttaattttgtttttaattgtttatattagggttgttcacgagcttacccatggttttcagttatgcatgttttggaccccacggtttcggtttttcggctattgcggttaatgaaaaaatttcaataacaaatttttattccaaaaattttgatagtcaataatccaaccatttgaagcgcttttaatagcaaattaaaaagatttggccagatccggcagtgccgataggcaacgcagagaagatttttgaagaacttattttcgacttgtggcacatttgacaaaacatgtggacttttctccgcgccattttgctcgactctttttctccctttgtttgaatggtgctgggacgttagtcaaaaaccatcaaaatgggcggaaatagaataacagtgacatggaaattatgtgactaaaaattattcgctatctctcaccattatgagtcaaatatattaatatattaattatgcaaaaaacacttaaagatgaaagacacacagttacaaaaatttttttgagtcagctagctcggaactcatttcagtgaaagttaatcctttaccggggagtatccctgcaaagtttggtatgcttctgctcatttaacaaaatatatgagtgatcgaattttcactataaaagttaagactacattttttggcatatttaaaaagcaattaaaaaatttttaaaatttaataattttcctgcaccgaaggtactcactcggcctcttcgcggcctcgtg

SEQ ID NO: 9047 - DNA, 1736 bp, Heterodera glycines
cgctcattggggcccgactcattgctgacctcttcaatcatggacagggaattctccgcgttattgctgcatttcagccttttctctttgtccgcctttctttctgacagtaaaatggtgttatttctttgctcgctacaacaaatgctcacttttcttctccaatcttcggctgagtgctgaacgcgttcggaagtccaccttttccaccgcccccctcaaccatttgtccaagttctgtttttcttccgtcgtttttacagctgctgatgtatcgatgccatcttccgggccgaacagccaatcctcctcactcactgctccatcatgtcgcaaatttagtgaatcctccaactccacagccaaatccgaaagatccatccaattagctaacaatgatcaaaactattctttgagaatttttcacattcaataattatatcattacaaacataaaataaagttaaaccgaatggtttgatattacaacatgaaacaacaaaaaacaaaagaaacgtaattttatcaatttcatatgtatatttatatttttttcctttaatacaaaatggataaagcccaaaatacaaaagcaaaatcaaagtgtctaaaagataaatgatttgtcaggacataaccggggaagaaatgaccatttgaggcattttggtctcaaattcttaaaaaatagcacctataccgaaactctcgatttcacacttcagctatggccaaggtttatacaaattggaagtgaataaaaagaaatcaattcatccgcgttggattagagactccgtggaatcgctgttgtgcatacgtttaactaacggcaaaatggcaataaaaaggcacacattgagcacagatgacaaaatgaatctgaatgaggagacaataattcaaaaagaatttgaaaacagtcaatctcaatttgcttttttaaattcattctctagggatatatgcggcattgagtggctattaaaattaaatgatagggcggggggggggggaattcgagaccaagagacacattattatcactacaaaatttccgttttaattaataaaaatgcctacaaatttcgccaaacggtgtagcggtgttcacaagggatgggacattggaaatggggcatccatttgaccagggaatggttgctttgcaaggcggccaagtcgacgagtgcaccgaccacagtttcaatagttcggttgttcaccacatcatcgccaatatgcttttgggcaactgattttagaaaattagtgggatatatcgaaagttttgacttttccaaggtttgaaagcgaatgaacccactcattgtgtggattgaatgacgtttggcttcctcaaattcctctttgtatggccgcacattgcgacggcgccactgatcgacctaaaacatgtcaaattgacgaataaaatagccacttggacgaatcaaacagcacaaatcaacaaaacaaagggtcaatggcaactcgtacaaaaaaaaatttctaagaattttcaacttaaacttagaatttttagataaaagaaaatttaaatggattttttagcctagaaaaactttttaaaacacttaaattttcaaaaaattttaaaaaaccagctgaaaaattagtaaaaagctttaaaaaatttttgttaaatttttttaggctaaaaaaccattatttttttatctaaaaattctaagttttagttgaaaattcttaga

SEQ ID NO: 9048 - DNA, 1522 bp, Heterodera glycines
  unsure (1)..(1522): unsure at all n locations
aattttaaatcaagaggcaaatttttacagtaaataaatagacgctgtctaagtagctaacatttataaagaaagtagaaattggattaaatgcatatacaatatgcaaaatattacttttttaaacttgtataaagttcctatttcgtcttagactttgcttatttatccacatatttcaatcggctagtgctttaaggttttgtctttgactttgcttttttttccatttatttcaatcggctagtgattcaaggttttgtctttgactttgcttttgtattcttttgtttcaatcggttagtactttaaggtttatatgtgaacttagttcgtgtatacaatgagaacattcggaaaaatgtctaagtatttttttgttcgaattcgggtttggggctcgaattgcgttaaaatagatgtcagaatcggttttcccggccctagaanaaactttaaaaaaattctctaagtttttttactaattcttttcagctgattttttagtttcttaaattttttgaaaatttaggtaagtgttttaaaaagtttttctaggctagaaaatccattaagattttttatctaaaaattctaagttttaattgaaaattcttagaaatttttttttgtacgagttgcctattgtacgagttgccatgacaccaaaacaaacattcatttgaacagcaacgtaatttctcatctgtccaaggagtattttctcaaagaacaacagactcctattccaacatcccaagtcgcggtcgccgtacgagcaatgatttctggcacagttaaatccataagaaaacaaaataaaaacgataaaactcacgagcagccgtgaacagtcgaattatcaccagtctcaaaattttgtgcaattgttacgcttaaaaaggcaaaaaattgcaataaaaaacgaaacatctaaaaaatagaattacaaggaaaaatacgaataaagaaggcaattaataatttgatcgtgtaacaaaaactaaacaattaaataaaacaagcaaaattattcaatttgtcgttgcgttggtgtgacactgttaaatgagttcagttaattgataaacagtaagatagcaacgaaataataggagataaataataaataagtcacaaaaatggatggtagtttttctttgaggttggacgaaaaggactcgcttcatcaaagaggcacgtgagagaaaagataactaaacgaatatgctgtcgatttattttaattttctgttaattcctctccccctttttgtaactgcaccaacctgacggactcgccattgtgtgttcgacggatggcttctgagaggatcatcgaaatatcgatgcacttaaaaaatgcggtaatactaccgatggtatcacaccttttttgaaaaaaatattttttgttttcaaaagccacgaaaacatgtttccttggcttttcggggtcgctgatcacggatacggcacccatttccaattctgaatcccggacccgaattcgaacaaaaat

SEQ ID NO: 9049 - DNA, 1214 bp, Heterodera glycines
  unsure (1)..(1214): unsure at all n locations
ttcgacttcgggtccgggattcagaattggtcgaaatgggtgccggatccgtgatcagcgaccccaaaaagcccaggaaacatgttttcgtggcttttgaaaacaaaaaatatttttttcaaaaaaggtgtgataccatcggtaggtttgccaaaaatgctttttagcaacccatggcccgctaaaaatacttgaattttgttgcatcttttcatattttcttcttgtggaattgtgtttgtgactacaaccgcttcaaatctcgatttgttcaaacgatcgatggccggtcccgaaaaaatgccatggacacaaattgcgtaaattttacgagctcccgcttcgaaaagcctgaaaatataaaagtataaatagcaacattcgctagtatatttgaagtcagtgacttttcggcagccaaaacaatggtgccgcaagtgtccgccatgtcgtccactaaaatggccactttgtcttgcacattgcccaccagtgtcatcttctccacttcatttggattattgcgttctttgtggatgagtgcaaaagcagcattcaaacgatcagcaattgatgtcacactaaatgggcagaataaacctggaatattttatgccaataccgtttggcacctccggcatcaggcgacacaatgaccgattcctgccagtgcgggattgtctcccgtatgtacttcaggatggccggctcagcatacaaattgtccacaggaatatcgaaaaacccttggatctgcgaagcgtgtaggtccatggtgatgatgtggtcagcaccggagatggaaagcatattagccacctgacagaacagctccgcataaaaaggcaaataaccgaaccaattttgctgtgattggggcccgtgacttgtccttcttgtcctgcctggcatatggaaagcacggaatgacggcagtgacgcggcaagctgaagcaattttacatgcactgatcatgatcaacagctccatcaggtggtcgttgatttctccacacctgcaaaagttgtccaaagagtaaagcgaattgcgccgagaaaaacaaattacccgctctgaattatgtagacatcttcgcctctaacagattcgattatttcgacatttgtttccttaagaagcaattatttgtgtctgtaactttcggtctctaagcccaccttattgctgaatttnnctttaagcgcttttgcaa

SEQ ID NO: 9050 - DNA, 2237 bp, Heterodera glycines
atgctcagcaaattttgaccgacgtagctgaattgcgcgatttggtgttggacaaacgcaaggagtacattttgtgcagcaatgcattttcgctttacggtgtccagaaatttatgtccgatgaggacaggaggaaattcgaccaggaaacgggttagtcagaaaagaaatcgaaatatttctctattaaaaaaacaacgcaatttaatttttatttaattgggtttgatttttcgcctgaatggatttttaacaaaaaaaaaactttttttctgctcatcattttactctcaaaaaatgaccaattttgccttttaattaggagccgccgtgaaaatttttgaaaatttgaggcaattttttaatagattttgtcaaaattacctaatcacattaacgctttttggatgtgtttttaaaccaaattttccgccaagtttataaaatttcaaaaaattctagcagtttgcttgttttttttccaaatacatccttggaaaaaagaactttcaattccaattagcgaggctcaaatccaaggacgtcattggcaaccaataacgaatgacagccttgcgaaaagttaaaatcttaacggtaaaagcctcatttccagatttggcctttagacattgcaccaaattgatcaagagtcttgaggcacaaattgaatctgatcgcactttgcgtccatccgaccaattaaagcatctgcttgccgtgatgaatttgctcaatgtttatttgaaagaagtgctttctatcgttacgcaattaaggtaaccgaaagttttctgttcaaaatggcacatttaatatatttttctccataaagcaaaaactagttcaggaggtttttgattacttttttttacaagttcctaatccgaactcgaacaaaaggtggaaaaaaagttggctctatgctaaataattcctcgaatttttaagggcaattcatgtgcgaaaatcacgccaaattcgtcgtatttgccggttggccaatctcgttgaaatgtatggggcacgaattgaacagacgcaaaaggaggaggaagaaaaggcgctgaaattggtgcgaatgttagaagagctgaaagagaacgaaaaatgccagtggaggaaagaggaaacacgggaagaagacaaagagaatgttatgttaaagaaaggaccaaggaaaacggcggtggtcgacggatgggaggaggcgcaaattgaggaggaagaactgattgaaaagtcgactgaaaggaaagtgccatcggatgggtgggaagaggcacaattcgacgacgaacaaatgcacctcaagaggaatgaacaacattcaaattcagtggatgggtgggaagagacagaaatttggacggatgaagcgaacgaagaacggttcaaatcgaaggatgtttttgaagaggcgcaaacgaaggaagaaattgtaatcaaagttaaagaacgactcaaaccattggatgtgtgggaaaatggtaaaagtgaagagcgcgaacagtcaaaaggtgcattagtgctaataaaacaacgaattaaagccccactaattaacagctgaacaatcccaacttctcgaggagaatagaaaattatttgaacggtttactaccaccaacgcagagctttcgagaatagaaacgcaaatgagtgagatccagcggttgcagggcatatttgcggaaaaggtaaataccatttaaaaattacattgtaattttatttgattttttaaagataagtgaacaggaacaagaaatcgatgtgatccattctaggactgtatacacattggacaatttggagactgccaatgaatttatcagagaggcaattaaaaatcaggccaatcgtcgggtcatcctcatattctgtttgcttgtactcactttcacgctcatattccttgactggtacaatccgtgattcggagtttgtgatatatgattcgatattttatttatgataaaatcgccaaataaacctccctcaatcgccaaataaacctccctcaatcgccaaataaacctccctcaatcgccaaataaacctccctcttatttcatgccttaaacacgacagttcttcccttgtcaaatactttccagtgttaatgattttaagaaagtgaatcaaattgaattttatgcgtccgattaaatttctttccaagtatgtttgaatatttatttgtgtcatttgaaagtctccaaatcattgctatg

SEQ ID NO: 9051 - DNA, 2320 bp, Heterodera glycines
  unsure (1)..(2320): unsure at all n locations
gaaaatgtggtaaaaaaaagaagaaatttatggaaatggtgaagagtaaaactcaatgtctctgacnnatcggaggagggatatgagatttcggtggcggaatcattgggccaggaaacgtaatgaatggaggcggatgagacatagaagcgggtgcgctgattatgggcgggggaacgtttaagtggtgcaagccgtgcgcaaaattggagggaggcggagcattaagggagggcggaggggcaaaagccaatttgaactcctccattttgcgaaggaaataccaacagggggtaattggggtgcccgaaggcgggggctgatagggcacacggaaattcgacggtgccgccctaacattccagcgccggaacatcgagtcctgaaatggtgagaatggttaacaagagaaatgacaaacaatggccaaatccgggagccacagcttaattcattttgaaaaaagcccgagtatcaaatccgaagccagaaacaatttcgaagggaggaacccgaagacctttttttttgttggtcgactgttttctccagtgttattttaaaaatcagcgccggagaggaaaaaacatgcatttatagctgttttcgccaaaagggtgcattttgcttaaaaaatccaggtccggcattggatgactaacccggtccggtcaatttaatggcctaccgaattggtaaaggtagtcccatcggtgccccaaagttgcggaggctgtgtctgctcgagttgcgtttgctgcagtttttgtgggctcgtcccctgcgctgctgccgcgttttcctccatttcggagctgttctcaaacactgtcttctcattggtcgatggtgccatgtttgttcccatcacaatgctgaacatttgttgcatcgcggaaagcatatctgaagtggaaagagatgacacaaattagtcactaataaaagaggacagtaacacactttcaacacaataaaaaatactgtcatccgaatggttctgtcattttctaatcgaaatttggcaccgcccctccatccaaatgtcgctgacctgcaccagaagtgtcttcgtccggcttcccattggttggtattgttttctgctgcggttgttgggtcggcgacgctttgcagtcactgacaggcgatgacaaaaggtccaactgtgtcgtggacagcgactgtttcatcggcgactggtgctgttgtgcgggtacgctttgttgctgccgcactcgctgcttctgcagctgttcgtcttgaagtgctcgttggtgcatcgccatgtattgcgcttgttcctcggcataagcgcgggcggcggcctctgaattttaggaacataaatgtgatatgaatccatctttaggcaccttcagctttcttcttttcctcagcttcgcgtttcaatttcgccgcttcgcgttcagccgttgccaatcgttcattttcagttttttgccgcaaagcggccctcctcttctccacgtctttctcccatagttcgaattgctttacgtaattgatgtacgcctcggtgccaacggaatcgctaatttcataaaatagaatatttaaattgcgacaagttaaattaccgatttttttccttccattcttcgaattgcgctttgtaatcgcggtattgtttttcaagttcttcggttggtgacaactaaagacaaattaaaacaactttaaaaaatatatgtttttaacctttttgctagacatcggtggctgatggaccataaaaacggagtttaagatgcagacaaataactaaaaattatataatatacaacataaaatacataaattaaaatcacaatgaccatattaaaataataaaaggactagaaaacaagaaaaagcgaagggactaacaataagattctttgtgcttcgtacacacataaaaaacaaaaatagttaaacatcaaaattaaaattctattttgattgcagttttataattgtcaattaaaaaagagacaaaatgaaattacgaaaaaatgcctcgtacaattctcaaattttcagccaaaataaaaataagtggataataaattaaaaaattatttgatttttatttacaaaaggttaaatgtcgcttgcccaagaattgctagccgatttggaggaggatggcgatgaggagatgcaagacttggaagtgaagaaggaggaggagcaggacgaagattatatagacgaagtcaccgaagagaaatcgttccccaatttgtcaaaatatgatcggataacggatgtggccaagttgaccagttcagcttagtaagttaattaacccaaa

SEQ ID NO: 9052 - DNA, 835 bp, Heterodera glycines
  unsure (1)..(835): unsure at all n locations
actgctcgccaatgacattgacacgaactcgcgaaaggaaatcatccatcaaatctgccggctgcaacttgcattgttcgctcctttttacnccttaaattctcctctctctttctgtcttaggttgtcagtgttaccgcctccacttcccagggaaagccattggagcaaaatgaggtaatttcaaatttttatcacaaaaaaatcaatgggtttttatagctggatgttatcatcgaagcttgttcaatggctgaggaactgtatgatttgcgcatgaaaatgcatcttttcgtcgaattgcgaatggctctcatcgccccaaatctctgccgaattgtcggtgccggcaccgctgccatgctaatttctcaggcgggcggactcgtaccgttggctaaaatgccggcgtgtaatgtgctaatccttggcatgttttccaccttttattcgtttttattgcaaattttaggaaaacagaagaggactttggccggcttcagctcctccgtgatccttcccaacaccggcttcatttaccaccacccaatcgtccaaactctgccgcccgaccttcgcagaaaagcggcgcgattggtcgctgcaaaatgcacattggcttcccgagtggattcaattcattcttcgttggacggacgaattggggagcgattgtcagtagaaatcaaagggaaattggaaaaaatgcaagagccaccgccggtcaaaaatgccaaggtaattaattgcacaggccccaaaggcgaaaagattcgaaagcctaaattcattgcacattaaaactttttgtggatttaatttgtttagcccctac

SEQ ID NO: 9053 - DNA, 6246 bp, Heterodera glycines
  unsure (1)..(6246): unsure at all n locations
tgcttcatcacctgttgttcatcagcagtaaagcttcccccttatctgcctgtgctcttaccaggnccaagtcttttgctccttacaaacccaccagacggatcagaaaactaatgtttggcttccatctatccaaaaattcctcgcagattttctctttacgaatgtcaccggttaatgacgaatttgtcgcatccaccacaggagttaggcgtctcagaaattgcgccactgtctcatcctccctttgtttgcacagcgataaagttcgtttcgcaatttcccgacgctgaggggagtccaatttctgtcgaagttcactcaatgctgagtcaagagtgtccgtttgtgctggcaataactccttaaacagtgcccgaggagtgtccctcagagccaatttgagtcttgtgactttttcttgttcagtgtaagccttgcctgacacggacaggtaatccttgaaacgttcagcccaatcgtcaaatgcaaaaacagactcctcacaaaacatttccaaacctgaccccactgtgggtccgctcgagagcatgttcaggccaaaaagagtcggcccgtcatcttcgtcttcgcttaataattgatgaattggcacttggttcggtacaacttgattgggctgtgcattgcccattggtgtcacaaacggcgcacgcgacgctctattctgattagtaatactaacagtcccacctgaattcgtcccatcactgtcttgttccaacatctcgactctttcggttaaggtttcgtattggactttcagtgtctcaaaattggcatttgtattggccacgacatctttcacccaattgactttttggttcaaggaacgattcatgtagcgaaaagctctgttcactccatcttctaatttccctatatcattttgagctttctctaaatcagagatttttatcgtggtctttccttgccaaagtttcctatcaatagccgaaatcgaggactcatcatcctttccactcaaaaacatctttgtttcctgcccgaaggcttgggatgtaccaaaggggaactcatttgacgagccccctgatgtagacattcgaagtcgttcagttcgtagtaagattttgttttattttgctaaaaaaaattatttggtaatcccattatgcattaattgagagagaaaaaaattaatgaatgacagcgggtaatcaaatagatgcgaacgccttccagaaataggcttatctgctccatctccgtttaaactccgcctaacaagagcaattaacaattctcaggcgccgcaaaaatgtgtaaagtgaatgatctcgcccaatgaaaaatgcggaggcacgtgattacgtgaatattcttatggcgtgaaaaacgagagaaaacaacgagataaaatgaactttggaacttgtaaaaactgtaactcatactgtaagcaaaatgatagggcctaattttcattttttaattggtccctctttttaattagctaaaatagtgcccctttgattggttgtcagcccgggcctttttgctctcctcaaaaaaaattgttttattatttattttttttgtctcacttcttctctctctctctctcttttttttttgcttcacaatcgttcaagtatttttataaattagtccttattcatttgctaccaggactttttcttggttatttttggcttccttcactctcttttcctattctctctctctcctacaaataattgtcaaattttgtcaattttcgatgcagtaagcccctttagcatttggactagcccggggcaaatttcgttcttcttttttctgcatttttaaaatccctttagcttttcgctagcccggacaaatgttctcacctcttttctcttcgttttaatgtccctttagttttcgactagcccggacagaaatttaaaatgtcagacttctttacttgcgtgtacacgtctttgtttctagccctcaggccagggagatctcccacaaacttctgccggcttacccaattctcagcttcgtcgtcaatgatgtgtcgttgtttcccaaaatgggaaccatccggtgctaccagtgagggatgcgcactgtgcccccagaccaactatgcaccgtttatcccggatggagtttgggagggaatggggaaaagccaaggcgtctttgaccaagccccgaacccccaaacgactaattgactgttaaagatgtgtttattcattcgatgttggatttaaacgaagcgagaaatcggaataataattgaagtctgttccatcactactactgactaactgatcactggggaaagagaaatgcgaagagaatgggcggagaaacattacaatgagaaaaggaaaaacgtgtgaaaaggataaatgtgattgaattgataatggccaatgggaaataattaaatgagggaaatgcgtcgaataatccttacattattatattttttaccgattccgaaccatgaaataaagataatctttacggccaaacgatactcatcaatgaaattctgtccagaaaatgcgatgtaaacaaatagaaaatggctaggttggtgaatcaattcgaaaaaggagcaaagtgccaaaaggtaattaacggtgccacagaaagacctaattaaggcaaatttaacaatttaaatgcactaaattaatttctaatcactttgtcctaatggtcacataaattacagaagaatttaaaattattccaagtaaagcgattaatccaagtactgaagagcatccaatgagcgaccagcttgcattggcatctttgaaagtcaaataaaactaaaaaacaacaacaaattaattgacaaaattataattttattcacttactgtatcattgttcaaatcagccccttaccccacattgccatgaggtgaacctcgctcccatctctcttccgaaattcacggagagccatgggagtggccaatgttcaggaggctcttccgttcctcacaaaggaaggtccctaagtgtccgtggggtttccgaatgaaacttggcgggtgaatagagcaaagattttagtcacaggttggaatgctctgaagcaaatcaattttttaattttggcttcttttatgcaaagtcaattattaaaaaattgtttaaaaaagaaatttatattttttattttttaccaatccttgcttggcccattttccaggaccacttgtttgccgaatttggcaccgaaatgaagcgtccaggagtgcatggcacaaatgctcgactcgctgggcaaataaataattttgaattggccgacgtccaaaagttgcgtactttcaaaaagtgtcaaatagtttttttatgcaaatggaagtaacaaatagaaggtgaaagaaatgtatgtcagggcagggggcgcaaccgcggaaaattcggattaaatgaaatatttaattcctatagaattttttttaaactttttccttacaaatttcattcgattttcgtccccggcggcgcctttcggacaccaccagtctcaaaattgcccaaaattaaaaaaattctcgacaaaatcgctaaaattttcataggcgtcgccgaaaatttttgaattttttaatgctctgttccgtaccccggcctttttcagactgcgcgtccctccactgatcaatgtgttgacagttgaatggaattaaagtgtgaaccattgaaaataaagataggtagtcaaaaaaaatggaaagatttgctgtttgctagagcaaatgatcaaaagaaacgggaaatggataggtttgatgatttaggatgctcggttctcgaattaaaaattttctcgatcttttttgagttttggatgggtcattcacggggtaattttgtagaattgcggtccaccgaaaattaagttagaactttggaattcattatataatttttgcaaagaaaattgaacccaatttccagtggtgaccgcaaatttgcagtattacaccgttctcggtcttattttcgacaagattttgactcacgagcatccctaaccttcgcatcattctctctgatgttgtgcaattctgactaatggttcagttagcccagttcttcggcatccaatgattcaatggtgtctccctctttaatgccgtattcatccatcgttttcgcattgtccacaagttggtcaatgtcagctcgtgatgggtgttgtttgctcagggaaatgtcgccgaactttttgttccaatccgcctccatgaatggccgtactttatccttcaaatctttcacagtgtccgtgcccgtcacccaaacgattacccgccggctaccgtattcaacgtgaatatgaaaattagaaccatcttcgaaagcagcaaatgaccactgtcgtgagctttcgtcacaagtgacaacctccataaaaatggtgtttccttctctgatgccatattcgtccattgttttcccgcccctaagtgctttagcatatttacaatcgaaatcgcatttgcttagtttgatcactccgtttaacttggatttatgcctctgtttattgatcgccctgatcttccgcttcactgttgccacagtgtctgtgctgttcacattaatcacaaaaaattcccaatgatcttgccaccgcacggtaattccagatccatccgacattgttaaaaagggcatatcttctttcacgaaatctatcaccctagccttgtcattacattgtccgaatttgaaatggtataatgtttgtttttcggacggaattccagtgatttctgtcattttctccttcacttcttttaaggtggtcatggccttcaccttaatggagttcatcttctctttgtattccaccaaaaattgaaattcgtccgacgacagaaacagttctttgccttctccaatgccatatttatcgattgtctcatcatctgcaagttcaatccaaaatgtacaagtaattttttttgacaatgtttgtttttgaatcggaatattcccaagttcatcaatgtttgctattttcttctttaaatctttcacagtgtccgtgctcttcgccaaaacggagatccgatttctacggtagttcacgtgaatatgaaaattcgaaccagcgtaggcgacaacctccatataaatggtttcttcgccgatgccatattcgtccattgttttatcgtctgcaagcacattatcactaataccactgaacaatacttgattttgaatcggaatgttcccaaatttgtcaatttcttggatcttcgccttcaaagttgccacagtatccttcttgttcaccaaaacagggtaagtatatatatcatatagcacttcaataatcatgttatcagcggataaaggcatcatcagcgtaagcattgtgacaatgctgaactgtgataagccaaaatgattcattttgcgataaattggctggcaattgaaaataatggaagggtgcaattaggaatgaatgaatgtggtgaatatattacttcaccactatcaaggcagcccttttatggggagaatcctacttattgactactttaatttggcataattatagtgaattattgaattggcaattgagtgatcacttcatttggcagagttatagtgaattatttaattggaaattgcgtgatcactttaattgtgcataattatagtgaattattgaattgccaattgtgtgatccctttcatttggcagagttatagtgaattattgaattggcaattgagtgatcactttcatttggcagagttatagtgaattattgaatttgcaattgagtgatcactttaatttggcatttactttaaaaaaatttaattataattatattttcatccctccccactcccacggctgagactcaattagctgaaaatgacaacgcaatgcttctcacaggcttttctgcttccatatacaattaaatttcacaaaaatggcaaacatttccgagaccaatgagaataatagtaattagaattaaaattgttcttagcaagggcacaacgccgtggatttcctctaaggtcaggcatattcaaaccaatgtaaaagccgatttttaaggggtttttgtctcgaattttgatgaataattgctgggaactattttcacagaaaagccaaattttccgggggaagggtttacttttactgggtcccctaaaaaaaaaaaaaaaaggcgttttttatgatat

SEQ ID NO: 9054 - DNA, 1551 bp, Heterodera glycines
  unsure (1)..(1551): unsure at all n locations
gaccaaaaaaaaacccaataaaatttccatcaatggcggacggtttttgtgccaaattttgttggcacccatttaaaataatcagcaccatcaaaggctatacgccccgtatgccatgccattttcatttgaaggggaaaagatcactcattatcattattgtttttattgtggaaatgtgtccttacaacatgtgaaaattcgagtgctgtaatataaaacggaaattgatagcctttgccagaaacaaaaaaataacgtattggaatatctctcagatcatttgccacagccaccgatcagtccgggacggcggcatattacccatttttaactactcgttcacgagacagacatgaaaagtaactaaatgattgtatacgatttgaaaaaagcagttgcttcacttttttatttatggtagcaattttgagaaagaaactcttattaaagtcgaaaattcatatgttgaaacgcgaaaatatttttcatatttatgtattgatgaaaaaattttatcaaaaatttaaaaaaatttcaggaagtattttaaaaaattgtaaaatcctctgtaaaaatttagtgaaaaatttgaacattaacatttcgacgatatgccatgtttctacgaattcagttaatgatgccaatgtggcaatttgcttatttacccttcgaaaatgcacctgccaattttgacgatgaaattttgcatttaagtttgttaattagaaatttttcaaacgaatggataatttgcagtgcgtgaacggtaattacaattttaattatggacaaaaagacaggtacaaaaaggcaatcccataaaaaattaattaaaattttttaaaatattttttgagatccatttcgcccaattccgatgccctgacccgaactcgaacaaaatccaattttacaaaaacgataatatttttggtggttttcgagaataaattgatatgctgaaacttcgtttatgtttttaatattatgttttgccactaaaaagaaaaaatgtattaaaaaaaagttcagaaaatgtttaaaaatggtaaaaaccaaacttattgtccgcacttttattaaaactctgtcaaaatctaattgaaaatgaatgcgttaactaaattcactaattacattttgacaaatgcaattaaataaaatacgcatgccaggtgttgagtggaatttgtaataatttctcaatatcaatttaacgttaaagatggcaaaaaaagtttttatttttatttttttaaactttgttaatttacatcattttttttaattctttagaatatttaccgatttattcaatgaaaaaattgttgccattttacaaattattaagtatgaatatgaatttcgggaatcaaaacctaatttaagtaacactaaaatcaaaattcttctccgttcaccagctgacattgaaacccgttgtcatacctaaaattattaataatttaaaacaaatttgatgagaaaatgaaaaaattcacaagngaaaatatcacaacaatcttttatgataaatttattttt

SEQ ID NO: 9055 - DNA, 1890 bp, Heterodera glycines
  unsure (1)..(1890): unsure at all n locations
agaaaaacaccgagcagcgactgggcgtacttgccaatgcgcacataatggaccagcagaggggaggaagtggccagctgatcaaaaggacaaagtgatcatcaattgagaataaattaattgatttggattcatatcattagatagattattggttaattgatcagttagaaaaatctaaatgatcaagatcaattaaaggaatttggcttgatattattggctctgattgatccgttagaaaaatgaagttaaaatttcaaagtgatcaagatcagtaaaaggagttgagcttgatcagcaacagaaggcagagagtgcaaaaaaaaagtgataaaaaaaaagctgatcattaggcagatcagcagacagaaagtgatcagcagagcagaagtgtgcacctcgctgacgtgttggatgcgcggatggacgcggtcgcattggtcgacgcgaattgtcacgcgatagtccaaatggtggaacagggagaggccaaaagcgaggccgaagatggcgaggatcagcagcagcagacgctggtcacgaagctgaaaacgctaaaccaagcacagagagaaatgatttatgacaaggagaatttcaaaaagattttcaaaacggaaaatttcgaaaaaaatttacgaattttatagacgaaagattttaaacaaaaattcaaaaagaatttttaggcatttcttctctcactgtgtgcatcggatggcgaacgccgctgaagcgttctaatgacacggccaaaacgaagctaaaaacatttaattgaatttgaattaaattttgatatatggcacaatgtcgctgcggttgagaagcaattggccaatgccacccaatgaattttggtgaagctaaaattaaaatttaaaaaatggaaatttaatttcaaatttaatgaacatgtaaaagtaggcgaatcgaatgcttttgtagaagacggagaaggaggccaaagagtggggcaacatgcagaagaggaaggccaagtcggcgaatgccatggccgagaggagagtgttggccttggggaaacccgaaaaataaatgcgaccattggcacgatggaggaaacgagaacggcatttacggacaaaatgccaaatgccaacaaaaaccaacctgattcttcatgccggaggacaaaaggacgcacaaattgatggaattgccaacgacgcccaggcaaaattggacggggaaaacgtaatgctgaaaagtgacggaaaattaattggctaagaaatgccgaaatggaacacggaaaataggtgttacctgaatgtaatagtcgacctgataaggaatggtttaaattttggcataaaaatattcacttgccatgccaacggtcagtgccattccctggacggaagtgccgttgccgacggcgctgcaattcattttttaaatatttttccaaaaaaataaattgacttttttatttttttaacatttttagctgaaaatatttgctctttagattcattgaagcgttagaatttttctcaaagcctgggaatgaattgaaacggaacaaaaatagggccatttttttgagggggagacaaaaaaaaacaaaaattaaaattaaaatgagatttaaattttaaaattaaaaataaaagtttaaaaatgataaaacaaaaagaccaccataacattaatatatatatatacataaaattctttgaaatgcttctgcccatttgagtgtcactcaatgaagcgaaaataattgaagcccatgggacgacggacaccacaaattagcaaaatgaaagaaaatgagaaaaaaaaaacatgaaaaaaagaagaggaccacccnaataaccnattaaatgatcngagagagaaattggaattcatttttta

SEQ ID NO: 9056 - DNA, 1068 bp, Heterodera glycines
tcccggccattggcccatttgacatgctttatttgttcggtgaatgccatttggaacggtgtgtatcagatgatttgtcgtgggagagaaggggcagcagcgacatgtggagaagaagctgaagcagcagctgctgtgcttttttttactcattagcggagggaatttttccgaattcgaaactcgagacaaaaaaaggagggaaagtaagaaacattgtcggaaatggccgaattaaaattctcgaaagaattgttgaacagaaaagtgcctaattttgccaaatgatttggtcggtttttggtcccttttttgtattacaatttgctgtcgctgctgctgctgctgaatttcgtcgctccattcgtaaaattcggcagcataaagttacatagattgtgttgtgtttgttaagcggtggccaatctttggcgcaaatccctcgggcggcgcgggggggggggggtaattggtgaaaagcaaagcaaagcaaacggacggcaaaatgtgtgttcaaattgttttgagtgggaaaatgctcgatttaggccgaatgtttcgccgatggaaagggaccaaagttttccttttttgtcaactcttagtaatttaatgactttttaggcttcaattgtgagcatttttgctaaaaacggaaagcaaagaggagacaacaaagtttatgatagaaaaagataattttcgacggaaaatgccaaaatattttgtgccgaaattttgttgttgccaaaaatgcaaaaaaaaaaaaattaattgcacaccaaaaaaaagagaaatgtcgcggcacaaattgcgtgtttttcttgtgcattatttatgtgggtatttgttctgcgcggtaattgcctatttgtgattaattttttgatgcataaaaatgtgaggggaaaagaaaaacataaggcacaaaaatgtgaatgagatgattattatgaatggaagaagtgctgctgatggaggggaccacggctaatgaattaattagttgactatgaaaagggattttcctaaaaaattatttttttttggaacgaaaaagggttttaa

SEQ ID NO: 9057 - DNA, 2807 bp, Heterodera glycines
gaagcaggggacagttttttaattgggggttaattagcagttaattaggtaattagattagcatatctgcacaaagtttaatttgttttttctcgcacaaaagcaccagaagaaatggcaggtcgttttgagagccccgtttccccgcgctgtctcgcttcctttgcccacccatgtgctccacactctctcttatttacacttcactaggctttctcctctctgcttgcctggctttccttttgttgtctgtccgctttatctcgcctttctttgctgcctctcctacgcaatttcccactgttttatgcttcttctttgacgagagggatgaaactcaatttaaatgctttttattttatatttttaatttgtcgaacattttggccaaatttggaacaatgggcaagaaaaaaataagttcaaaaagggacaaatgaaatgccattggatacaaacaatacaaattaaagggaatggccaaaaaattgccaaatttttcattttcggctcaacgaaaaattgctcatcgcccgaaaaagcattggccgcgaaggcgcacgaatgcgaagcacaaattcggacagtttgtgctgctgttggccgcaacttttgccaatgttttgaaattcgtacagcacgcggtcgttgctgacgcggcgttggacagcggagggaaaaagggtgaccatgtcaggccaaggctcatccgcggccagccaaacgcaaatgcgacggaccaacgcgtcgggacgatgcgttgtgagagcgtactgtatagaaggcataattaagaattgctaattagggatacgtcaaagggcaaatgcaaaaagagggacttaaagctttaatggatttttattgaaacgtttatccaatcccatggggattttttgagatttcgaatttaaagtatttagcagagtacgatgtggtaaaaaaaatccggcatcatatagccaaaaaacttttcaaaatgggctctaaaaggggttgaaaatgcactcgcctcgaccaattcttcgaagaaagtgggtggatatccgctgaaaatgttgcagaacaccgagtcgacatggcctccgccggtgtagagaagttgagcaaattcgcacgagtatttgaacttgttcagcaccaattggcccatttcgtccacgggcgtaaggccggccaaaaaatgggccaattcgtcgccaattccgtccccgccgccgccctcgtcatttgcagggcaattgctgacattcgatggttgcggctgctgttggatattttgttcaagcggaacttcgtcggcaattgaaagttcgtcttaattttaatttttcaaagatgggattaacatgaaatagcaatttgaaacaattatgcccataatgacaaacattttgccaaaaaataaatttaaaagtttttgagcggtcacagattttttaaactgaggaagactttagtttagagaccagggacggtcccgtccgaaaatttcaaagaaataaaataaaattgcaccgaaagtcgaaatcctaatcctggtccgaccctctttcacaccaacccaaatgtatcgtttcaatggtttgctccgcttcattcctctgttcgttgttccctgaaaacaggaattattcgaattagacgtcctaacatttatttctccccaatttcccaccgtttttgtgcgtctgtcgccccatcgcctccaaatttgccctcatctgcgcatccaatcgttccaatcgtcgccccaattcgtcctccattcgccgcgtccgttcgcgcatggccaacgaagtgtccaaaaactggtcgagaaggtcgcccaacgcactcagctgtcgcttaagcaccttcagctctttttccaaattctttatgcgacaatcggcctaaaataacaatgattcatccttaaaatgtgtcaaaatgcgtctgaatttgtttgaaactctctctctctggccacctgattgttgccatttgtggcatttttcaaacgcgtttcgtacgccttccgagcatcctcaaaataggcaaaaagtgtgcggaatttggcttcaaaatcgtcgcctcccggcgcattttcgtctccgaattcgcccaataaatcattgtttctccggcaatggtgtggaattgtggtcccgacggaaaaaaatcgtagagttaataaaaccaatttttctggggtaaaaaaatgcgctgatcattaatctgaactcagattttgaaaaatcattgattttatctatgatttttcatcaagtacttgatttttttcaaaattttttaattttctttgagtgttttttccaatgattttagggtaaaaaatgcgctgatcattaatctgaactcagattttgctaaatccatcattttgtctatgatttttaaccaatgtggggtggtattcctttcaaatttgcttactgagttccaatggcggcagctcggtacttatacagtttgacccacataaaaaaaaatttttgtttctaatgataaaaacgtgtttctaggggttttcggggctgctgatcacgaatatgaactctattggacgaatttccgaatccctaacccgaaattcgaactttttttcgaaaattttttttttaatccgtttaaaatgtgtcaaaatgcgtgctccatgattctccggtgagctgctcgttcaacacatactcaaaaaataaataaaatttaacaaatttctaaaattcaacaaaatgccaaaatatgaagtgtaaaattggcgcgacaatcagttttcgcatggatacaaagctgccacttgg

SEQ ID NO: 9058 - DNA, 1167 bp, Heterodera glycines
tgcaggtctgatcaaaattttaaatctcatcgttaaaacttttttccttctaagctaatcgattaactctgtctgaccagctgatccttgtgtcgaaataattgatcacttttcatttctgtgcagaggtgcgatcatccgctgcttgtccaacattgtgtttgagcatcgtgtgctcggtgagcacaaggacttgagcaaggattgcaagaagcagctgcgggtcgcctatttgcaacaagaacaggtcgatgtgagtttcactgtcttttccttcgcttaagcgctttcaacaaaaaaaaacacaatcaaaaaaccgattggaggagatgggtgtggcgctgaatttttttgataaaagctgatcaggaagcgcaaaagccatttttggattaaagattactaaaagtcgataaggtcaaacccgagaattcccaagactcgagaatctaactaaaagacgcaccctcagcatacgagaccaagaccccaaaaaagtgagacttttcctcaaggccggcactctcgagaatctctagcagcaggcccgtaaccattggaccgaagagaaaaaaaagggcaattttccatgaaaaatctgcaaaattgaaaattccaattttttttaacaaatattacttttgaatacggtgttttagttttctgatcagaatttcattgaccaatcccactgaaagttattcgcatcggccttatcagtgatcagtgattatatatttttcctaagcaagaacagcgcacatccatctcattttttaaataatgtccatatttttttcaatttgttttgttttcctgcttccgctttcggtgtgctttctaccgtatacctcgttcataaattttttgattgtttactgtagtttgatgacaagcagcacatggacgacgcggacccacaactgatgaagaagtgtgcagctgatctgcaacgctacaactgtatggcccaacaacgatttgaggacgttgtggagtgtctacgggtcaactttgacaacctgggtcagtaaattttggaaaatatcaatgcaaaaaattgaaaaaataaaaaaaaagaaaaataacggggcaaaatttggagaactcttcacagcatccaacggggtccggacaatccgtcagtggataatccgacagtggaca

SEQ ID NO: 9059 - DNA, 888 bp, Heterodera glycines
  unsure (1)..(888): unsure at all n locations
gggaaaggattggcttgggattggatgaacagatggataagtttacgacgggattgggtcgggagaaagtagggcaatgtacattatgcacaaaatatgaaatttgaatgctacggatacagcaaaactcaatttcccaaacaattttagaactcatgcaaatacgacattggcaaatattgcgggaatcagaagggcgacaaagtgctcgactgtttaatggtgggaaaaaaattaattaaaattcataaaaaaattgtaattaatatttaatttatatgaaaattatataaaattcaaaatttaatatttttatttcccaatttcagaatacaaaaattgttcgactgcttcaaaagcgctgtcttaaagtgagttgtttttattcagtagcgcccaaaattaatattaatttatatataattttttttttggaagggttcgaaatttttcaatttttattaaattaaagtgcataatttttaaatttatcttttttggatcgtccccaaaaatgataacttatttttttacagtataattttaatttcattttaaattttcatttttttgccacaacctccactaaaaactgcatgttggtttcaggttgtgaaggagcgtatgcttgaacgggtgaaggacgaccggctgaacccgtcactgttggaaacgtgccaaaaagaagcggaacaatagtacggcactcatacattaaaaaggggggggggtcaaccaaaatttttgcgaaatggtctggagggggggnggggggggggtcagcggccaattttgcgaaatggttccggacatgtaaatagacgactcttttttttttttttgcttttcaaaaccccaatttttgctgcgcactttttcaaaaatttt

SEQ ID NO: 9060 - DNA, 4154 bp, Heterodera glycines
tatatatatatatattttttggaagggttcgaaatttttcaatttttattaaattaaagtgcataatttttaaatttatcttttttggatcgtccccaaaaatgataacttatttttttacagtataattttaatttcattttaaattttaatttttttttttgctacaacctccactaaaaactgcatgttggtttcaggttgtgaaggagcgtatgcttgaacgggtgaaggacgaccggctgaacccgtcactgttggaaacgtgccaaaaagaagcggaacaatagtacggcacttttgccaaatatatttatgaagaccggacatgattggccaaaaaccgattatttaacaaactttaataaaaatgatattaatatttataaatcaattacaatgctaattagtgaaaattgaattttgtcccaatttaagttgtgccgacgattacaagaagatcaacaacccgcagtattcacagcagcaacttggcccaatcattgccacttgcctgaggacacaatttgccaaattcggcagcggcgttcacttgtcaatgggatgcaaagatgaggtaaattaaatttgaaaatttatttgcttattttttctgatccattagtaaagaaactatattttggtcaagacataaacgagagaaattgactacattttgaggaagggcggtggatggattttgaacaaaaaattttcgatgggggatttaagtgaactactgagttcaaactggtaaaaatgcttaaaatggccaacagttattattcaaaaaatgctgaatgttttggtaatcctctaactcattattgacttattaatctcaaggcttaattatttgagtggtataacaaaaagaaaactgttcacttttaattattatgtgttgccgtattatactaatttaccgattaatgtataccaattactctaattttattaattgacatgccttaattgagtatttttaattagaaaattgcttgtcaaaattttacggtagtctgcttatctgtattctatctatacatgcttttcagttgtccaagctgatcctggagagtgagttcgacattcagctggaccccgcgctgtacaaggcatgccgtagtacaatcaacaagcattgtgccaacgcaatcattgcccggggcggcaactatgacaccgtgctggagtgcctgaaagccgatttctacgctaatcaaattccggacagagattgtgcacaacaggtgggtggtggcgatcagggatgtatcggaatgccgaattccgattgtcgattttcgacatttttgggcttggaatttcgttgccgaaatttttgtgggcctcgccacacatcctctgctgctgtgatatggccattagttaattactctgtctccaaaatgagtgttgcgattaaggatatgatttctggctagaaataaacatcttaggactctgtgttctttattagcctaccaagttttaaaaatttctttatctttcaaaaaatttatggccaaaagcactcaaaaagtttcctttggcacggtaaaaccgctaaaaattataaaaaacttaattttcattgtcaaattttgctgatcatttttggtcatggaccaaaaaagcaaaaaaatttacaatagcaaatgactatgttaattggcaacacattcagttggctcgtcgaacacaagaatcgctgatcgacatccatcttgacccgggtctccacgaggcgtgcagcgtggacatccaaagagtgtgcagagatgtgccaccggggcagagtagaagtgggcaaaatattaaaagattattttaaaaatttaatatctttttttattttaaaacaaatttaaatattacaatttaaataaacaaattttattgcgattttttaaaaatagaataattattcctaatcacttaatatatcgttttatttaattttgatgttgtctgcgaatttatcagatcttacaatttattgtttatctctaaattcattaaaaatcaatttccaatcaataaatcaatttcgcaatgcttttttccctttctcagttatcatgtgccttgtggacgcggcacggaacggccaagtgcatttgtccgccgcatgtcaaacaaaactgacggatcgaaacaaactttggcaaatggcacacgacgagtaccgaatggcattgccggagacatggtctgaggtaaagacgtaaagacaattgtggcaaaaaatgtcaaaaaaccatttggagtcattttactcataacattctatatagtttttttttctaaaaattatttagcctcaattaattcgttcaagcatttaaaacataaaaaattgttcaaaattataaatattttggtttttaattaaaaaaaaattcattagcttttaaatatgggtcaattatgataagctgtgattgaaaaaaaagattccgccattttaaatattttgcgtcgtttatttatttttttaaaataatataaaggaattttttgccgacaagcgcagctgggtttttttggcttttagtaatattttgctaaaattttaatcaataatttttgaaatataattaaaaaattgaaattaatttaggcatattccatcattgtgaaccacccgaaacggaccagcattctgtcataccttggcattggtctgctggtgcttttgctgttgggctgctgcttgggacgcctcagcaaacggacgtacaacgagctgaagaacagatgattgatttgtgattgatcactctgatcagaaaaaaaagaattttgttttaattatttaccatatttttatgagggttgacagaaccggcaattttttttttgaaattttaaacatgaaaaaaaatttcaaaaattcgatcagcagcaacatttgttgttacttgacaatagtgtacaaactatacatacagaaaaggcttttgcattgaaaaggaactgatcatgcaaatctgatcactcccaaaaactgatcatgacaataaattattccaatcaatttctgatcagtcccaaaagtttttaaacgaaatgtgatcagttccaataaattttggttgagcgtgtgttcgctcttaagcaaaatctgactgctgatcagtttattgtctgaccacttggcatttaattcgccggtcctgttcttatcatcgtatcacccatgttgattttatatctctcaaaaattgtgcagctgcaccaaaacattctccgtcgagtaaaactttgtgattttacgccacagtatggcaaactttaatcccgcccccttttttcattactgtaccatttttcacacccaaacacacttcctgccgatcactaaattgaagcctaaaaactattgaaaatgtaatttcaccaaacccataagcatcttttttatattttgtttaaaaatttatttttttatttaaaaaaaatcaatttctttttaaaaaaccttcattcaatttggcaacttttgcattttttaaactattttttctaaaagttttatcattttaaatatagcactcgcataatccatccgatacgatatttgtcaatcatacggtacaccaaatatttgttaaatccttctaattttgtctctgctgaacaagtccacccacattttttgttgatttaactgtactggttgataaaagatttattgcgttgtttgagataaataaagccaggaaatttcaaatttatgaatccccctgcgggagaattcaaaaatttttcgggaagaattccggcgggattttacctaaaaatcacatttaaagttcccgggatcccgcgcagaattatgggatttatgaaatctctaaaaataaatttaaaagaaaaaattttaaaaattataactaataatattgttttaattcttttatgtattaagcacccaaagatcaattttatgggttttttaggtgctaggtcgtttcgtaaaatccgccatttttgcgattttttcgacaaaacaggctataactttgcataaaatgaacgaaattttaattcttggtatcattcgatagcccagcttttctgtttcaaaaaattatcaaatatagactaagttatgataaaaatatgtcttattttcgcacaaatct

SEQ ID NO: 9061 - DNA, 1803 bp, Heterodera glycines
  unsure (1)..(1803): unsure at all n locations
ctctanngagtcggccaaaacaattcaatagtgctaacntcgcccaaaaatctctttttgtcactgcccgcagaaagaacttcaaaattgcaaaagtttaattatttttgttttagtggataattcaccaattggttccttagggtgaaaatctgttgcattaactgagccatgatggccgggcaacttgtaagcaatgtttctggaaccaacgtcccaaatgtacacgaaacggtcactcgatccttgaaaattagtaaatgaacaaatgattttacgataaacaaaagcaatgaaattcttgatactactcaccacatgaaactcggtgtccgtctggtgaccaaagaacaacggagaaggtctcttaaatttgaaggtaatttcttgaaaaacgtattttgaactcgcgtcgtatatgatcatctatgaaccattttgactgtcaattggaccttttcaaagttgtgctgatgtccagtcaatgtcttcacacatcgttgtgagcttgcataaggtcgaatgtcccaaatgcgagcagtacaatccatggaattggacaacacgtggttaccatccggactcagactgagaccggtgactgtgtcagtgtgaccgggcaaaatatgaagcaaaccaagccgacggatatcccaaatctaaacaaatgtttatattaggtcatggccccaacatttaacactgaataatattccattctcgcggttgttaactctacaaaaaataacggaattgataaatcaaacaaacatttggttgattgtaagaaagtgaatagcccttttaaattttgttggctttatgtaatccgacagaaaacacataaaatttacgccccttaagatccaacgcatcaccttaagcacattgtcaatgcccccactgataatttgttcggctgtgtcgttgaatgtcacagaggtcacttggtaattgttcacactttcaaaagtggccacagggccccgacgacgaacatcgtgcacctgaacaaacgcataagtaatggatgcccagggcaaaggcacaataattttgccgccgtcacagccggagacgacaagcgatggaccacgccgggcggggtgacagccgttgacgaaatcggtgtgtgtacggaaacggcgtacgcatttcccactttccatgtcccacacgcgcactgttttgtcggttgaacaggtgaaaaggaaacttgaaatcgaagtgggacgcgataaacacacaaagtattaatgtcttgggaccatctcactatcagcaaaggttaactgtcaatgaaatggggttttgacttggaaacaacaccaagcgtgggactaacgggaaaagctgacaatatgaccggtcccaaagcgagtgacaaaataaacccaaaagaagtgaccttccatcggtgctgaaatgtacgtccataatggcgcctttgtgaccggagagagtggagaagttctcacactcgccataaacattccaaaagactaaacaattaaaggtaagtaacaaaaaatatataatcggacaaattcgctggtcgtagccgacagaagcgagacatgtgccatcgggactgaattgggcggcgtagatttcgccctcatggccagtcaaaagcataatcggacattgtagaccggacgctcgttgctcccccgtgcgcgtagaatccccgagcgaaaccaaagagacgtcctcggaagaaagacgctgccgtttgccacctgaacggattgaccatttcaaatgagcattcaatcattaagcaataataagaaccaaaag

SEQ ID NO: 9062 - DNA, 2520 bp, Heterodera glycines
tttaagcattcaatcattaagcaataattaagaaccaaaaggataacaagaaaaccttttcaaatgttttgtgagttaaaagaatacgatttttcagatgctcaacctatttggcagcgcattttaatcttttcgttaattacccgtatcgcatcaaacatttcgagtgtatttcaaattcacttactcgcaggaacgagtgggagtgcaggtcgtttgaatacttcagtcatctgagaaatccagcttaaaaacatgtaacaagacaaagcataaagtcacaagtataaatatcggttaaacaaatgattaaacaaaagtaagttaaagacaattaattctgtacagttttaagataattaacaaaaaaacaaaatcaagtggaaaaagagacaaaatgacacagtccgttgctcgtccttcgttcattccgcttggctatgacacaatgtcacgttgtgtttgccattgttttgattgaccggcaatttcttgcgccctcgcggcgatgtgcgcggtttaaactcagtgacagtgaacgaaacaccgctcacattgaccaccattttcttggctgcactccgaacgacgagggcatctcggaaagggacgggccgacgacggatggtcagtttggactggaaaattaattgaattgtcaagatgtgtgcaaaatgcccaaatcacaaaacataagcaaagttacattagaaaatcaacaagcaataactaaaaaacaacagcaacaacaacctgttgtttgttggacagtccaccattggccgatggggcacgtgagggcttcggcgaattggccattgccgaagtacacggactaaaagagtcgggcgaattgcgcactgccatttcagcactgttgcgctgttttctttgagtttaatctttcatttcttttttaagcaattattttaattctgttaagtccaaaaaaaacaaacttttggtgtgccttttcaacttcaaccgctaatttttgcaccaaagtttgctgctgaacaacagagggatttagtcgcggctttcgagttgaagtcccttttcgagtgtcgcacatcaaacatttgaatgcttcgtaacggttgcgaaatgtgcaaaccgaaattaaagataaattttagattcaataaacaaaataatgaccaaaaaagtgctaaatgaataaggtttattaaaataaaacaaatcaaatgagttaaaaccttcgccaacagtgcccttgatttattacctgtacattcccaactgcccggttcaaatgccccgtcttcttctccacgaccggcgcctccgctttcccctctcctctcattttcggcgttgttttcgctgtcttgcatttccgcggaattacaactgccgtcgctgtcattccgcgtggtttttcttgtgcctctttttccaacactcgacataatcaagaattacataatgcagaaatctttgctccaaatcaaaatttacgagtttatcttactgatgatgtgtttttattccttctatcattgagtatcgagtcacatcaacccttatctaacatactcccgccttaaactattgtttctacaaaacaataaaagtttacaacaatagcaaacaataagttaaacgtgagaaagaacgaccgttgccctttcgccttcgttctttccatttggaaattttcaaatttaagagacaatttgccaaataattgtcatctcgctcgactcgaagtgctcgtacacacggcgattcaattttgggctccaagtacaattaagttggttttttcgtcttagtggtctgtgagttagtcaacaaaaggggggtctcaggttcaagtcctccttatgttgtgtgttaatttcaatttcttcttttaaagaaggcagaaatattttttattaataaattgttgatatcattggaaagctctaagtgtcctctatttctggagaatattgtaaattttatttggtttggccttaaattgtggacttggctaaaaaagaattaaatttattgaaaacttcacctagttgaaaaatttttccctatgttcaaattttcttgaaattttgcctagactagttttttggccctctctatcgaattacagtttattttttagctgtctagtttttaactcgagatcggctcttctatttttacaagggaaaatccccaaaaaaaaattcaagttttgcaaagttttggcgttctgattactaaataaataataaacctatttgcactgggagcccaaaattgaatcgccgtgtacactatgggtcaactccactgtgcagagaaaagcattctaataattttggttaaaagagtacaaaatcaccttggacacttagaatcagtaaaaaagaataaattttagcattttggttagaaacagctgcctcggactgagttataacgtaatgaaaatttgaaactctcacaacttttttcatattagttaaattgcttagcattcgattagaaaaagattctccttttcaaaaa

SEQ ID NO: 9063 - DNA, 1228 bp, Heterodera glycines
acataatgcagaaatctttgctccaaatcaaaatttacgagtctatctcactgatgatgtgtttttattccttctatcattgagtatcgagtcacatcaacccttatctaacatactcccgccttaaactattgtttctacaaaccaataatagtttacaacaatagccatcaataagttaatcgtgcgagagcattcgcactgcccttatcagtcgttgctcgcagtccgtaatcgcccaaatgacgagtcagtcaatcacatcactctcatccgcagactgaagtcatggtgcacacggcgattcaattttgggctccaagtacaattaagttggttttttcgttggtgtggtctgtgagttagtcaacaaaaggggggtctcaggttcaagtcctccttatgttgtgtgttaatttcaatttcttcttttaaagaaggcagaaatattttttattaataaattgttgatatcattggaaagctgtaagtgtcctctatttctggagaatattgtaaattttatttggtttggccttaaattgcgcacttggctaaaaaagaattaaatttattgaaaacttcacctagttgaaaaatttttccctatgttcaaattttcttcaaattttgcataggcccatagtttgaccccctctatcgaatcacagtttattttttagctgtctagtttttaactcgagatcggctcttctaattttacaagggaaaatccccaaaaaaaaattcaagttttgcaaagttttggcgttctgattactaaataaataataaacttatttgcactgggagcccaaaattgaatcgccgtgtacactatgggtcaactccactgtgcagagaaaagcattctaataattttggttaaaagagtacaaaatcaccttggacacttatttgttagaatcagtaaaaaagaataaattttagcattttggttagaaacagctgcctcggactgagttataacgtaatgaaaatttgaaactctcacaacttttttcatattagttaaattgcttagcattcgcttagaaaaagattctccttttcaaaaactttttttagatatcaaatttgttcagtttagttgggaatgaagcgagttatggcagatcaaaataaaaatacaaaaaaggcattttccagtgtaaattttgaaatagcacaaaaatttacgccaaatgcgctaattggcgttatgaac

SEQ ID NO: 9064 - DNA, 1438 bp, Heterodera glycines
  unsure (1)..(1438): unsure at all n locations
tatacaaatatctcctgatggactgtagtcaaaaatacaaaaaattactttcaaatcgtctacgatcatctgctaactaatgtcaggtttgagtgccaaaatgcaattctgcaggctcttatagaagaattagtaagtagatcgcaaatccctcttatgtgtataagagcatgtgcttatcattttaattttaacaattaataattcttataacattagaacaagttttttttaattaaactttactgtcgaaaactaacagcaccttttttctaacactgggcttgacccatagtgctggtacatattaacaagagcccggtaaaaaatattttacgggagctgtaccgggaatcccgggcgggagtattcataaatttaattaaatactcacaaaaatatacttaatgcacaaattttgaaggacaatccttttcttaaagaagaaataaacagaaaatttaatagattgaaatttgaattttttaataaatttctcaaaaccagaaataaacgcctgttttagaaatcagaaatggtgcttactgatcagcgacccgcaagccacatgaaacattttcttgcgtggcttaaaaaatttcggttttgagcccgaaaatgtcgtaaatccctgcatccctgacactagtttattatattaatacgaatgttcacaatttccattacgatttgacttttgattttcctcgttgataaatcgtttcattaatcaatcggttgacaattcagcagaatttctccatctttcttcagactttccatccgattgatctctccgccgattgcgttcgccgaagaaaattctctgctgaaatgcctttgtcatttccccaaaatgactctttttgctaatgacccgctaattgctgaaggcgaagttgggccggtgagaagttggcggaatccgtccgattcgctccccgtgctttccccgcggcataaaatttgcgaaaaagtgcgattaatgaaaagaatggccggacgtgcgattctcttccaaatcaaagccaaaaacacttaaacaccaccgttttaaataagtgatttttaaaaatggtcttggccaaaacgcaatggttctgccggctgactatgcctttttttaaattaaccgcgagagatgccattttttgcccttttggggtattgcctccttttgatttcagcaccatggcatccctctaaacagcacttttgccatggcattttttatttaatgccctaaactgaccaaaaagggtggggctttgcccggctgtgcgtgctccgttcgatgaggaggagggagtcattgtgggcgagcggcacccccaaggtatggcgtgtccacgccgttgcctgagccgactgangncgaactgctacccgggacgacgccgccgcccgctgcggcacttttgcgacacgacgcgtgccc

SEQ ID NO: 9065 - DNA, 1156 bp, Heterodera glycines
  unsure (1)..(1156): unsure at all n locations
atggtttttggatgtggtcgataaaacggtgtatanataagcganaataantcataaatcaaatggtcgaaattatttcaaaaatggatcccttttntagttgggtgtcatgagaactcgtacaattgcttaggttaggcctaggctttgactaaacaagtttattttgtaaaatatgagttgtcttttgtacgcgttgccattgacccttttagttgctttagggtcccttaacaagtccacctgaaaccacacttgggtgacccgcttgctaaggccggtcaaatgggcaattcgttccaagtcggcgccgtccgggttactgtcactctgaacaatgttttcttcctttttctgagttggtcttttgcttgcccactttgaaatattgctggaggatattcaactgatcttccccaaaagtcgtccgtactcttttcgtcttttgctttgaactgcctaaagtgtacggtagccatttcaattcacaatagcaattcaaaactgctgaaatgttattggaaatgtcttcattgtccttttcaatggatatgatataaaatgccattcactgatgaatgccattttacccaattgccatttgattattccaaccaaattttgcgaaaacaatgccattaaaaagtcagtttctgcttttccctccctctcactttgttcgcccaacacaagctcagtgtaatgcatttggcacaaaagtcgtgggatggcgggcggaggtcgggtcaaatcgtccagcgaatattggtcccccgtccccaattggcgcttgcaatgctcacactgtgtaatcgaaacgacgagggttacggtaatacggtgggtacggtataaagtgtcaaaaggaaatgccattcataaaattaatgcaaaacgaaataatgcaatgagaaccctcgcttttctgtgatcattttgcccaccttaaaacatgccaaatggtagaaaaactcgcgggcgcgccgtacccaaacgaacggatcaatgcgccggtcgcacgtcgcacaataaattttgacgaaattgctttttggggggagtttaaagcatttgcataattagtcatttgatattgcttttgtggctcacttcaagaaagcattcgatgcaataaattcgctcctctctcacataa

SEQ ID NO: 9066 - DNA, 4549 bp, Heterodera glycines
tactttgtaaatgaggagtgaatggggtgattcgtatgagcaatagccgaattaaaaagtggctaattgtgtactcggccaaagagtaaggtggccaaacaaagcggaagtcgtattatttatcatttcttcacgaatgtctatactgcgacgctttttttcaaatttattaaaattactgaactttttattttttcgattaacttaatgaaatcaaaaatatatttttgtataagtacatttgcaaaattgaaagtttgatgtattttttcattaaacatataattaaattaacaatgtttgatatttatttattacaattgaatattaaataaaactttaattcaatcggcattttcataacctccttaatttttgagttattaaattaatcttcttccattagtagaagctaattgataattattgtcctaaattaattgtcattgaattgaaataagatttcaaatctttttattcaatatttaatttatctttaagcattattttaaatacgtttctatttcgtctcaagtattttttttataaattttcactcttataaatgttaagtattatatttaattcttccatggaattgcattaccaagtaaaaattatatatattttttgtttttatttattttttcagttatcttttaattttatcaaatttattcactttaattgattaatgtttaactcaggctttaattttatgaaaaatataaataatcaactattgaaatgcaataaggtgaatagttttttcatttcgattccaaaaaaaaagtttcatctcaagcgccgtcaataatcttttggtcagagcgagaaaaaaatgcatgtcgggttccctaaatgtcggatccccaaatgtcgttcggtccccaaatgtcgggtccccaagttgcaaatccccaaaagtcgcattacgcagttttttttatttttttaaaattttgcgaaaaatatttgctcattaaaaacaaattaaaaattaaatgattcgcctttttaaaagaagcccgaacatttatttaaatatattctcgaataaaaatagcgaatcaaagatgttatcaaaatagaaagttaaaaaaagcaccttttaccggtgtacatttataacttatttgtaaaaaaatcataaaattaaggcacaaataagataaaaaagctttagcattccggcgtgacattaacacaacccaaatgcatgaaattgaaaaaatttaagcttagcctctcaggaaccttacaggaattgtctatttataacgagttctaaaaaatattaatttcactaatacataaaaagaatattaaaaaataaatattttcttaaatgatagtgtagtttaatagaaaaatatggtagaaaatcagataggaattgttaaatcattaaaatttgtataaacaattttcttaaggaaaactttaggaaaataaaaagcagtttcgaaacactaaatttccaaatacggagaaaagtcaaaaatgttgaaatcgaaaacgataattgttccttttttaagatagacaattatagctagacctgacaaaggaaggtccccaggtgtccgtgggatttccgaatgaaattttgtgggtggatagagcacatagggttcttaagaaaaatggtttaatttctgagaaataagtaggagtgccgagttatgatgtgccaaacctttatttttgcccccactagttcgaatccctcttatgtaaatttatttttttaaattttacccttgaacaccctttttgaaaggtaattattttcatttataatatgcatttatatttgaacgaaaatgcatgtaaatcctttaaatgtctctgcttcaaaaaaaattctcaaaaacaaagaacaaacagcaattaatgcatttgaaacggatattgcaaaaaattttgccgaagaaattgaaagatgcaccaataaaaattattatttatatataaaaaatataaattgtaaaaaaatcatagataaaaatcccgcctaaaaaagaaatgaaaaatggccagaaaatttgagtttttggcctttggctccactttcctttagtcgatgtatcgcctcaattcaatttcttttgcataaattgcacaaattgtttctaaaaaaagttatcttttgctgagcatataaataaaatagtaaaaaatgcttatttaaaggcatatcatattttgagaatcttatagaattagccacgcgaagaaatattgcttacttaactaccgcttttaaaattatgaagggttttacgagtcttgatgctagtaaactttttcctttttctgatcgatcaattgttccaattcaggcagataagacaaatcttcagggcattactaaaagctatggtatgagttctaagggatttcattgacatttacattgacatattattattttatttttttaaattttattctacattttcatatttttgtatttattttgacattctttttgcttttttttctgcatcacctaagagcactaacgtgcctgtgggcaaggaaaaattagtaaaattgctgttttatattttcagtcattttatagcatttaataaagcatttgttttctcatgccatagtaattgatttcaaaataaaattttattgaatttatcccctcatttacaatcataaaatattacattatatacccgaataaattttttacttgacatttacatttattttattaaatataagaatagattctgttttttgagatttttacactaacttagtttttctcttgagctggcattatcttaattgaattaataatggccatatattttgataataatttatcttgcaactcaaaatatgtaagttagttaacttctattctaaatcattattattcttgtttttattggagatatgaattttattttatttttggtaattcttctaaaatgtaaatttttaaattttagtaaaaacctttttttagtgtttgagatttttgagaatttatagaaatttcttgtgaaaaaattaatttttttttttgaaaatataccccgaaaaaacacaaaaaattaatttttaaaatactaaaatgtgcttctaaacatatttaggtttttttatggaatttgtgctcacctttttctaagaattttcttccccaaaaataaccatttataaaatttttatttacttattggttacttaaattttaggtttgttcgtatttgatcgttatttatttatattttcttttaaagtaatagtttagctaaaattagagataaacaatctaaaattgttttttatatttaatttttaatgcttttctatgagtcaatattttagttttacgttaattttttgattccaaataagtctacgcaatatttttggctgttttgcacttctaatcttacatatatatacatatcgttcataattccatttcaatgttcaggagtaatcccattatttgtaatattgtcaaaatttgcttatgtaaatgtgagtgggaaaaattgaggtcattttttctgattatttaaaatataaattgttttttttatctattttgaagatacaatatttttctttccttaagacaattaaaataaatattgaatgagtttaaaaatgtaataatataaggtaaagaaattattggaataataatcacatcttaaaaaataacaaaaaataaacattatccaaaaactgatgaaaatgaaaaattctaaacgatttaaaaaatgataaatggcacatttttttgacatcagaaccaattatgataataaagaaaaaacgaagctgctcagtaaataaaaaaataaactaaataaaatttatcaaaaacaataaattacgtacatacaacaaaaatctaattttgtttagttgcacttttgacggtttaactgaaatgcgttacgtttcgggatgatcaacaattgtggctcctttgtgattcgttttttagaaattttttaattattgttgtgtctttaggaaatatttattttgacataacaattaacaaatgaaaatgaataaaaataagagttattatttaaaaattttaataaaacgtttagaataaaattatcattaatttttaaaatttttcaattttaataatgataattttatcgataactgaattaatagattgtattaatggactgaatggcatttattggtttaaatctaaagtttgaaagtttaaggaatgtgtactccaacagcaattgcgtaaaatattttagttttattttataaatatatgttttatgataatcgataacattcgattggtggacttttttttgaatatattaattatgatttgattttttaattttttctgatactgtttaattaaatttgttttcttttatcttagtgacatatcattgttatattatataaataaatcacttctgtttatataaatatttagcataccctgtttatttgattatttaaaaatgtcttacaggaattattaaatatcatgatattattaagtatatta

SEQ ID NO: 9067 - DNA, 2966 bp, Heterodera glycines
  unsure (1)..(2966): unsure at all n locations
taccctaattaatagtataaaaaatattgttagtttcattatatcccaaattatcataacgtactttacattttatttcatcttatttaaattgaattatacttaataatttaatttgctataataaaatttttgttagaaccctttaaataaaatagttttcgattcttactttagcatcaaagattaaattttaataattgtatttgccaagaatagtaaaccttttttagccgaaagtttttcgataaattaaaattgtatctcttatctacttgagatgacgattctctaataattaataattcaaagattattttcttcttgtgcaagtttcgaatcttttcaagtcggtcaaaaatgttgaacttttcctttaacaaagttgaactcacttacaaagagatgagaatataattaaagaagtcatagatagggaatagaattacatggaaatccatatttttttcctggactgtgggaggcctgaaacgcacgaaaaacatgtttttagcttggtttgaagcttctaggaaggatttctatatccatattttccatatttttccatatttagcgatttatgtccatatttccatatttttccatattttggcattttgtccatattttatgtccatattttggcatttttcaaaaaaacttttattagaaaatcttaatattttcagaattgctacgtacagttaaaatttcagatcgattggttcatgggaagcggtcaaggttttttaaaaaaaactaaaaaaaaacgtccctattctaatgcaacacagtgtaattgccgaaaaaattcgagaccaatttccgaatgttgaccgactaattgcaaaacgaaagccgtctttgtcagagcgccttaccgagtcaaaaaatttggaaatgtatctcatatgcaatttcaaccaataaatttgaagaaattttgcactcaattttgaaaaatttatgtccatattttgacatttttgccatttatgtccatattttgaaatttttgccattttatgtccatattttgcgatttttggtccatattttattgccatatttcgcgatttttggtccatattttatggccatatttcgcgattttatatccatataattacactccctagtcatagatatttgaattattgtcatgtcaatttttgtatttcaggtttaatatgttttggttttttaaggttcttgtaacattttcttgacaatacacatttggatgaaaattatgaaattttttataagaatttaataaaaattatcaaaaaattaacttaaaatcttttaacaatgttgcaattgttaggttattttaattagtcgttgtttcaatattatttatattcttttctttattggtttttagttttctttacatttttttaatctcttgaaccaataggtgataatatgtccagtttcatgaacacaattgtgtatttaatcaagttataaattaaattcttttatttactatttttaaaagtgaatttatttaatctataataaaattcatttcttgagaataaacaattcctttgcaatataactttttgaaaatattatgaatttaaattaaaatccgtaattttttaattatcaatttcttaattttgtatattttatttttaaattaatgttaattaattaatttggcgaattttgttttaaattattttcataagaaaaactttttatttttatagaatgataatgtttatactatatttataaattatgataatttatgatttaattgaatcaaaattaatttgtatcattaatcatatttagaagtatttctttttagtttattctattttgttttagtttttttactcgttgttgcattatcattgaaagaaatataataatacaaaaaaagtgttatggataaaataataaataacaataatattttaaatattttatataaatcaattttttaaatttagtttttggctttatttttccgcagacaatttttttgaaataattaagctctttaaaaaattattgtcatcaaaatagaatttattggtctcaggaattacagcaatatttattttattgtgaaatatttttacgccagaacagcagaatactatctatcatttgcttatatttccttntaaaatattggtactttaacttaataattnntgaangaatattngnattaaccccccgtncataaagtgtatgcttcnnacatcgatttcacatgattcatcggaaccatcgcatcaatacgaaataaatattaattttgaaactgatgaatttttctgaaatttttaaaacttgcaaaaatacttagggttatcaatgaatataaaaaaaaaaaaatttggtggttttaagttagggataaaaaattttactaaaaactaaaggggggttttttaaaaaaaggtctcccccctttaaaaatttcatttttcttaaaaattaaactcttcttttttaaaaaagcccgggaccggccccggtttcctttggggcccggggcccggtttttctggaaaaaaccaaaaaaaaaaacgcccgaaaaaaaaaaccttttttccgccccccccccccccccgggccgtttttttttacaccttttttaaaaaaaaaagggggggaaaaaaaaaatttttttttaacccccaacaaaaaaaaaaaaaaaaaaaagggggggttttttttttttttttttttttttaaaaaaaaaaaaaccccccccacaaaaaaaaatatttttttttttttcaaaaaaaaagttttttttttttttttgggggcgggcggggggtttttttttttttttttttttcggtgtgttttttttttttaaaaaaaaaaaaaaaaaaaaaaaaaaaaaaaaaaaaaaaaaaaaaaaaaaggaggaggggggggggggggggggggggggggggggaaaaaaaaaaaaa

SEQ ID NO: 9068 - DNA, 2298 bp, Heterodera glycines
  unsure (1)..(2298): unsure at all n locations
ttttcttttttttctctaaaaatttttccactaaatttttctcgtatttttcatcaatttccaggtcccggtcccggttttgcccaaaagtccctgtcccgctctactctaatcttttttccacataatttccgctttcccagaaactttttcacatttgtttcatcaaattttgcttctttgttaattcatcttttttcatttgcatctctnttctctccttctcatctttttccgtttgttctttacgttgtttcttttntaattcgttaatttcgtttgttttttcttcaatttcttttttgtcattttttggcatttttttgtttctttttgtcctccattagttcgccctccttctccttccattggcttttaacaaaaacatttatcaaaaacaattacggtgaagtgtatgcgctatactttttcgtcagtaaacattttcgtcagtgaacgatttcgtcagtgattttcgtcagtggataatttcgtcagtgaacgttttcgtcagtttactatttttatttatttcactgttttccatttttttcgtcagtgttccaattcggcagtgaatattttcgtcagtggctatttatatttcagtctaatttttttatatataattttctttgtgtaattttattttaatagttgagaatttgttttattcaaaaaatgggcttaagcaccataaaatgatatgatttaattattttcaccacaaaaaaaaaactaaatatttaaacgcctatttaatttcaaacaaattcgacagtggacgattttgtcagtgaattcctttttttttttaaatgcttaattcaattcaaaagtgcaaatggtatgcacaggcccgaagatattcaagcggatcacggtttccaatgtcctgtaaaagagcatttaaattgttgtcttgtctgacatatttcccctttcttgctgcgtgtggcccccttattccatcagcaggcgcaatctgataatcaataattcgctgggaccacatatcatcttcttcaatcattttccggacaaaaccgctgagtcgctgatttcctttaagatgggcattccaaattgcatgccagccttcaaggctgttattcgtgcgtgaaagtccaagtgccaaatgcattgcaaaaactagataaggactaagaaaatatgcaaataggcactcgagaacgcatgggaacgatcgcgagataagaagttggagaagtaaatttactaataatattcaacagttttaaagtacaatttctttttatgtaaatcatttattaaagcacaattaatcattttattttgcttagaagtaccatacgcaaaaagcgataaatactgtattaaatagtttaaccaaaaatgaagcacattttaattttatgaatccactgacgaaaatattcactgccgaattggaacactgacgaaaaaaatggaaaacagtgaaataaataaaaatagtacactgacgaaaacgttcactgacgaaattatccactgacgaaaatcactgacgaaatcattcactgacgaaaatgttaactgccccgaacattcgtcgcctttgcatttggcgttgtgccgcactcatcggtcgatggctgtgcgaatgcggcgttcccccgccaattgagtccatcaactggtcgaactgttccaacaaatgattttctagcagccaataagccaattggacgagcagcgaaccgctgtaagactgcagaaggagcatgtaaaggatgacgaaaagttgcgcaatcattcgcttagaattggcacatcctttgttaattgaaggagatgattaatcgtttgatcgaataaaggtcataattgagggctaaggattaattaattgtttaatattaaaatttgaatttattcaaaagcaaatgtgcttcttctaattctcaatgtgttcgcgttgcaacggatcactggtgagagcgcagctgagggcacaaaaagagggggggggggggaggggaagtggggaaggggctttagccttttcagcgaagaaagcggcgaggggagagaccggtttcagaacattcgtgcattcattcccttttatacgacataataaaacaacaaaatatacaccaataaattatgcagcattttaaagttggcaaattgcaaaaaatgaacaaatggaaaagaaagtccgtgattttttgtatagaaaaatggaataaaatttaatgaaaancaataanctcttttctgtgcctataaagagctgaagagatgagcgagaaatgttttttacggaaa

SEQ ID NO: 9069 - DNA, 1488 bp, Heterodera glycines
ataaactcatattccaccatttttgccttttttagtccatattttcaggcttttttagtccaataatttcgagccctacttatcatttgattatccaagaagtgtttgcccctttttgaaggtcttgttggcggctttgttctgtctctgcttgcccagtggaccgctccgacaatgggcagcacatcgatcggactgcttttcagtctctcgaggtggattctctatcggtttttccgtccgaatcccgagagtcccgacattttttaacgtccgagtctaaaccccaagagttatgaatggatggacatttttaacattttcaaacaatttttgttttagaaaaaaataaagcaattttattgtctgtttttgaatgccttgcggatttcagctaaataccattttcggcatcttaattttcagtaatttctttctcttccatttacgtccctttttccaagggcatttccttgaaaattttatattacatggaataagtataacccttttttattgtcttcataaagtatcttttttttagtttcataattttttcctttgtccttgaaagtcattttatctgtccttgaaaaccagttttctgatgctcatgttcctccccccatgttcaaacaacaattctgccttttttactgaccacttgtctcctattcttttcagtttttcgtgccactttttagtgcaatttcgcacaatatgccaatctcagaaatctgtaaacaaaatttctcggcacttttagccacgccgccgttttggtcggtgccgtctgttcggccatcgaactgtacgaaggggtgaagctgaagaatcgctgattactgactaatcgatcagaaacaggcaaaaaggacaaaaaggaagaagaagaagcttctctaaacgatgaatccaaaggatttcgcacactaaaatgagcagtcaatctttttacacttagtcactcattttggaatttaacaatttttgttaaacgctgaattttgccatagttaaatttggatttgtacattgtttttctgtgattttcattgattgtcaaatccccaaaaatgatatttttttcggggaggtcaaaccatgcaaatcgatggcgtttttttttgctttcactagattttttgcgttgcgaaacttcgtgcggaaggaatttatggctgccgttaaaataacaaataatttactttgattataaaaagaaaatatttaaaaagtgtttattttttttgaaacgggttcatagcggaccagggatggcattccgaggcccaaaaaattttcggaaatcggaattccgaccccaaaaacgtcggaaatcggaaatttttgaaaaaattaaaaaatataatcaaatattctaaatattttaataagctaaattttatattattattcataaagattaactcagggttttttggacaaaaatctgttaacaaatcgcattaaaaattacaaattttt

SEQ ID NO: 9070 - DNA, 1776 bp, Heterodera glycines
gatttcacgtttcatgttgccaacaaccgggagatttcccatttcatgttgcaacaaccggaatatttcacgtttcatgttgtcacaaccggaagactttcatttgatgttgccatgattttccgtttaatgttgccaacaaccggaaaaacaaccggaatatttcacgtttcatgttgccaactactgaaaaaaacaaccagagaagattaaagtttcatgttgccaagaaccggaagatttcacgtttcatgttgccaacaaccggcagatttcccatttcatgttgcaacaaccggaatatttcacgtttcatgttgccacaaccgggagattttcatttgatgttgccatgattttccgtttaatgttgccaactaccgaaaaaacaacctgaagatttcacgtttcatgttgccaacaaccgggagatttcccatttcatgttgcaacaaccgggagatttcccatttcatgttgcaacaaccggaatatttcacgtttcatgttgccaactactgaaaaaaacaaccagagaagattaaagtttcatgttgccaagaaccggaagatttcacgtttcatgttgcaacaaccggaatatttcatgtttcatgttgcaacaaccgggagattttcatttgatgttgccatgattttccgtttaatgttgccaactaccgaaaaaacaacctgaagatttcacgtttcatgttgccaagaaccggaagatttcacgtttcatgttgccaacaaccggcagatttcccatttcatgttgcaacaaccggaatatttcatgttgccacaaccgggagattttcatttgatgttgccatgattttccgtttaatattgccaactaccggaaaaacaatcggaagatttcacgtttcatgttgccatctaccgaaaaaaacaaccgtaagatttcacgtttcatttgacacaaccgggaaatttcccatttcatgttgccaactaccaaaaaaacaaccgtaagatttcacgtttcatgttgccaacaaccggaaaaacaatcggaagatttcacgtttcatgttgccaacaaccgaaaaaaacaaccagaagatttcacgtttcatgttgccaacaaccgtgagatttcccatttcatgttgccaacaaccggaaaaacaaccggaagatttcacgttgatgttgccaacaaccgaaaaaacaaccggaagatttcacgtttcatgttggcacaaccgggagatttcccgttgatgttgccaacaactagaagatttctgcatatttgggcctttttctttttagggcatatatatttgaaggatttttagtgcatatcttatgcgcattttttgtatttcttaaaccctagtcgtgtgaattgtgtagtcggcacataaaaccaagtctagagaacaaaacttcttctctaaaacccgaaaattaatgccgattagttcgctcgatcattaaaaaatgagctaaaaaaagtaattcagacaaaatttgacgagtcaacgaaaattaaagaaaaagtcaaaaaacatttgacaacattaagcagattgaccaaaactgttgatttttcgaactggcgacaattttccgcaacagccggccttatgacaaatcgtacagacaacaattggatcaattaaataatgattttgaatactttatgaattttcactgatttcaaaaagataaatattaatatcactaggagcggattttacggggcgaaaaattccaaagttcatccttatggcattgcat

SEQ ID NO: 9071 - DNA, 890 bp, Heterodera glycines
tcgtcgcaacaaattcttgcggatttttatttacagacttagtggagtcaattggtattaatttatattgattttcaatcccgtcagtattcttcacttttaccgtaatttcccgtgcttctttttagtgaacaattcgatagaaatgaacgaacattcgcaactaaactttttcttaattactgtcactctcaaatgttaaatccaaattaatattttgtacatatccgaaacggtgcgcaaaaaagtcaaagtccgcctttctccgtgcttttatccttcgtccttattccaatttcaaggacgcacaggactaatgggaactctgattttacgtaattttatcaatgaattaaagccgcataaaaataagcaaaaaccctaaaaaccccgacctattcattggacacaccgactcaaaaaatgagacatgtgtaaatagagagtgccgagaaaaaacatctctcattttggcgcactatttctttaaaaggtagccgaatcaaattttcgaaagtccatgactttttctgatgcttcaaaatgcttaacaattgcttattgttagaaaaattttgaatgagatcaaaagatgcccaatttggcaggcaaaaagataaaaataattttcgaaaatagtcactttataatttttttctttttttataaagaaatagtatgtaaaatgaaagatactttttttatctgcgctctctaatcatgtccagcagacatttgcgcctatgaacccgatttggtcaaaggcgcaaatgttgggtacttctctatttattgaacatttctcatttttcgagtcagtcgtcagtgtatggacgcgtaaaaatcaatgcatttgctaatggacggctcggattatatcacaattgttc

SEQ ID NO: 9072 - DNA, 3916 bp, Heterodera glycines
  unsure (1)..(3916): unsure at all n locations
aaaaattgttaaaaatcgtactttttttgatcccgaatacactaaaaaaattacgatttgcttatttcctacccaaaattgttaaaaatgatcatgggaggcgaaaaatatgaaatttgatactatattaattgaccaatgatcttttgtttttctaaaaatcattgttaacatgacaaaaatttagcaggggtgggacgggacgtacgctacgcaatttgcaccattttccacgaccgcggctttttacgatttttttgttaagaaattacaggttcaagaattttatttattgaaattgaagcgcaattttaaatgacgtcgtcaatgtcggacaatttggcggatcggatgaagcatttgttgagcacggctaaacttgcggatgcgtactttttggtgggggacggagacggaaaggaggcgagtttatgtttcaatttttgatttttttaaacctttttttgttttttaagcttttgtctgcccacaaaaacattttagtgtctgcttccgacgtttttgaggctccgttttgactccaaaaatggaaaagtggaaaatggtaaaaaaaaaatgcgtaaaaacaacaaatttcctagcaaaaaaacccatagtagtgacacttttacgttgaaaatgtttatttttcaaattagcctctgccgataatcccgtggaggtgcctgatgttgaagttgtggcgttcaaagtgatgctcagcttcatttacgcggacgatgtcagcggactgaacggagacaacgcaatggcagtgctttacgcgggtgaaaaatttagagtatggacccgaattcgtaaaatgtcgaaattataaaattgggtttggtttttgttagaattcagggtttggaattggctaaactaacgtcaaattcgtgttcaacggccccgaaaacaaaccatagaaacaccttttcagtgacttttgaaagttgaaattttcagaaatcatcgacagtattacccaaaacagattaaatgcatgaaaaaaaactaatattgtattatgcatatgggtggtatcatttttttgaaatttactttaaaattttttgtccttttttaatcaccgaatatttttagccagaaaatacaacattttggggggggggggggctgatccgtcgatgtatgcaaattccaattccaaatttgtccaatgttttcttggcccttgttcagacgcgtcttttcgactttgaggtgggaaaacgatgatttatcttcttaatttatgcagagttcccaagttttttgaattaagcataaacagaacaaatcatttttaaaagtgagcctgtaggctttacaagagaaaaatttcaatttttaatgaaatttgattcctttaaaaaatttctagccctcaaaattcagaaaatcatcaaacttgggaggaataaattctgaatatgagtattatataacacattgtagaattttgcccatcaatgtttgcgttacatttgtcaaaatgccggccaattgtttgaatctgaggaatttttgcaaattgatcagaatttgctgtgcgaattattcgagaatgatcagttggtggtcagaaatgaatttgaactttggcaagctgtaatttttaattttttggtattttaatttatttgtttgtttttcgtttaggcactccgttgggccgacgaaaaatgtcgtcaaaatgccatcgaatgttctgctggaaaccaacgttgtcagcttggcccggcactgttcaaaattcgtttcccgctaattccagcaattgattttaccacaagcattggtaacaaacaatttttaaaattgataaaaagaaatttatttattttgcagttccttctggcgttttgacaaacgatgaattggtctccgtttatcagttccattcccacccgaatctccgcgatgttcccgggcttcgaccattggaatttccatggcatgaacgaattgaaggcaacagagggatcctggcgatggaaattgagaaattttctaaatttgcacgagagagagtggggagtagccgattcagtgatgctgtacaaacgaagggatttgaatggaaaatattggcaatgctaatttgtaagcgcaacgaaaagcaatgacaaatgtttgggctttttccttatgtgcgtccctccaacaaatggtgaaaaattggagcatttctaattgcattaattttaattaccaaagatggaaattggagttgcaaatgttctatcacttatcgaattgtttcccaaaagatcggaacggaggatttgtcgcagcaaaaatgtgaccatgtttttaacaaggaagagaacgactggggctttgcaactttcattctttttacggtgagtgacagcaaaatcagagttgcgatcgaagtattgaaaaaactcagtttagtacagaaaactcattcgttaaatcaccataatttgcatccaaatcctaaaacgaaacgttaaaaatcgcgcagtcgcggaaaaatacggtggtcacgctccatccctgttttgcaccaattttcaaaaaaaaattagtaaaaaccccaaaatgaggtgcaaatatcgtaactctagccaaactccttttctcatgaaatatatgggtcggggtcggggggggggggtcacttcggcgcggaccatttcggcgccgcaaattttgaaatgctataacttttttatttgtcagttaactttagccaatctggcatcatttgaaagctctatgtgtgctctatattcacatgtaaaatagaaataaatgattcaaaaataaaaaagttatggcacacggcgccgaaaaagccaagaaaaagtcaatttttgaggttttttggccataacttttttgtaaactgactacattttttgaaattttgcaatctaatagagaatctcaagagctatcgaatattaacaaaaatatttaatttggttgataatgaaaaaagttgttagcaacggcgccgaaaaggccggcgccgaagtgggcggttcccaaataaattgagaattaaggaattgatggagccgagcaaaggattttacaacaaaaatgaagacaaagtgaagctggccattgattttacggtggaataagaagggaaaaagcggaaattggccgacggataagcccatccatccaatcactcattttctgttgattactttgattaccatttacaaaacaaaataatatgtacaataaatggatattggttttttccaattgttattttttgtgtttttttataaaagtttctccaatgaataagcatttcttcccaatgtcaacaatagacaatttgttcattcattttaatttaaacgaaaaactgtattttttttgacatttaaaatcaggtgtaccacttcaatttttaaaccatgttttatatgtaaaatcattgcaaattcaaaatttaaatttattacttttttggcaaaactgccgattgttcgttccctccctctcctttttggcataagaatttttgtattaaaaagtctgattttttagctgtttttgggtcactgattacgaatatggaattcattttgttatatttaagaaattgtggaaaagaattcaaacaggaagcgaaaatgcaaaattttaaaatttcttaaattttatattagaatttgtgaagtttgaaaatgttttgtgttgaaatagtttaagatttgtttttgctttttttaataattttcgaataatgcgtaatttgaaaattggaatttatgaccttttgttcgaattcgagtccaggataggaaataggccnaaatgaatgccanattcgtgatcatagagtgctcatttttcagcacaaaaaattaccgattaagcactgtaaaaagcaccaaattttcacaaaataagcatg

SEQ ID NO: 9073 - DNA, 2946 bp, Heterodera glycines
ttataaaagtttctccaatgaataagcatttcttcccaatgtcaacaatagacaatttgttcattcattttaatttaaacgaaaaactgtattttttttgacatttaaaatcaggtgtaccacttcaatttttaaaccatgttttatatgtaaaatcattgaaaattcgaaatttaaatttattacttttttggcaaaactgccgattgttcgttccctccctctcctttttggcataggaatttttgtattaaaaagtctgattttctagctgtttttgggtcactgattatgaatatggaattcattttgttatattttatttaagaaattgtggaaaagaattcaaacaggaagcgaaaatgcaaaattttaaaatttcttaaattttatattagaatttgtgaagtttgaaaatgttttgtgttgaaatagtttaagatttgtttttgctttttttaataatttgcgaataatgcgtaatttgaaaattggaatttatgaccttttgttcgaattcgagtccaggataggaaataggccaaaatgaatgccaaattcgtgatcatagagtgctcatttttcagcacaaaaaattaccgattaagcactgtaaaaagcaccaaattttcacaaaataagcatgaaaaaagcacaaaaaaggcaaaatcagcaaaaaaaaaaaaattggaaaaaagcataaaaattaagggattaaaggcacagaaaattgaaaaaagtggtcaaaaaaacttttatttgcccctgattctaaaaactaccaaaataggtgctaaaaatgggaatgagatacataattttaaaaatcaaaaactatttttgtcgctaagttttttaataaaaaaatttctggaaatttaactgaataattaagaaatctataggcttaatgattaaggtttcgttctttagaacaaaaaagcgcgaaattggcacctaaaaaggcagaaaaaatcgcaaaggcattaaataggcacaaaaaatgggcaactaaagagatttggcctataaatgtttgagtcacattgtcaaaatgccggccaattattcgaatctgaggaatttttgcaaattgattagatttgctctgtatattatttgatcgtactcctttggtgatcagcaatgaattttcaatttggaaagctgtaattttaacatttattttgttgtaattattattgtttatttttcatttgacacacctttaggccgatgaaaagtgccgtcaaaatgccaccgaatgaaattttgagggaagaaaaattccaaaatattagcaaaataaaaggcaaatgaaacgcggattacagcttttgtcattccttaatattctagagcattttaatttcttcaaatttttgcccaaatccatttatgaataatttaatgcaataaaatattttaattgattctttttatcattttatttgttttttatgtggcaaatccaataaactttttttttattaaagccattttccaatttaaattaaaaaaaagaaattaaatgagaatgaaagcatataaaagcttggagaattgtgaatgtgttcatattttataaatttgaaaccgaaaatgaatggttattattgttttcacattttcacgttttttgcgcttattttctccactcaaatggtaattcaaaattaattaatatataaacacaattattattttaaacatttggaggtcaatgctcagcagaaagaaaacggtttgaaaataaataattaataatcatatacataggaattaaaaaactattatcattaaaaacgaagtaaaatttataattttaacaaaaaacaatttaaaaagcgaaaaattcatttttttctatttaaatttaccagttttttaaaagggtaaaccgaaaatatcgataattttccattttttccgaaaattttctcgatctaaaatattcatttttagtttctcaacccgtgacagatgcaaagcctgaaagtgagaaaactgaataatataaattgttattatttgttattatatttcttgattaaggatcaaaaattaatccgatcggttttcttggtaatattttcttactaaaccttttatattattaaatttaggcaatcaaacaaatccacaggccaatagtacggaaaattgtaaaattaatattaatcggatttattttaaaaaagttcagtttctcaaccgatgaaaaatgcaaagcccaaaagtgagaaacacaaaaatgtggaaattacattaataatatgtattgctttaggatcaaaaattaatccgatcggttttcttggtaacattgttttttttattaaagattttatattattaaatttaggcaatcatacaaatccacaggccaatagtacggaaaattgtaaaattaatattaatcggatttattttaaaaaagttcagtttctcaaccgatgaaaaatgcaaagcccaaaagtgagaaacacaaaaatgtggaaattacattaataatatgtattgctttaggatcaaaaattaatccgatcggttttcttggtaacattgttttttttattaaagattttatattattaaatttaggcaatcatacaaatccacaggccaatagtacggaaaattgtaaaattaatattttaatcggattaattaaaaaaacagtttctcaaccgatgaaaaatgcaaagcccaaaaatgagaaaaatgaaaaattattattatattttaagaaaacggatatgttccacctccaccgcttccggtcggctggtagggtcttccgccagtttttgtgtaatttttattttgactgaaatttattggaaaataaaaaatctgtaatattatcaaattgaatacaattttttttcttgttttagatgatttaagttcattcttctgctccatgtaccataaaagcattat

SEQ ID NO: 9074 - DNA, 3702 bp, Heterodera glycines
  unsure (1)..(3702): unsure at all n locations
caaataaatcaaaattcgtccgaaactatttttgaggctcccctaatctcatccatatactgtattcattagttttgtacctcatatgcccaactgtaatattggccacccaaaaaatggttgagcgcaattagttgcccaaaactgttcagcacatagagcattttaatggccaagtaaattagtgttgcattcagtccacatggtcgtcgaccatacggctcggagaagacggacacctaattaaaataagatatttaatagttaaagaaattttaatttaaaataaaaaaaaataattttaatttgttcgctttggtaatgccattttctttgatatttataatttttcgttaaaaaaatatgaaaaagggtgcttttaatagtgacgaatccaaatacgaatatttggggattaaatttttttttttacaaatttttctaaaataaaaatacctaaccctaatattttttgtgccaaaaaatctgtggcatgatgctaacaacattatacgatactttggcacttttgggaattataattttatttgaaacattttcaatttttggcattttcccccgatcatttacggaatcgctgatgtagccagccaacgcttcaatttctttgtcccgttcagcgccgatcagtacgcgacttttgcccgcctcctgcacaacacttcgcgcattgatcgccgtctgcttgtgcagcatattccatagccaattgggcagccaaaacagcagtgcctgaatggccaacacgaccggcacccaactaaaaattggagtaattaggcaaagaatttaaataatgataataaatggatgggcaaaagtcgtaattaatgaactaatttaataaattcatatttaaatacttattaatatatatttaaatttatttttaaattttgttaaagaaaatttatgaattaattagattagtaaagcattataatagcacaattaaaacctaattaatggtattaaaaattgacaaattcatatgtgaaataagaaattatctaaatattcgatagaattagatttaaaatattaaattctaatgattttcagtttttattttacctctctatccggacaaaccagaataatcacgaaattttcgatttttcgaattgatttatcaaatgaagaaaaaaaaattaaataaatatatgtggcaataaaataaaacatataaatatttgcattacaaatatctcccaaattgtaaaaaatggatttgtggcttttaatatttattatattttgcttattttatggaagtaaattcggcaaaatccgatcaaattttgacgaaatattcggcaacggatgggagaaaaatgaaaatgaaaaaaaaatgattaaaatggaacaaattgatcataatgaaagctcagcagctgatcaaataggtggagaaaatttaaatggtcgaattgatcaacaaaaaagagaaacaattcaaaaatttgaagcaattaaagaaaggttgaagcaaaaaggaaaatatgaatggaaaaagaataacaaaattgagcaaaaaattgcaaaattattaggcacaaatcgcgacaaaatatacaaatggaaaaaagaattaaatntaaataaaaataaaattttttatgaacaaaaaaagaaagaattcattgaacgaattgatgaatttaagtatttatatggccaaggcaaacagaaagaatttgtgaaggaattgggcatttctaatatgacatttcgtaaatggaaaaaagaattaatgccaaattgtcataaaagtaagtgaatttttggtttttattttaattttatatttaagcaaaaaacaaatattccaatgatgacaaattgaaaaagatgaagcaatatttcaaaattaaagaaggaaatccaaaaattagtgacgaaataattgctaagaaattgggaattgaaagagcaacactgatcagatggaaaaagaaatttgcttgaattcaatgacatgtgaagtgaattttgctcttgacatcagggctgcacgcaattacggattgcggattacggaaattacggggttttgggagttacggattacgggttacggatttttgggatttttccgtaattttgatccgtaatttgacttttggattattttttcgagacgatttcttgtacgattatttttataaaaaacaaagttttctattttttatttaaagggctacccgtatttcgatttatttaagaattaaaatagatttataattttttatttgttgttgttaaggctatttgggtagttcgcctagaaaatagaggcatcacttttttgtcacacctatttttcacgcattttatgaaaattcataaaaccttagccaggtgaggggaggaattccccccttcccccgcccgaaatgaaaaattaaaaatttttacaggaaaaattgggacttttaaattttttttgtcgatttttcttaataaaatcattaaaattaaaaaaaaaattgcccggcggcacctatcggcaccgccggaccacgatttactcgattttaccttatttttttaaattttgactacaaaatggcaaaaattagtctttttttggctaaaaatggttacaattcctgtttttgctgtccagcgctgaacttttttaaataacactaaataaattttaccaaaaaaaattcttcggattccccccccccccctccgtaatttttttctggctattaaaatgttgaaataattatatacatatacataaatccgattataatgatcagactttcaaaaaattttcaaaaatcaacccataaattcaaaaagaatgatttaatcagacacaaaattataaattatttgtaaaatttaaataaaaaatgaagaaactccatcaagaaaatcagttttttgatttttattaatcactatttaaaaatttttttctaaaattctgacaaaaattgatttttaaaaattacggattgcggattacgggaaattacggggtttttggacccccgtaattacggattacggagttccgtaactgagaaaatcgccgtaattacggattacggatttccgtaattgcaaatccagttgcgtgcagccctggtccctaggtattacctttttttgcacgaaagtttttaaaaatagaaaattgttcgtttactcttcaaattttgaaaatttggtacttatctagtttaggggacatttcgaagttcacataaatattcttaatgagtttaaataatcttttattgctgtttatatgattttaagatcactttatgtatttgaatttggttcgacccaaaaactcgaaatttgaaaaatttaaattttcgaatttttgttcgagtaatgtgtttaaaagttgaaccaatgactttagttggacaaaaattttttaaaagtttcagggggttttcggggtcactggtcacgagtccggtagccatttcgaccaatttcggacccagaaccggattcgaacaatttttgattttgcatatgctttatatatattatatatcaatcgattcctctaattgtcagttagaagttaaattcatgatttgtgaaaagacaaatttttttttggacgacaacgtctcaacagacagacgaacccaaatgaaggcagcgaaccaaaaatggaagtgtgttgaaactacaaaa

SEQ ID NO: 9075 - DNA, 1287 bp, Heterodera glycines
cccccccccccccttcccccgcccgaaatgaaaaattaaaaattttacaggaaaaattgggacttttaaattttttttgtcgatttttcttaataaaatcattaaaatttaaaaaaaaatttgcccgacggcacctatcggcaccgcctgaccacgatttactcgattttaccttattttttaaatgttgactccaaaatggcaaaaattagtcttttttggctaaaaatggttaaaattcctgtttttgctcttcggcgctgaacttttttaaataacactaaataaattttaccaaaaaaattcttcggatcccccccccccccccgtaatttttttctggctattaaaatgttgaaataattatattatacataaatccgattataatgatcagactttcaaaaaattttcaaaaatcaacccataaattcaaaaagaatgatttaatcagacacaaaattataaattatttgtaaaatttaaataaaaatgaagaaactccatcaagaaaatcagttttttgatttttattaatcactatttaaaaatatttttctaaaattctgacaaaaattgatttttaaaaattacggattgcggattacggggtttttggacccccgtaattacggatttccgtaattgcaaatccagttgcgtgcagccctgcttgacattacacaatcattttaacattttcatcataatttttatcatttttttgtaattatgcttttttaatccaaaaatgctttgatttgctttttaatatatatattctaattatttaaaaagcatttttttgcaaaaattaaattaaaataatttttcatgaattaattagtaaaaatgataatagccaattaaaatgacaacatcataaaataacatttcaaaattttatgaaattaaaaaaaattaaaggcagaatttgtaagaaaaaaacgaaggaaaagtgacgaaaaattgaaaaatttaaaaacggaattttgatcaaagaatttattgaaaatcatttataaacaaaaaatttttaccaaaaactatttttttagattaaaaaactggcataatctgcaaaacaaaagaaatgccaagcgcagaagaactaaaatttaattaatttagcaaaatatataaaaaaaaattcattacgcaaaaaaggaaggccaattcaaacataattttttttaaagtaaatatatttataattattaattaatttaacaccgataataagtgaattggtcgacgcgcttgctcaaatctgacggcacttccatg

SEQ ID NO: 9076 - DNA, 2820 bp, Heterodera glycines
cactgactcaccagtctcataggtgagcgcaaataattccgtagcatcagtggtggcgaaacgagcagaaatgattatgtccacgtccgcttcctccgcctcgatccaattgcgcgaaatattttgctgaaggatgccattggcacagcaaagcagggcacctgaaattggaaacgaacttttaggcattttctgcatgcatgaaaatttccgatttttttttggggggggggggggctaattgtaagccggaccggtgggagaaaattgggcgactgcaccgttttctacggtatagaatgttatggttttttgttggttttaaaaagtctgtttgtttcggatttttccgccaccaaattttgtttgctggccgaatgattacagtaccgcgtgctcgtttgtctttacggtagttgatctcgacatggttcgtgccgcaaatcccggcgcaactgagtgccttctcatccaaattgatgagtttgatgatcgctttttcacccttttttggcttaaaattattgtttttataaaattaatcatttctccgattttttgccttaatttgccaatggcagctgcacatttcggcactcgtacactttaatttgggcttcagttcacgaattttccaatccgcctccaaatggttgggcgtgccgctcagatcaacgcaattctgatctatacaattgccaatatgaaatctttcataagttttgcaccaaaaattttttcataaaaatttattttagaaattcaacaaaaaacaataatgattcaaaattttgtcttagtttgtcacaacaatcttcaattctctgtctttatcatcatactagtccaaaaaattaattgttaacgcaaaaattcataataaaaaaaacaaagacatattttattgttctatcgagaaaacaaatttttaaaatttcatgagtttcctaatttttcatttatatttttgcactaactctgtgccaactggtcgcaatgtgcaccagcataaccttctggacaaaggcattcattgcattgttttggacttgggtagcctccattttggcactcgtttttcgttccattacagtaatctgtacccaaataaaaacaaaaaaatatatattttaaatttcagccttacagtaaccacacctttacagtacatgtgattgattattgctgaatctttgaatgaaagccttttatcttggccaattgttcgttgataaaaacggcccattgtgatgaggtaataatagctggaaaccaaagaaattcgatttaagacagctcagattttttaattctctaagttttaaatcagtgctcacaatgtaaagaattttcagttatttttgaagcgcgaaaatacaggtcaggaacttggaattttgttgtatccttggaacattgcttattgttattttttattaaaaaacccattaaaatgaaaaaatgtttttttgtataatttaatgcattctctcatagataataaattaattactagagcgtcacgggaccgggaactttggcaaaaccgggactttttggctgggtaaagcgggaaaaaccccgggaatttcccggtcccggtcataactggtcaaaaccaggacttcggtactcagttgtccgtgttttggtcccgatcccgtgacactatattaattacccttgtttatcaatatgagccgggtattgcatcacagagtcaaagtcgtaggggaagccaaaattgtcggttttattgaacggttgataattcttcaatattatgaaaaataaaaaatattaaataaactaattagtaaatgtcatccataattataaattaattatatgtatatgtacaccaacaccgtccattctgcaaattggattgactttgataaagtaaaatgcgtcgtcacgctgatgttcatggtaaatagcgagtgcatgtaaaagttcatgggcggccgtgccattctgtaaaataaatggaaatggattaatagagccccgaggggcttttatttaaaaaataaattattaattaaccaattatttattatatacacaaacactgttccagcccagcgaaagttcctgccattttgccaaagttttcccaattttggaccaacttttacgaccgtcaacaatcacttcaatgccttcttccgccgttttgttggtgtcaagcatgaaagttatacatgtgtctttcctgtgataaattttgcataaattgttattttttttcttgtttaatattggagattgaagcacatacatgatgagttccatgccatgcttgatcgcttcctttctttcattaaaaacatcggcgggaactaaataatcaaagaaaaattgtcaattcaacaattgtaatacagtaagcctgtgaatgcgacagaaaaaaaaagtgaaaaaacggcaccgagttcaaaaaggtgggaaaaaaggcaaaataatttttttttttttttgacacttttatctagagtagagtgcaaccgggaattttgggcaaaaccgggaccgggaccatttgtttttctagtcatcgggacagtcaacaaaccagaagcaccattttttattggatttaaaaaacaacaactctaatcagggagagattccggcagcgcccgccggggggaaaaaaagggatttttagtttaatttattaaaaaaaacaaaacatgaaacaaaattaaattaaaagccaaaaattgtggtaaaatcgcacccctgataataaactgcttaagcttaaacaatactgtaacccgaacttttcggttaattttttttgtgttttat

SEQ ID NO: 9077 - DNA, 995 bp, Heterodera glycines
aaaattggtcaactttagaaaaagttgtatgaaaatacctaagttctattttagccataacttatgttaaattttataattttatttgaaattttccaggctaatagagaaaaagctgggatattgaatggtatcaagaatgtaaaatttgattgccaattaagcaatgttatgccatgttttgtggaaaaattcgttaaaattggcggattttatgaaacgacctagcacccttttttacacttaatttgtctaaaaattaggtaaaaaaagttttaaaaaattatatcatcatcgggattcaaatcccgattttatggggattccaatcctgaaaagtattttctcacacgtaaatatcgggatgttaaatattaattctttgcgaattaaagtggtttttttacgtccaaaaatttaaactatgttaaaaaattaaaagaaaaaaatacaaatatatttacttttttatttagtattttttaaattttaaagaaaatttctctataaaaatgttttttttgaaaattcctagaagattcagcacaagcaaaaaaatatttatatacttccccttaattttagggaattttaggtgctggcggtgcctataggcgccgccagggggaaaattgagaatttttactatattttaacagattttcattaaaaaattcctaattttgttgattttagaaaaaaaaaaattggtaatttcttgtttttatgaaaatttagcataattttttggaaaatttgggtgagattttcgttttgatgttctattacaaaatacaaacccaaattaaatgtcaaacattatgccaatttatcaaaattaattataataattaacagattccgatgattttccccaaaagcctctaaaatcctcaaaatttctcaaaaagccacaaaaatcctcatttcaaaaaaaaaaaatcctcattgacctatcaaaaagccacaaaatgaggataaatcctcagatctgg

SEQ ID NO: 9078 - DNA, 895 bp, Heterodera glycines
tttcgatttttgccactgttcactattaaatgcaaaaactaatctcattttgttgctgtgtgtactcctctctcctttatgcctgttattaaagtttcaatgtataatttctgtccaaaaatttttcatttttttttttgttttggcgtttcgccgccctcccattaatgggacaagtggagattagtggtcgtcgtcgtccccctttttgggcatcgtcggcgacgacggatcggcgcataccctcgcccccccccccgccgcacatttttatgctgctgaaaatccgatggacgcattttttggggctgattattaaaattattaataaaaatgtgcaaatttttgagttttggtttttgattttttacctttcttttgtccccacatatagttaattgtttgatgcacccgactctgacccatccgagctttggattctaaatctttttgggtgatttcgatcactcgataatcattatatcgcctaaatcggaacccgagtcgataacttttgcgggtgatccccccccccgatcacccgacactcttcatttcccttaaatcggaacccgaatcccttaccttttggtgattccaatcagccgacaacattcacatcccgaaaccgaaaccacaactcgaatccttcaccttttcgggtaatttcgattcatggcatcatcctgaacgactcccgaatcctccgcagctttttaagagttttattccctcaaattgacattctcgtcgtaatggaaaaggcatccatccccaaatcaccggccactggccccatatgggtgtaccatggacccacaagattgaattggataaacaatggccaaaacggccaaataaattggaaaaaaaagttctggctttttgtctctct

SEQ ID NO: 9079 - DNA, 3847 bp, Heterodera glycines
ttcacttttgcctatctgacggggtgactcattaatgttgcgcggaagaagattgagaataaatttttttattatatttattttttaaaagcttttgatcgcaccgccatctcattttcccctcctaatttccccgaaacgatattccccgaaaaaatcattcatttttgcctattggacgggctggtgactcattaagttgctcgggggcagggggggggggttgaaaaaaaaagttatttttatatctattttttaaaagttttaattgcatttgtcatctcctattccccgtaaagtttccccgaaagtttttcccggaagcaaatcattcacttatagccattttgcccgaggcattccgtccccgcaaatgattgccttaggcgatgtttttaaaccgaaccggaaaaacaaattctcttatcattatttaaaaatttcaattttttgctttaaatcggatatattattcttggcaattaattcaaatttatggttcttcgactaactcatctcccctaccgtaatgttgtttaattataataccgtaccaccgtttccccgccgcaattttacccgctttttttttatattgcgcctccggggacacaaaaaaaacacagttttatttttacaaccagcaaatccccgccatcgttcgtcgtcccattcttttgtcggaaggatgaagttttcatcatccaccaacaacaacgaatcgggcggatgaatgaatggatgggggggggggataaggggggaaaattttatttgtcggcccccgccccaaatccccgtccccgattcttttatgtcttccccgctccttccactttcactcgtctttcttcttcttcctcctcttcttccatccaatttaaccgtttgatcttcatcggttcgccgaacaaatgaagcgccccgttccaacttccattgcacacatttagccagccattaaatggggttaaattgaacttttagggcccagaaaggccttttaaaaatcaataaaattttaatttatttatttaaaaataagaaaaatttgattaaaaacacgtgaattcgtgtgattaactttttgactgaataatttatttatttttttaaattttttaattgtaatttggaccaaaatttatttatttttagatttttaatgttgggaaaatttttttttatctaattaaaagccttttacaaaaatatgggactgatcaaaaaatatttattttcattaatcttctctctctcactctctccattctttttcttagccatttattttggatgaaaaaccgatcgggatttatggcccggatcatgtgattaattacttggataggaaaagcagcttttgacgggaaaacccatgcacacagatgcgacgagttttgtttttatccagaatataaaattcattgttattacgaatttttcttattctagcttttttttctttttttttttttgcgttcgtccggccaaggttccgaaaagttcacttttaaaaaatacagcccaattttccttttattttctaccgcgcttacatgtaagtctattaaaaattatggacacagtaaccttaagattaatttgttcgaaattctcgacaaaaattggctgttttggagtctaggtaccaattcatgtgaccaactctcagggacttttggttcaagaacagcactgatctgtgtgtaccacataaccaattaattagtgatagtaattagcaaaatgatacgcaaattctgtacaataagacttgctacaatgtaataaatcctttgatatacaacaatccctcaattatatagtttctacagtaatctttacagtaattgtaataatgttttctctttttttgcagctcaaattgatcacccatccccaaatgtacaaagcaattttattgtgaaaatgcttgatccatacaaacaacagcccaatttctttttgccccatcccaatcattatgatcatcctgatcagcatcgccagcgcaatcatcggcaacacggatcagccgcagttgctggacgacatgcagtcggaccaccgatgccaccaccgccgccccaacgggtgccgtccccaaattgttgctcatcatccgccgcaacatcgtcggttgtgtcggagccgatcagccttgatctggccactgaacagtattttggtgggtagtcaattaaactaatgaatcgaactattttgtcgctaattaaaagcagggctgatgaccggatcattatcacattttctaattagtattattttttgctatacggttcatatttttcttttgatcatttttttgtggagtcacaaattttaattaattaatttcggtttttatgaaccaatttttgatatggccaattaatcagtccgtatttagatggggtatacataatttattagcctcgtttaagacacatacttttaaatgataagggttctttttactgatcagtattttttttttaaaatttctatacaaaattataccaataatttaaacttttttgtcttttctgtaaatttcataaatatttttaatgagcctttaataatttaattagttaattaattaattgattgattgaatttgcccctaattagtgaaagagaaggagaattgggccgccggtcgcttttcacgtcgcgttccgccccgtccgttgaggcgcacagcatgcgctgaacagcatgggcttgtaattccgttggaccgtttccggacgaaaaatttttcggtaaaattttgagttttttttgttgaaaatttatttatttttttcagcgccgcccaaataatgatgcgtttgacagttccgatgatgaatattacgatgaaggtgtgtggtgatgtttaaataaacattttattcgtgaaattttgagttttattttgggtaccagagatggcatggaattcctttccgacattttgggtcggaattccgatttccgaaaatttctgggcctcggaatgccatccctgacgagtacgttatcaaaaattttcgaaataaaaaaatccagttcaaaagaaaatattggaattttaaaaaagattctaaagcaaataattggaaattttttaatagtatatttaaattaaatagtgttttagaactaaaatatattgtaaaataagacaggaagaaaatttgaaaactattaataaacacgaaatttttttccaaaaaatgccgaaacataaccagaaaaatcaaaaaaaaattctcagtaaagaccaaaaaaatcatgaaatttaagaatatttaggcgattttgaacgcagacgacgggaacggtttgattggcacgcccgacgttacagtacatcagacctgacgacgtccgactcagagctgggacgcttagggactggaaagtgagttttgaattttgttggcattatgtctttcactgtggaaataacccaagtttggcattttgtgcaagttggcatattttttaacctccaaattcttttggtttttaaaaattcacgcgtaatttaaaattttttaactctttggcgcaatgttttgcggatttttttttaaattttggcgcattgtttggcacaatgcttttttttaaacaattctcaattaataatttttatttttgttgccaaatctttcatttcataaatagtacaaatatgtatttggttatctgtcacctctcagatgtcggctaatttgtttaagccctcctcccccccccccgaggggcaacacccgccgatgggatcggttttcattttcatgcctcacaaaaatccccagctaccaaataggagcaaagctggacaaat

SEQ ID NO: 9080 - DNA, 833 bp, Heterodera glycines
gatcgtatttgtgatcaagtatcatcatcgcctaaacttaattccttaattagttgtaatttgatatgtaattgctggcggtgatcgataatctcggtctgagttctcgagacgagtaatttatctgggttttggctcccgctctcaattctcgaggattatggaccaaaacaaaaacttccccccgccctcgtctttgaaaaaaaaaaattattttgaaaatttttcaattggaaaatttcataaaaattttcaaaaaaaattttccccgtcaccgcggcaccacaaaattctcgtaattatttttttcaaattctgatcacttatctctgactacaaatatggtcaatcaactaattagcccatatccattagccttttaatctttttgtattaatttttcaggaaatttctccaattttgccgagaccggttgatgtgcgcgatgacttggacattccgccgttgcccaggccgctgaagctcagcaaggaatggcgtccactgcaaacgtccacattgacaaatttccatgccacacttccgaagaccaacccgcaccattcattggccacaaaattggtgcaaaaacatttttatttaaatctaatttattcatatattttttaatataattattttgtatttaaagtttgttttgtaaaaaaaaataattcaattattataaattattatggtttttttttttaatttttaaatttattctttaaagtttaacttatttactttttattttatttaaaattttttttttttttttttatttatcgagcaaaccaaaggcacattagtgctcttacatggtgccaaaa

SEQ ID NO: 9081 - DNA, 2148 bp, Heterodera glycines
ccgaaatgaatttgagtagctttttagtattctgaactgtacaatttggtggacgatatatatttataatttgaataggttttttaaaaagtaattttatgtgaataatttcgctttggaattttgtcccagagaaaagtgtctgataagggatggttgattttaatagaattgccgatcctccgccctttttttcagttcggtttgcaaaaacaatttgatattgaccatttatcgtaagttccgcttctaccgtatttctggagtttaaccaggtctcattgatcagaattatagtggggtcatattttttgactatgtattctaagtcagatattttatttgctattgatcgggcatttattaaaaggcaagaaatccagggattattttctaccatttttccaatgtttttgtttggtttgctcgcgtatcccaagcgagttctgagcgggcgggggtctttcagagatctgatctccaagtcaaccacaaaataatattttattttgaaaagcaaaaaaaaaatcatctcccaattctattggtttgcaagttgcaacagctgagggtgtttttgaaaaatgcgtaaattgcttgtaattaacgattaaaaaagtgggaaaaattcattccggtgaaaaatttgaaagcgagtttttccaatgtgagccctggctgtccctttttcatgaaatttgttttaacttatatatcagggatgttgcaaaaatgaaaataaaatacgagacacgagatacgagaaaaacacgagacgagaattcttttatataaattaattaaaaatttttgattgttcttcttatggaaaaatgatcgggccggtatttcaaatgggccagaaataaaacgacgaatttttccaaagaaaaaaattaattaatgatttttttcaagttaaaaaattatattgacataaaataaaagcgttttctttaattttagaaaacaaaaaacaaaatccatcttaaaatttaaccaacaacaattaatccgaaatcagtttattttctatttttatatcaaaatcaaaaataaaaaaatcaatttatttaaaattttagtttgttaaaattccttacttttgctgagatctatttctggcgcagtattttttcaataattttgctgagtaaagaaagggtccggcggtgccgataggagccgcctttttttgaagattagagtgcaatttgttaacagattttgtccataaaacgatacttttctggctttttggattaattttaaaaattttaggaattttgggtcgggcggtatgaagctcagccgggaaatttaggaagtctcgtcattttattaaacgattttgcgtctaaaaattgtttttggctatatttaaaataaaagaaatattttttttgtttttgttcgttggattttcataaataccttttcaaaaaatatctcatccgttaggagaaattcgtggaaagttggtggtaagcagcatttattaacacaaattcaaaaaaaaatgatgtggaaaattgaaaataaaaatttcctaaaaacggtttgtccccccgtcgtttctcctccctttctttttcatccaatttctgttttgcgccgttcgtccttaataatacccggccgttggcaccacttttgcattcttcggcctcaccaaaatgattgtcgccccatttgctgccacaatgcgattatcattagcaattgtgctgttggtcagcagccattttttggcccattttggcacaaaatcgtcaaccaaatgttgccgaaatgaactgctcgcccacagcagaagccaactggacagcacgacggtgcaccagtccatggcacaagcgtactgggcataaagcgactcaacagctgttggaaaatccaaccgagcgcaaacggacattccgatctgataaaggcagagaatagacattaaatgttgcaaaaatcatatgcggtgtgaacggaaagggtcattggtgctaggtcatttcgtaaaagtgccaattttacagattttccaagcgaattcgtcataacttttcttaagcacatccaaatgaaaaattttataatatgctagctcttgtgttgctttactgtactataaaaatttaagaaaattttcatcga

SEQ ID NO: 9082 - DNA, 1412 bp, Heterodera glycines
acttttcaagcttttagattatttttagagccaaaaaacctaatttttttttaaaaaaacctctattttggcgtttgccataaattattaacaacaaaatgcaatgaaaccaaaaatacaccctatgaatcgaccccagcctaaagcctacctattttggcggtttttagaacctaaaaattggggccctaatgatgaattaggtaaagtttataaagggtggtaactaattaggcacggtttattttataaactggaaatgaatttggcatttccttcgacgcttaccatcagcaaagagactgtcatatgaccagcgaatgtgcacagcgtgtaaatgcccaactttcgttgcgttcgctgagtttccgtttcgattggcaaaattgacctcctcctcaaccgccttcgccttttgtacaccgccaaagtgccgaaattgagcagcagacaaatgagcagcgaaatggtggcgacaaatgagcaaattacgctgactaatggtgcaaaattggtctgaaaaaataaaccaagctatatgaggtggaaggaagggacggcacacaccaacctcggcactctcgccaagccgaaaggaggacgaggaagccttcagagttggcacgagagtgacggacatttcgaaaactaagaccaaggccagcaaaggcgtgacaaaaatcaccagaacggcaacggggagcaggacgacattccacagctgaaagcaccgaaacatgactattcaaattgtgcactaattggatagcaataaaaaaaaaagaaaatagaaaaacaatttgtccttgggtttaagtaggtccttggtaaggacatactgtatttgcataattagcacttttaatttgattttaaattgttttgccttttcgtgactgagtggggtcataacagcgctcagacggttcacagaaacaaaaacagtggctaaattgatggcctgaaatgagtaaatggcgacgaacatgctcaaccgcagcacccaattgggcaacatggcataaaagccggaaagtgaagcaccgaatgcgacgggcaatttgaaggcgaaatacgagttgagagtgtgtagcaaatcctaaatgaacaggggataattaattaattaattataaataataaataattaaccattaattaattgatttatttaccgcaaatgccctcgcgatgaataaagcatagaatgagttatgcaattgcttgtggcacagaacggtgacaatttcggcgatgtaaagcaaaacggagggcaaagtgacaatggtggacaaataaatgaacggaatttgatgggaaaggaaccaatcaaacaaagggtcgagaagcattttaattccttagcaaatataatttaattttttaaaatgaatttacacttaaattataag

SEQ ID NO: 9083 - DNA, 2750 bp, Heterodera glycines
atgtgtgctgacagaacattgtgtgttaaatggtgggttaattcattttttcagtcagttttggcactttggcacatgaattaaaaaaagtgtgagaaaaaagcatttcaaattaattgaaattttttctcataaatttttaaagagtttaaaggaaatggaacattggtgagaaacagtgaattggcaacagaattgctttttacacatcaccaaaattaatggacaaaaaaggcccgcggttaaaagcacagagcacaaattctcacaaacggcacaaaacgaggaagaataattatatgggcaattctgatctatacgatcaaatgttgtttttcaaaatattcatcaaatttcttgcctttttaacaaaaataataatttaaattaatttgaaaattcttaattgtttaatatttgttgtttatattaatgacagatttatttttcaaaaaactacgatgagtcgcggattgaatacattcttacacaggtcctattaaggcttttcatttttcatttttattagagtgtttctcgttgaattatttgtttgtctttcacctttttcaaattggtttaacatttgtttaataaacctagaaaaatttattttatataaagccaatttcaaaaattgttatttatttgtccgtatttacatccaaaaattcaaaatttttgccttaaatcatgacaggacaaatttaatggcttttaacttttcatatttatgtaagaaggttggtttagtttgaagtttgtcaaaatccaacaaattatgaaaatttttttgtttttatgagattttgaagaaaacaatctcaaattcattttccagcattttttagtcggaattattttttgtttttccgcttaaaatttttatgttttggaatattacggaacaacatttaataatttccttctcactaatgttgtaaggaattaggcgctaaaaatggtttatgacaaaatttaatttgtgtaaatcaatttaggcacaaaagtttgagtattttgaaaatttagaattttcgacttttggttcgaatttgggtcagggatttggaatcgataaaatggatgtcatcatattcatgatcaacgaacccaaaaaccctaagaaccatgtttttagagaattaaaaaataataatccgtattgtttgtcccaaaaatttatgccctggaataaatgtgtaaaatgaaagaaacaatcccaaagaaaatgtttttttgtgacaaaaaaggatagatcacatcgaataaagggaaaaagcttttgaaataggaggaacaaaatttttgaggtgtgccaaaacattgcaaattttggcatttccattgtcttaaattggtccaaaagcgatgaagaaatagccaccaatccaaacgataatccatagcaaaaagattgtaatgccaatgtatgcgccacagtcttgggcagagcgcttttgtcgtcgattgaatcctggggaaaagggaaaataaatatgtaaaacatataaacgcaaaaaataaattataaaagtgtataaataaagtggaaaaacctattgaaattattcgaacattatatatttttgccctaaagtgaccaaattttttatgaaatctgagtatgagaggtttactataaaattatcagcagatgaaaattcggaggggaaacaacaaaatgcttttgcacttctatctgaaaaatttttgtaactgaagaattgaggaggaccggtggtgaggaaattttttaatatttatacaaaattttatttaatcacaatttaaatggaaaaaacgcctttaagtgattggataaaaaatgggtcatcaatcgcaaaaatatttgcctgttttcgagttttcttgatcctgtttcaaggtttttgtgcttatttttcatacataaaacccacatctctagtaatacgtatcagggatggcattccgaggccccaaaaattttcgttaatcggaattccgggggtccaaaatttttcggaaatcagaaatcggaattccgaggcccaaaaatttttcggaagtcggaaatcggaattccgaccccaaaaacgtcggaaatcggaattcggaagtcggaaatttttcaaaaaacatcaaacataataaaaaattttctaaatattttaataggctaaattttaaattcttaaccaagtaaaaggtgactcaaaaattttttgatctatttaaaagcatatttgctttaaaaaattattcaatgattttcatcaaaaattttacctttttttgcggcgcgttttttcaaaattttttaaaacatggcgggagaggtccggcggtgccgttaggcgccgccggggaaaatttttataattttaatgcaaattcttacaaattttgtccaaaaaatgaccaatttagcgatttgaggcaaaaatttctcaagaaaaataagattttagggtccggcggtgccgataggcgccgccgggaaatttttgaaaatttcagcgcaatttattaacaaaatttgtaaaaaattgttaattttttgaaaaaaaattcaaaaaaaatttccgaaaatttccgactttttatcaaaaatttcggaagtcggaattccgacgtccaaaattttttcggaaatcggaagtcggaattccgacgtccaaaattttttcggaaatcggaaatcggaattccgactccaaaaatgtcggataagtcggaaatcggaattccgtgccatccctggtaca

SEQ ID NO: 9084 - DNA, 998 bp, Heterodera glycines
gggaaaaagcacaaaaatagattggatgtgggaagacaaaaagttttttggctttttataataaaataattttaatttagcttttttatggttccttttttaattaatttttctttcctttttcctttttatttaaatttataaatttattttatttttgaattatttttcttcagcaaattgatgcaaaaaaattatgtgctttggttatttaatgaattcaaatttcattcaaatttggaaaaacatttttagcaaccatttcacctacacattataattttgaaaagaactaaagcacattctaataaattatttcctttgttacataaattaccaatgattttaaaatgatttgtcgaattctcattaaataataaaaagcacacaaatttgtatcattaattgcttttaaatagcattaattgtttttaaacatactaaaattttatactttttttttaacccttgtcctaattacaataagaattttacatttaaaaattaatatttattatgttttcttttagcaagcccaagaattttgatggttttaaaccaaggtattattattattattattattgttattattattttatttagcttaaagaaaatggggtagctaaaagcgaaaaagaattaaaaatatttttttaaccgcttaaattcatttttatttgataatgcaatttcattttacgtttagattcgatgacataaaaattcttcgcttttatctcattttttcaatattttaatacaaaatacacataatggctgctgaatttaatcataatattccatcgttaaatgtaaagtcagatttcttagtgagtttatgcaattatttaaagaaaaaagcataattaatttaattacttatttttaaacggagccatattttatttttcttatgatattatgttaataatgtaaaaaaggcgaaaaatatcagttaattgctcctttaaaatttacaaaaaaaaaatactgaa

SEQ ID NO: 9085 - DNA, 4282 bp, Heterodera glycines
  unsure (1)..(4282): unsure at all n locations
gtgcgtcgacgtccttcgcgttttatgagcagcagcaaacgttgcaaatgctctcctaccaacagcagcaggagcagcaaacggcacaacaggtgaacgatttgcgagggggcgaacatttcgatgggtttgttcagctgcatcaacatttgttgtactcgaccggcgcgggaagccacgcgcaaacgcaacaggcggagacgagcggcgcggcggcggcatttgcgatgggcaacgaggtgaactgcttctactcgacggaccaagcgcagcagcaattcgccggctttgacccattggcacaacagcagcagcactaccagcaaaatcagcaacaacacttttattttggtggccaaactcagcagcaaccgcaacaacaacagttctattttggagggggagacaatgagacgggtgagcaaaacagaaacatttaatttttgtccggtgccaaatcctcttgttttcgaatgccaatgactcgctcattgggtgggcttacggatcagcgctaaaattgttaattagggttcccaataacatattaatgtcatttcgattccgccgtttaccgtatgcttttagcccacagtttccccccgctttccatgcgtccgtccgccgcttcttccgcgccgcggcatttccccgacggcgacgccgcggccgtcgctccgttatatgcttcggaccgccccctctcagagggaattcattcgcccgcgccgcctcagaaccaaaagagtgtaattaaccagtggaaggaactccgactttagcaaagcatttaactaattattactttattttatttaatcgacccaacactttttgaattttgacacaaattgtatttgcttttctcttctaattattaaaaataaagtacattttatagaattaattggactcaaaagcacatttcaatgaataacaataagacaaattgggggggggggggtttgtggattaaaataagtaaaaagcgggggatacggtaaataagacgcaatcgcaattacttatccaacaataagccgcggaaaatgcataccaggcagaatttgatttataattatgttggaatcatacctttattcaacttttcacctttggccatttgaaacaaaataaatatttgacaaaatgggtatgttgacagcaataaaatggattgttaaaaattgggttttttcgcatatccgaacatagaaacgaataagaaagtaccgtcgtaaggtaagcaaatgttgagcatcgcaacagttggaaagagagttcaattgaacagaacaaagaaaacaaaaaatgtcaaatagcaaagtgttgttgttgttccacaaggcaataacatcggcagcagcaccaattcaatcatcaaccaatcagcagcgatcagttcgttatctcttccatcttttctccgtctcggttgagaaatccgccatggtagcgacagtaatagacgaatctgtaaaaatcaaaaagcaagttgaacaatgcaatttgaaattcagggtgctcccactttctccaagtgccatggtccgaaagaacgtcctcatttccaatgacaatcagcaaatacttagcacggctgatcgacgtgttcaaacgcttaaaggcaatgcggaattactttttttaaaatggaacaaccaaatcaagcgcaaaaatccgatgtcaatttgacgcactgtggaaatgattatcacttcgcgctcagatccctaaatgctttttttaattgcgtaaaaaaaatttgtttttaaaatttatgtgctcagataattgattcgttgtcaatcatttcgtttcagcggattgacagattattccttgaacatcatcgcacgatttcgagaatttaattgcgagaaatctttcactttattttttgtaattctgggaattgaaccggcagaaaaatcatataattaactgagccattgagacacgaaattaaggtaattttagagcctttaatttttgcaaaatttaaacataaaagaaaaaacaacctgaaagccctcaaccgaatcgacattgacgccgggaaaactgccaagaatgtgacgcagttttagcaccttaaaatgaagcgacaattagtacacagtttgattcgctcatttctctttttttccacctgatttctgtacggagaaatcactccgatggcattttccgcagttttcgtctctttgagtatcctttccacgtaatgccgtaccaattcagcttcgaacaaattgtggtgcgacctgttaaaaccctgctcatctttgctgccacgagaggagtgaaaaatgacagggaaccccttaaaaataataacatgtaggataaattgggttcgaactaatcaagttgactttttaattcagtttacctttgttggaaggccttcccattcggtcaatttgtgaaagtcgccttgtccatcgtcgacttggagaatgttatcgtaaaaaagataagagcacggacgcaggatggcataatgagaccgatacgtttgtttaagagtcacaaaaacacgactaaatttggggcgagggatttaaattggcaaataaaaataatcactcgtctgcttgggaatatacatcgccgtacataatcctctaaatatatacataattaaggatatgttcatttattgtttgctgcacatcaccttcatcagcgaattatcaaagccaaaccatttcaaattctctggacggaccaccgggccgagctgtttcgggtcgcctgcgaacatgaccgatgtttgagggccaaccaagccacctattgtcataaaagaaaaaattaagtatcgctatttctccaaccgatgggaatccaagtgtccgcctccgttgcttggctcgcttcgtccacaatcagatgggtgaaaaagccacgcaatccaccggccgaaaccaaataagaagacgtagaaagtgtggaaatgatcacacgaaacatcttcaaattatgtcgatccgggatgccgaaaaaacgatttttagcctctttcctgtaaaaacaataaaattgaacattaaattttaaaaaatttacgccaaataagaaatgcaatccaatcttttgttccgattatatgccatcgtggctaaaatgggagtcaaagggaaaaaaaattaaagtaaagtacgaccaatcaaaaatattaattataactcacagagactgtgcatacgaaagacgtatttgggctccaaaaagtcgtggtccaataaagcctcggcaaaattgtcagccgccattttggacggagtgcataccaaaattctgttttgatcagattggaggaccaaatgtcgaatagattcgattaaagtgatggttttaccggtgcctaattgtaatgaaagcatttaaaaaatataaaataggtgctgattgtatgcgtccacaggaaacttgtctaataatattactgccaaaaaatattttcactacccaccaggtggcccaaacagaatgaatggccatggattatgagccttggacagaatggaataaatagcattcttctgaaacaaattgatactccgattaaattcctttcctcttcgacactttgttgacctgttccgcgttgtaattgtgattttgttcttctcggaatgtcatcccactaatctctttactccttttctcttcaaattgctcaaaactctaaaaaatatttgaatcttcgtaactttaggttattgcctcgctgaaagtgagtttcggaaaaacgagttgggacatgtcccggccatgttttgaactcgccatgtactcaatcgaacgaagttgcgatctgtacacaaacgccgagcaattgatcgcaacatttacctgaacacaagcgaataccgaaattaattttaccataaacactggtgttaccttattactcgagctgagcacacggccaagtcggagagggtccacgaaaaagacgatgattgagtgcgtatccaatttcaatttctcaatcactgcctaaattgaattatattttcattgtcagctgttgattaaaatttctgttggtccataaatgtgctcaaggggcgaccccggcactgtttgttacaaaaatgccgagcagatacccgcgtgcccttttaaaaaggtttatttccctcctttcgtaaaccgaacaaaaaattcgaatattcgatcgaatttgctcggtgaatcaaagaggatttangggtgaaagtgaaaacaaatattagtaaatttgtattagtttaccgaggcgcacagc

SEQ ID NO: 9086 - DNA, 1991 bp, Heterodera glycines
aaaatatatatcagaaattcatttgaattgcagtgttacaaattcaaaatgtttatgttagtttaaatagaggaatgtcagtacgagagcctgacacttaaaaaacggaaagaaagcgttcacaaccagcccaaatcattgtcccttttcaataattctcaatccttcaaaattacctcgtaaatggaatcatcatcttgtgaaacttggacaatctgggctttttgaagcacaattctcgcgtcttgggaggctcccttagataacgtaatgttcaaaaaaataagcctttcataccccgtcgaaagcccagcagatgtggacaaaagttcgcattttttcaacaaatgcatgcattgaattggcattcgccagtggaatttgcaatttgactagaatatgctcgaaaatggggttgtccaccaggtcgtcttccgaataaacggtgcccatttcttggaattctggtggcaatgtctgtcccctttgaaagtctttgtaaagaagaagaccgccgcgtaaccttaagaagatttaaaaggaagtattgtcgagaatgcgtactttctgacgccgtccttttgacggtctcttcgctccattgggtcgttgtacgtgctaaagtcctccggcgcatatgtataattgttgataaacttttgggctgggcttgctttccccgttgcatttgcgtcattcgtttcatcggatggttctccgtttcctctgtcgttcgcttgctcatctctgtgaccattattattgtaacgggagccaccaccgcgtctccgtcttcgctttccgcctgcatcctaaaattaatgataattgactatgagtgtcaagatcagcgaccccgaaaaccccaaagaatagtaatttatttctctgccttttataataatttttgaaaaatatcggatcacctaatgtcaaattgaactacatgaaaaatccgagatagacctcaaaatcaccaaaatcttcaaattcgtctggcggacgttgtgccccttgcgccgttggacggcacccactccgcgacgtggaagggccagcgttctgccctttgtcttttttgccgaatgtgttttcgttttttgagcctggaagcagaatagccgcatcgatgtactgcttgagaatgcgataggcacgagttatttcctaaaattaatagtcgaaaactgcgatgtcttcggacggatttggttaaaacctgagatttctgtacagttccacctttgtctgagtggtgctctttaatttgctgaaataatatttttagtcaagtgaacagcaaaagaaacagacaatgaagaaagcattgcgcagccctttcgtgtccacttttgggccgacatgcaatatggccatcatactaagcaattcggagtccgagaaattaaactcctaaaaacaagtattaaaacctctttttcttcaaattgcctacccttcgagactcgtgcatttactgatttgctaatgctaggagatccaattttgaaattcagtataaatatgtatttataagctgaaaatagctaacagttgaataataaaaaaggagaaaattaaaaggaaatggcaaggtcacaatgtttgttatgtgatggcgaccggaccgacgctcagtgaaacgtccccctacccccacccacttcagtgactcattgtcattttcaaatgaaacgtatggtaaaaaatcataagcaaaaggcttgacaaagcgcaaccggcactatatggaaagtgagtttttgaaacaaaaggggggacccttttgttttgcaaaatttttttaagataaaaaaccatgataattttttatccggggttttaaaggtcgctaatcacgaatctgacatgtattttgactaatttctaatccctaacacgaactcgaataaaaatcgaaattttgaatttttaaaattatgattttttgttaaaatttagattaggaaatcggaattgatcaaaataat

SEQ ID NO: 9087 - DNA, 2799 bp, Heterodera glycines
  unsure (1)..(2799): unsure at all n locations
tatagtaaatgccaaataggttgtaagaataggatcatttgctacaatttagaacagaatgtaatcggcaagaaagggtttttaaactaatttcaatgaaagaacttcataacaaataaattaatgacttctctaaatgaattgcctgcaataaaaatgctaattttctaaattcgcacgtgccatccttgagcaccttccattaaacaccatcttttttgaggcagacaatcaatgaaactcacaaccttcggttgtaattagtggggctgttagtggaatagaaatgttaaattttttgcctatcaaatattcgcaataaatgcccatctatttaaaaaatattctattctattaaaatgttctgtattttgctatatattaagaatagccgtacatctaaaggcgtcagtaattgaacaaatttctcaaatttcaagaaaggttcaggcagtcgccgtaaaaattgtctatataaaaacaatggcgatacgcatttctgcactaggtcctttttcaaaattgatgtgcttttattgaaaaaacatgtttaacgggccacaaattaatagacaaattcaggcacattcttaaaaaattctgcttttaattagttcatttaatagattatgcttttgctttgtttgtttaaattctacgcccgcgattatctgataggacaataatatcaataaattttcttctgaagaagcgaagagttagcccaaacgttttcgttcctttctatttaatgatctatcatttcagatataacagtcaaaatttaattggccggctaaaaatgaattcggtaggattttatgaaaatagtttgaaaaaattgaaaatttctttcaaagatttaatggaagctagtagaaggatacctttttgagtaatattccagatgttgccaattgtttaatggcaccccatacctcaaaaaagcattattctttggctaaaaaatatcattagaaaatagcgggcgtagatactgaaaaaactgttcttataattttaattttacaattagaaacgccaaaggttacaattatagtaaatgcctaataggttgtaagaataggctcatttgctacaatttagaacagaatgtaatcggcaaaaaagggtttttaaactaatttcaatgaaagaacttcataacaaataaattaatgacttttctaaatgaattgcctgcaataaaaatgctaattttctaaattcgcatgtgccaaccttgagcaccttccattaaacaccatcttttttgaggcagacaatcaatgaaactcacaaccttcggttgtaattagtggggctgttagtggaatagaaatgttaaattttttgcctatcaaatattcgcaataaatgcccatctatttaaaaaatattctattctattaaaatgttctgtattttgctatatattaagaatagccgtacatctaaaggagtcagtaattgaacaaatttctcaaatttcaagaaaggttcaggcagtcgccgtaaaaattgtctatataaaaacaatggcgatacgcatttctgcactaggtcctttttcaaaattgatgtgcttttattgaaaaaacatgtttaacgggccacaaattaatagacaaattcaggcacattcttaaaaaattctgcttttaattagttcatttaatagattatgcttttgctttgtttttttaaattctacgcccgcgattatctgataggacaatgatatcaataaattttcttctgaagaagcgaagagttagcccaaacgttttccttcctttctatttaatgatctatcatttcagatataacagtcaaaatttaatcggccggctaaaaatgaattcggtaggattttatgaaaatagtttgaaaaaattgaaaatttctttcaaagatttaatggaagctagtagaaggatacctttttgagtaatattccagatgttgccaattgtttaatggcaccccatacctcaaaaaagcattattctttggctaaaaaatatcattagaaaatagcgggcgtagatactgaaaaaactgttcttataattttaattttacaattagaaacgccaaaggttacaattatagtaaatgcccaataggttgtaaaaataggcttatttgctacaatttagaacagaatgtaatcggcaagaaagggtttttaaactaatttcaatgaaagaacttcataacaaataaattaatgacttctctaaatgaattgcctgcaataaaaatgctaattttctaaattcgcgtgtgccaaccttgagcaccttccattaaacaccatcttttttgaggcagacaatcaatgaaactcacaaccttcggttgtaattagaggtgctgttagtggaatagaaatgttaaattttttgtcgcgacaacgcgaaatcctaagataaaacccaaaataaaaaagagaaaaataaaaaacaatagaaaataaaatggggaaaaataaaacataaataataaaaaatatttttacatttattttggaaaaataatattataaaaaactatcgaaaatataattacataaaaatgaaaaaaccttttgaaatgaataacggaaaattgtttgaaaaggaaaagtgcatttcctcaggaatgaaaggaacgaaaattaattaatattanattgcgaattctgttaagggattgtcgtanacaatttattaataattaatatattanaganattggaatttgtaagggaaacggnaaagcaaacaattaatggngaaatggcaaaatcaaacg

SEQ ID NO: 9088 - DNA, 1153 bp, Heterodera glycines
cggcggcatcccaactgcacaaaacagaagggggaaggtgtgtaaaatgccatacattttaaatgtaatgaaaaggacttattcccgatttattgaaaaaaacaggctgatccagggagttgatttgttaagattttgtccaaaaagggaattttcgacagatttgttaacagattcaccaaaaattggtaatttcacggattttcgtaattattttgcataatttttaggaaattttggtgataactcttggagggggtaccaatagagaaaaacggaaatttaaatcagaaaatattgtttttggtgtggaagggtttgcctaacaacgcccttttaagatacacccagcccttcaaaatcatgcggcactccctttggaatgccatctaaatcggttttgcacaacaactcatgccaatccaatgtgccaaactcacccatgccctgcggcggtggcattcctccaccggcaccgcccgcctgcatcatcgcggcagcggccaatgggtggtgggacggcggtggcacactggtgcagcccatcggctgatggggcggcgtctgctggtgcatgccgtggtgatgggcagccgccgctgcggcgacggaccgctggcgctgctccgcttccattcgctccagcacaatgctttgcatcgcttgctgcggggtctgtcgggggaatggcgttggcaattagcaacaaatttaatgaaagaggttgcggcgtcaaaaaacactaatttcagccatttgcggtcacatttcaaaaataatggttcaaaggggtccggcggtgccgataggcgccgctgcatcaagttttttcaaaaatgtttccagaaaatcgttgaaaatttttttgaaaaatttctaaataagtttgaatttttttaattttgggaaaggggaacgaagtaggaaaatgaattttttggtccattcattcaaaagagttcacggggccacgggaacaaattccattaccaaaacaatagttataccaatattaggaggtaattcaggaaagaaaaacttttctgtaactttaaaaaaaacttcggattttgtgtacctcgttggtctccttcgtcctgttccatgatcggtttcatcggctgcaaaatttgcatcattttcagctcgcgca

SEQ ID NO: 9089 - DNA, 3466 bp, Heterodera glycines
acaaaagggaaacgggaaaagcattggttggcattaaggcaaatagcaacgaaaagtatatttgtttccaggcccgttgccagaaaaaatttttggaaaggggagcccaagacttttttttcttgatgcctaaattcatgcataaaaatttcattaaagttttcacgggtatgtttttgggcacctcaggcccccaatttaattctttttttcctgaatgacaccaaaatatcaaaaatttggtcactttttttggcgaaaatggctacaaattcccattttagggggcgcctaacggcaccgccggcccccctgttcccgaaattttttttggaaaaacgtgccgaaaaaaagaacggtttttgaaaagcaaaaaaaggtcacggcagccgaccccccttcgcaaaaatttttccgacccaccccccccccttttaatgtatgttgtaagatatataaaactataaatacacactcaaattcgaccccagaaacaatgccaaccactcactgaaatcccttcggatgtgtccgccttgctccggcgagaactcgggcaatgtgatgctcattcggccgctctcgtcaaaaaattcttgcgcaaacgcctcccaccattgctcatgactttcgggagaactctgcaatttgaagtagatcagttaatgtgatttaattgggtacattttgaaaaatttctagtgattttttcaaaatttaataattttcgaagattttttttagatttgaaaaaattatcgggggagtcaacgagctgctccaaatttaattatagatgcatacaatttgagttaaaccatcgaatttctcgtccatttactaaatattttttgagcaaaaaaatggggagaaaagcgtatgaaagacccggaatttgtaggaaatgttaaacaataactataaataaatacatttgtgctgcgatcaattgcttaggcatcactttttgtaaaaatgtttcttttgtttcgccctttcaatttttaatttccgtcattaaatagaaaaagcaaaaaattttataagaactggaaaattttacacaaataaaatgcaaaaaaaatctccccgctggcaaaattgcttaaaaatctgtcaaattttctatttctttccgggcggcgccatccgctaccgtcgtttagtaaatcgatccgggaaagaaaatatttttgggtaaaagggcattaaaagaggttcggatatacgttccaaatttgttttacccctcacaattttcctccatttacattttacattctttactcccttcacctggtggaattggctgtggaactggaacagtcgccggttcatctcttgcagcctgtactccagaaagggcggttgcggaatggtgggcgggaacatcagaaaggggcccggcggttgcctggggaaagcgcccggggggaacatcgctgcagcagccgccgcggcggccgccgctgccgcggagccgggcggcggtggtatgggcaacggcgtcgtctggtggtgtagcggtcctggtccggcgccgcccgccatttgcggatgatggggagccatatggccgacgggcggtcccacgggccctgcgccgggcggtggcccacccatggcattgtgatgatgcgctgaggaagccggccctagcgggacgccgccgccctgctgttggacgagcgctgccggatggtggtgcgggtggtgcatgggcggcatcatctgtgatgaggatgcaacacattaaaaattgttgaggtaaatgggaaaaacaaattctcgggagggccaacaagttcgagcagtaaaccatcaattaaatacccccccccttttttgaaccaacgagttaaagctgtacatcgatcgtgaggatcatttatggccctcatcgtttaaacagattggtactcacacggacgtaatcgtaatcgggaatccgtaatttgaaaatccataattcgacatttcatgaaatttacggagcccgtgacagctctgactcgtaccaaacacacaaggacaatgtcacacccaattcaactcagcaacaaatttatttgacttttcccagacacatgtttatcaagctggagcagttcacgccccgaccgactcacccccatctgcagtacctggtgctgttgttgttgttgctgatccgcatcgttttgctgttgttggtactgtgccggtggtccgccgcctccgccaaccatttgcggaccgcccaagcccgccgtgccgggctgttgatgctgcatcaacatctgctgctgctgttggtgatgcgcagacatcggaggcggtccaccgccgaacattggaggcccaaaattgggacccatcggcggtccagcgcctccgggagggccctgctggtagaagaagtcggggggcggaccctgggaattcaaaattaaatttttggaaaaaaccatttttacgagagtaagtatagaaattgcaaatttatcattagtgtacacgcccgttgaactcattatcgggctttttaggctatggattgataattttttgagaccaatgaaaattttccgttttaaaactttattaggtatgtaattctttgataaaaaaaattccaagaaacaattttaccttttgttaaaattgaggaataattatgattttatgcatattgttttaaacatcattcatttcgaggcgcaaatgtgacgtaaccaaaaaaatctatgccaattattaaaaccgacgccgcactaattaatgccactgacctggtgcggtgcgcccggctgtccgtagggcggtgccatgcccgcggacggtccaccgccgccgccgtcatccatgatcatgccctgctgatggggcggcgggcccgggccggcgttgcacggcgtcccgttgggcaacccgccaccaccaccgccgccgcccatgtgatggtggtgcgggtgcatgccgagcatttggccagcgtccatagcgccacccgccgacgcagtgcacatggccatgccgggcaccgagttcagctccatcttgaggccaccgcctgcaaattatcggttttatcatgacaaaatcattatttttcactcaattttgtgccggaaacaaccaaaatggatacctaggtaattatgtttcacattttcggccaaaatttaaaattcgagttaaaattggtgacgaaaattgaaggagttcggctataaaatttttaaaaattaggcttcgataccgggcggatgctctccggtgggcgtgctgcaaatggaggacggctcgcgcttcttgcgcacacgcggctgtttggcgggcgcaccgctcgccgtggttgccgcgtcgccgtccgcggtgtttttgcgacgcggcatttttttttgttgtggtgcccttctttaccgctcaattatcgattgatcaaaggccaactgatggagatgagtgtgaatgaaagatgaga

SEQ ID NO: 9090 - DNA, 916 bp, Heterodera glycines
gtttttcacgcttctcagctttatcttttttttcaaaattctcgtgcctatttttccctaaagagtgttgactttcatttctcacctattcaaaagaattctttccgcttcacacactttgtgaggggccttaatgggttcaacaaaagtgaggtcctttttgcatatcgaaagcagctgaaaagtgccactcaaaacgttccatcggcgagtgccattctcacaaatagcatttgagaagaagcacacaaaaataacgaagtgaatgggacggcaaattggagatgtaataaatgtttctaaatccatgtgagtgagtaaaattgggatgggcgggcgccgcgtgagcgggggggggggatttagtgaaatgagtgccgaaagtgtcgaaaagccgagaaaagcatggcatggcattagctaattactatgtgaataattgttgcgacacagtgaaatagaaataacaaaatgagaaagaaaaagtatagtaaaaatatgtgacaatcaaaatccaattaattaatcatttcaatgagtcaattttctagacagaagcattctggaagtgagacttttgtgaaaattgaaaatttgaagataaagtttgatttggaaaaaccttgtcaagaattgctcgacattcattcaaaaccgacatttctgtctgatcactagggcttgtaattatattgaaatccatatttttttcctggactgttggaggtctgaaacgcacgaaaaacatgtttttagcttagtttgaagcctctaggacggatttctatatccatattttccatattttgcgatttatgtccaatttccatatttgtccatattttagcaatttagtccatattttatgtccatatgtttggcattttccaaaaaacccctattagaacgaccccca

SEQ ID NO: 9091 - DNA, 1744 bp, Heterodera glycines
tattttttgaaataaagccccaggggctttattttcaaccccttcaaaaggaaggctttatttcagcaggaggaggcactaattgttcaacccttatttttttcgaaaacccaacaaaatgaaggtttttataaaaattttcctggaacaaacttttttattctttattcatttaatttctcttcttgtatttacaaaaaaattttctggactagagttgggggccagcggcgccggggaattgttgaaattttaccccggtttcaaagcaaattttgcccaaaaagtgtccaattttgagttaatttacgatgaaaagtgttttaaattcaatagaatttattgttaattagatattaaagaaatatgtatttggcaatttcaaaaaattaaaatcaaatttgggcaatggtaaagaattgtggtccctaatctatttttaaaaatataattttttaaatcggggttgcgtactgggaccattcaaaatcccacgctgatctctatttattcaaaaagtatataaaattcgcaaaaacaagaaaattcaacgattttttttctttgttacgcaatgaggcaggggaaaacgtcgaagttcgccttctcttcttcactgtttgttttttgaatctgaaaatgccagcgccgccctgtgcacatcttcgataaagcttgggccttaacggaaaatgattaacaaacaaattgacacttcgtttgtcttttgcctcaccaataacattaatgccgtattggtagattttctgtgggatggaagaccgcgtgtcgtcgtaataagagagcacaaagtccaaacctttctggaaagcgaattcaacagtcaatgccaaatcagtcccctccccctccattctgtccgactttgtctaaactgtcgtgtgcgcgcactatcaaaatggattcatagcattccactcggacggtcgtttgcgaagggtccgggaaattgtcgctgctaagtgctctgcttaagatataaatttgtttccttggccgatcaacgaattggcgacgagcgaaaatgtaaaggcgtggccaaagggggaagggatatctgagggggaagggaaaatggtctttgaaattagaaatcggaaacggggcaggcccttttacggacccggtgtttttttgcggctgagacgtgtttttagcccgtttgtttccaaccccgtatatgtgggaaatgccgacctattttaaattatcgaaaaaaacaaatgccaatttatttggcggtgccaactcactcacttgctctcccaccgaatcacttgtgtccccgtgttgtaatcaaaatccaactcgtccaaactgttcacatttttatcccatttgagtcgacaggaaatgtcctcctgaaataattaaaacttataattcgtaatcgcaacagtcccaaagatacggccgagtaaacccaaatccaatagagaatgtctttcaagaaatatttttattttttcccaaaattgtcagcaaatgtccgtaaggcgttttaggactatattttcaattgatcccaaaaatataaggctttaatcaagtgcgaaagaaatgacgaaaatctgtgcgagaaatagcatgaaaaacgcttatgttgaaaaaaactgtaactatcgcttacaaaatgccaaacacaaaacaatttgcaacaaataatattttagactgcattcgtatttatttatttatttgcgtattttccatttttcttgat

SEQ ID NO: 9092 - DNA, 4460 bp, Heterodera glycines
gatgccgcgctttcttttgctaaacgatgctcttcccttttcttctgttgccgtcgcttttgtcgtcgctcatttcgctgtgacgccgacgaatgtttcgagcgcattttcccacttgtcgattttatgatcagaagagtcctcggaagggtaagcgaatcatttggccctttcctttccattcgtttggcctttttcgccccctcctattttcaatttccttttcagtttctcttcattctgctctatcttttgttgttgttcattttgctggtcactgttaccattgtaattccatatgaatctcttcacaaggtaacgcttaaatgccattggatttgtctgtttaaattcgcttttttagccccaatggtcgctttttctgctcattttgttcgccgtttatctcgtcgtcaacctcttcttccatttcaacaaggcgtgccgagtgaagccgggcagtccggccaaagtccacattttccgactcaatctgtcaattgaaaagaatttttagagtgacaaacacccgctctgttacatctgccaaaactataagccaatgaatgctcaccactgctcaatttgcaatatttgcgttgtaagtgccgtttatatgctttttatagcctttttgttcactttaaatccgctaattcctctcctcccccaatcagctgaacatggaccaccactgtatttggatcaaccaatgcgttggcgccgataatcatcgctattttttccaatttctcgtttttgtcactatcggctgtcttacttttgtattcgccgccttcaacactttttactacaattattggcgtgtaagaatttcttaaaacaaaaaaagcgatggaacttttccattctgtctctcgcatattaatgggcgcaaatataaataaaatggacatttttactgtgctttcccattgcaataattaaatttggccgaacggccaaaagattttgcttttcccatttttaatatgcccctaattttagtcataaaattaatttctgccgcaactttcttgtgaaaaagggaaattttgaacacggagaggccaacaataagaatggaaaaatatcaaaagggttttctcgataaacattaaagaaatgcaaccaaatcgaatgattatttccccgtttaggccttcaccaataaaatgttttgtgactccaacactttggccgactttttgccgtggttcgactttctttgcactcgtggcccccactttatcatttcctccgtcttcttcacctatttgctgtgcatcattgtttttttgctcgtcggctctcttttatattggaattttgtgttgatttcctgcggcgagacttaccttggaattttggttagctttttttcgatctctccgattgttccccctcctccccattccctccaattaaattataattccccaatccgtcccttttctttagctccaatccggcggtttcggtcgcatttggcatatgcttttgtcccccatcgccacccgcgcttccgtgagaattggcgctccttcctcggcctccaacgcaacagtcgccgctctctttggcgtcacattttactgccctcctcccacgccacgccctattcactgaacgcggcctcggcctttgacgaggagcagcagcgactggtgacagttaaaactgacattggaaacggacacagcacaacacagcaacaggaagggacgccgctgattgccgactctccccaaagttcgaccgaaacgaataattccgccgatggcaacattttaatgatttgatgattattacccttgtctttcctcatcgattccttcattttacgggtattgtctgtttgatcaattggttttcgtcttaacgtctcaaacgtaatgtctgaagcatttcttcggggcatttggtttaaattgatattgtaaatcagcatatgaattgaaattctttttttctcgatcttatgtattatacattcatggatgagtacttaatgaaaatgacaaatcaaaaaagtattgtaaaatttaatttctttttcaatgtttgtttaattaaagttaggcacaaggcttttttccatttctgttctaagtgcggtgattaatgcgctcgtttgacgaatagcgagagaagtgtttgtatgttgggaaaagagcacagtgcaatggtacgaagcaggcgaagagttggcactctgtccagacaaaaagtcccgggacactttgcctaagcgtgaagtgagtggggccgccagtgcggcaagcagagacgaagggagagcaaatggcacacaagcttgaacagtttgggacggacgggaagagtcgttgaaacatgttgaagaagtgcttatgttgtttgggttgcagagctaaacgaccaaattagtgaaattacaattcggcattatctccatttggtgagggtacccattcctttttgaggaagttgaacgacttttccctcaccctaatcagcaattcgccttcacaagtccgtgcaaaagtgatttcctcggcattttggccatcaatttcctccccattgatgtcatgagacggtccatcttcagtgtccaaatcgtccatgaacattaatttgttgaacatttgcttggcatctgtcgctggaaaggtttcataatgccaaatgccctgaggggtcgttcattttccttactttcctcgggcacataatgcaaagagagtgaagggctgcccacgcggacgcatttgtaggcgatcatatcgaagccgagaagggtcggtttgagagcattccgacacaaagtgccggaagcagtggcgcacagctcggcgtcaaatctggccaaaacggcggctatttgtgcgtccattgaacggttaaggactaattgaagcgatggaaggatttgggcacgggcgcgaaacgcattccaacccaacagctcatccaacagagaacgctgcactctctgccaaagttggaagtgaaattggccattgaaaatgccaaagcccactctgagctgagatcgcatggcatccaaaaaggtggaggaaactcgggaaacagagaaagaggaggaggaaaaggcggccgacgaatgggtgaggggaggcgcgacggtggacgaagcggaagagacagtgcattggttattggaagcgcagcgcgagacgaggcgcggcacgaaaacagagggacgcgcaaaggcagcgaccggcgagcggagacgcgagaagggcgaaagcagcgacaaaggggcgcggtggttgggcgaaagcctatcgacgacgatggacggcgacgggcggaccgcttgcggatgagcggaggaaaactgaagcggtggaaggcagggagcaatgttggaaaagggggggggtggggcacggcacagcccaacggcatgcaaatggcatttcgggattcaaatcgaaatcgtttgactcaccgccgaatttatcgattctctgagtttgttccaatgatgctaaaagggaattttaaacgaaatctttgattgtttcctcggatttcaccataattagccgttgcgtcctcggcacattctccagaaaagggaattgctgtgccattttctgatcgttcacccccaaaaaatcagtcgtcatttgcattttgttcctttcggcggtgccattgttcgccaaacagtccaacaatttctgctcattggccaacaaacggtcgcaccgttccaaaagcaaagggacgttcgaatttgaaaacggtgataaatgctccgtcgaaatgtccgttaatttgtccacagaatccaacgcctcccaaacggtgctgatcagttgggattgttctaaacactttcattgttttcccctttttttacatttatctctctccctcttcccttttgctctcccttttgatatctcttttatattactcttcccctctttctcttctccctctctctcccttttctccttctctttttatctctctctctctctttcccctcctcttttccatctctcctttttctcttttctcaccggtcggtgccgcgcaaatcatttcgatgcgttcgttcaatgaaaacacaaatacattgtgcagttgacggcgtcgtaaactcttcgagtacagccaaatgcccaattccgcgtgacttttcctccctctctcttccgcttgctctttctctgtactgctctttctcgtcgcgtcctttgttttgtctgtgctctgctgctgctcttcggcgtcgaaaaggggcggcgattggcgcgcgaattgaagcaaagagcacaaatcgtcgtgacaaaatgccgcggcagtgcgttcgcctttatgggaactaactgaagcaatcaaacgattggaatggaggaaaaggcatctgtcaaatggaagggatggcattggcattttgcaaattttaaagtgatcgactgatcagtgacctgcaa

SEQ ID NO: 9093 - DNA, 3036 bp, Heterodera glycines
atcaacatcaattgagtgtagtcgggtgaatccgatcaaaagtgggaacccaatcgatcaaaaacgaagcctgatcaattgatcggtcagtcgtttaatgggaaaacggagtccgatcggtcaatcaatcaatcacttaatatacaggtcccgaatgagtgagcgatcagtggaaaagcgctttcttcgagattatggcgacattttggttttttacccctcactaatgaccaatccgaaatcaatacactcgattatcacaaaatcccgaaaaagctgattgatggatccatccaaaatccgataatggctccacttgcctgattctgtgcttcgtcaaaagtgtgcgcagatggactgaccatattctggggaattgaatccaaagtattaattgctaattagttaattaattaattattaattctaattagtctcacccggttgataatttcgcgcacccgcgagtccaaagacacctccttgggtgacagaatggagatgaaatcctcgtagataatacgtgccttaaattggacaaaacattattatcggttcatcaatcaatcaatgatcggtgccataattgggccaaaagcattatttatgaccatcatttctaggatttattaactaattgatcatttctagggtagtccggggagaaccggtcccgagtgggtcaagtaattcaatttggcgtagaattataaaatcctgaatctcaagccccgatcgatcccggctttccttgtcccgatttttgatgaaaatcccggcacacggcttataccaagttagattataagtgattgatcgaagcagtcttttgatcagcagtgctgctgaagaccgaacatttacgagatgatcagttagcccgagactcgaaacttatatagaaaaccggggaatcggtccgggaccgaagccacccaaaaaaaagtgatacttttctcgagtcaatgacctcaagaccgagactctcgagcaatattatccaactgctgatcatattcaaccctgatcagcaattcaaaacagatacccttcggtcgctcaaaaaatttacgaaatgccaatcttagaccaatttaaattgatcagcccaaaattttgcgcgaatttaccttctcctcaattttctccgtgttccgctccctcttcagctcttcgcaggcttgcctgaacatgaaaattttaaaaaatttccgtaaattttccccataaaacactgaccagaacaggatgttctcgtcactgtattcgctcttcaaaaattccgcaaaatacttttggccatttttgtttttcatcagccgatcgaagttgacgccccacgcggcgacctcctcaaaagaggccctgaaaaaacggtggaataattatcaatggcacaacaaggccgtggccatggtgccgggttggaggcaaatgatgcggaataaatggcataagttttgaacaaaaattaaatgtttttttaaaactgacgaaattttgctatgaatttttgatagattcctccaagactcaggattttaggactgtttagtttggtggattagctaataaattgggattagcccccccccccgttgatttgccaccaccaccggcactaacttgtcgtcgatgaactcgaggttagaaacgccgccaattccgtccgagccgaacctaaatctgcttgaaagggactcattaagagcaaagcgatgtgtaaagccataaatgggcatggatttcatgctaattattagtgagaaaagtatgatgtataaagccaaaaaaattgcaaatattcccaccgaaagtgcgcaatttgctggcaaacatttgtgaatttaggggcgcacaaaagcatttttttttaattatattagaaatatttcgcacaaatttatttttaattctttcaaaaatttaattttgtaaaaaaaaaatttaaattaaatcatataaaaaaattattaattaattttaataaattttacataatatatttagtataggaatttattgttatttggtattttgtagtcactgaaatcattttaataattcctttagcaaaccatttaatggcgaactaattaatcaattattgaacagcaggtgttttacgcgaaattttatctatttgttaagccaaccgacggaaggattacgtcaaaagccgaaaaaggaggtcgtcgcttttgcgtttctgcgaaaattcgcgtgccaaaaatggacgcaaataaatgcccaacagcaaacatgccgataatacggggaacttattacggcaccagaagtaattcaattagataaacaatattttaaccccggggcggcggcactcatttcgcgtcaccaatggcacaaaaatagaaaaatatacttaaaaattataaaaaaaaatgttgggctatctttggcagtgtcggcacgaaaagatacaaaaaaacggaaagcgaatcatatgatgtcacgaaatatatgcttgaaaactacggtaacaaaaaaaaatgaaaaattagttcagcagattataagctggccgcgcgaaagtcgaaattttcagagacccaaatatatgtgccattttcatcaaatttgtgggccctcggttttttttaaatttcaaaaattttcaattttagttagggtctattcccgaccctggtcatctgtggcatatcaaaatcagatgagagtgccaattaaatgaatgagtttctgtttctatgattttttaaaaatctattgtctttttctctttcctgacgagcgtatttctcgccgacattttttaaatcggaaggaacaaaaacagcttcgtacaccaacatactctttaactaaaaggcaaaaaatgccaacaaaggcactcgtaataggcaatacaaatgccacttaatttaagtctcgtaaaggattagtgctgtcccgtgcactctgttaatttccaggtcaataaattttttaaggcttatagaaaataattttcttggctgatttgaaagtggtaaattttaaaaaagtttagag

SEQ ID NO: 9094 - DNA, 3067 bp, Heterodera glycines
aaatttttgagattttgcaaattaataataaacacacatatatatcgaacaacaccaacaattcttaatttgattgacagtgaacaaagttatggttcaaaaagtcttccgacgacgtttcggccgacgacgttttggggtgcaccgtttttaaatttctccagccattcccgacaaaattttggtcggggaatttcctttccgattcccgactcttctccatccatggggccggcacggcgaccaaccctaattttaattccttttaattggacaacaacaccaaacaaggggagacctttctcaagtggaggagtcgagactctcgaatagactgtacttcttcccccccccacccgactgacccgccacttccgatggacgaacagttgcagggcaacagtttcagcagcatttggcccaccgatttgtgctgctgctgttggtgttgtattgcggccgtgggttgctccgtttgttgcacttcggctgctgttgttgttgttgctgttactgcttgtgacggttgtgcggttgctgtcgccgctggttgttctacagctactgcttgcgcttgggctgccgctccgtttgcctcttcttcttcttcttcgctgctgtttctgccgccgcttcctactgctactccgtcgccaatggtcgtcgtctgttgcggcggttgcgcaacccaacaattcctgttgctggtgttactgtagttgttggtgttgcagttactgtggctatggttactgtagctggtgctgtgtttcttcttcttatggttgctaccgttgctgctaaaaatcgaaaacaactttattatgccaaagcgtcacaaaaaatagctaaaatccatgctggaattttcgaaaattcacaaaaaaaattagccaaaatccatgccggatttcgaaatttcccaacgatttttaagggtttttttaccaatttttgtgcctagtacaagctgattggagtttaatgctttgaatctaaaaatcagcagcagcgcaggagctagttaataatcctcttttgagggattcgggaatttgcatcgggatttggattgacatttaacccaaaatgcccaagtcggcatttgagccaagaaaattgaccaaatcggcatttaaaacccaggaaaactgtcccagtcggcatttaacccaagaatcatccgtcggcatttgacccaagaaattgtccaagcccagagtgatgaatgtaatcccggataatccccaactttgttttgttttttttcaaccaaaaatcacccacttttgactgcactttcgtccgtgtttttgcgcttgcgattgttcaccagcacaaccacagctgtcgttgttgttgtccttgttcccgtcgtcgtcgtcgtcgtggtcaactttgatgctgttgctgttagtggcacaattgcgctcctcaattgtgctgacaacaatgcgccaaaattagtcaaacagttgcggcgccaaattcaaaaaacagtgtcgcctttttcaagcagtacaacaacaattaatgatgggagggttcagcgataatgtcgcttataatagtgcttaaaaagttggcatttggacgatcaaacggcgagtcatgaaagagtttcaagagagaccaaaggtccgagagtagcggaacaaggcaattaactggagactcgaaattgataattggtcccataaaaagggtgacgaataatggcacgagaaaaaggccgagagcgaaaaatggcatttttggagttgattttaatactttcagttgggagcaagtccggcggagagtcaaacacaagttcgaaactttaatttaggggggggggggggtgataagctgcaaagagtcgagattgagaaaatatgaataaaaaatttcttccgaaaaataacaaaaaagacgaaaatttcgtccaatgccaaaaaatttctataaaaaatatttgaaaaatcgtaagaactgatgccaacccagcagaagtacataaattattgcacatcgagagcaaagaatgaggggcatcgagctcgagaatgggctatttaaagcacggtaagtgtcgagaatagaatcggacttatcccaagaattgactcgagactgatcattagccctattaaaaaagaacaattagcccaattaatgaattctctctcaggcatcaaacatttattgtcccacttaaaacaagaaaagtgtgtttttgtgggaaggaagaattaaattgcggggacaaaagctgttttgtgtgatgaatgggtgctcgtgatcggcaaaaaattctaattattggccattaagcggacggagcaaaagggcggcggattaataaacgcacacgttttccggtaatttaaaaatttaaaaaatgggaaatttatggcttcacaggtggcggaaaattgtcggcttggcatcgtattagtgcataattagcatggtgcataaattcattataaatttaattggacgaaaaaaaaagtttaaaaatttaattaattttttaaaataaaattacgaattaaaatttattaaattgccaaaataatggaattatttaatgagtataaagtctattgaaatgcttcattataatgacgtttttggcacattttcccacaattcccaccacagcaaaaaaaaaaaaattgttgcaatttttaaacaaaaatgcggcactttcacacaccgcacattttacgacggagggacagacgacggcactttaatgggccaattcacattggcacggcattttccctccataattccctcttttcaatttacgtaggaaatgccatcgcccgggaggcgtagggaatggaagccgaaaaagtttgccacttttgcggtgagggaaggcacaaacattggcactagccgcaattcgagaggctcggtagtcaagtttgggcccggttttttcgggttcggggctcggtcgtgcaccgagtctcgggataactaattttgtaaggcaaggcctcgatcgatctcggcttcaccaagtcgagataagtcaagtctcgactagaaaaaaaaagatttttcg

SEQ ID NO: 9095 - DNA, 2475 bp, Heterodera glycines
ttaggctaggtaactaaatttaaatattttttaattaaaataaaaatttgcggctacgtttgtcccccccccccccgaccacacctccttgaaatgttgatccaatcagtgttcgcttgtgcgttgtaattatcgcaacgcaatcgcttgggttgtccatcttttctcggagagtgcaaccatttggacaatgcttggccagcagaagttgttgaatttggcccatcaaaaccatcaccaatcgcagcgggcaacagatcaaatgaatggattgaattcaattggttgagatcagtgagaattgttggcgaaatacgacgaagcaaattgtccaaatgatcaccatggggaaagcacaaatggcgaatatttgccgaaaaaattggccaaatttcacgaccaaaaatgtccaaaatcggctggccattcgtagagtgtgatgatggaatccacaaatataaattggtgcctcttttgtcgaaaatttgctgatttgaacgaagaaaagcgatgacggagtgatcgatgtaactgaaaatgaaataaatgcttttattgtcatagctctgcttttgaattactcaatccgaagccatttaaaacggattttgctgggcagcggacggtccggcaatggaaatggcacaaatttgtcatccatccgcacagatagtttcggttcaggtcctttgtccttgctaatttcgattggtctccaaattgtcaattcgcttttgccatcgaaatgtttgtccaccaacgcattgaaacgtggcgaaagaagtgccaatttgaggccgagttgaggacggtcaaaagaggggaaaatgtccatccaaacgtcgttgcaaatccaactgaaatgggaaaacagtttagctaaataaatgacgaatttgtgtgacttttaaaatccttttaccgtcggttcatttttgaggcaattagcacaatttggccaaattctgaatgatgtcacacaatatatagcagaagaattaattgagttgggtaaagcttggatttttagggttttcctatttcttgacgtatattatcagggaacggatttatatgtttttatatatttttttatctatcgcatgaaaatctcaaaaatagcatttttacctgttttcctttcaatcagagcgagtttttagcacatataaaaaacatattttggactttttaggaataaaaacatattttggggtttcggcagtttttgacacatattttggcgattttttggaaaaattaggttttttttacaaaaatgtcttttttggcactcaaattcgtggtcaaataaatgcccaataatttttcaaaattttctttttttttgtatttttttgacccttttcatgactttttcacttttaaggcaaaatttgatttttagcgaagaaattccgaaaaatgagtaaatctttgagagcgaaaaaaaatttacgccaaaaagcattacattaagctagcgaaattgataaaaaatgagacttttttgagaaattaacttattttttgagcagtttttttcaatttttggcacatattttggcctttttttgggttttagcacatattttgggggttttttggcacataacacaaattgcagagaattaattgcgttggaaactttatttttatggtactaccgtagagttgagcggaccgggaatgttgggcaaaaccgggaccgggacctgagaagccgggacgggaccttggttttccgggaattttttaattaaaaaaaaaattcaaattttaatttatttcaagtgaaaataacacaaaattaatttttattttgctatttattttataaaatctaaaagttaaagctaaattaaattaatgaaatttttaaacgaatttacgtcagttatttcaaacaattaatcattttgtcgatatgtaggaactagagtccagtaaaaaaaaaattccgggagcgggagcgggatcgggagttcaaaattttccgggagcgggagcgggatcgggaatcccgtgaaaatcccgcccccgttaaaatcccgcagaaattttacgggagtcccgggcgggagcgggagtaattcgaaaatttaattaaaaactaacaaaaatatttttaatgcacaaatttgaaggaaaatccttttattaaagaaaaaatagatagaaaaatttagtaagcagaatttgaaattaaaaaatcacatttatgggtcgaaaatcagtattttttcaaattgcttcaaataaaatttttaaataatttatttgttgactccctttattaattttaacaattttttgcggcttattttttgaaaaaactttttggtgaccagggaggaaaagggaggcccggcggtgcccgataggcgccgccggggaaaaaattgatatttgaatatcatacagtgtcagattatgtccaaaaatagccaatttttgaaaattgaggcatttttt

SEQ ID NO: 9096 - DNA, 1460 bp, Heterodera glycines
aaaagcgggagtcccgaacgggaatcccgtaaaatcccgcgggagtcccgatcccgccggactctagtaggaacccatgaacaaaaagaaaatcaaaatatttgaatttctgcagagtgattgaaccaagggaaagaagtggaaaatcaagaggattccatattcgtgatcattgatcagcgacctcggaaacccccggcggatacttgttttctgaactttttaaaccaaaaaaagaatttgaaaaaatgttgaccaaaaatgtggatacaaactcctgtagtaccatttttataattagagaacaaagcggaaaacaatgaaaacaaaatttgagaagctcgaaaaacacagaaaaagggaacgcaacagaagaggagaggaggaccaccaaagagaatattttgcaaaatgatgaccatttgccgggcgttttaccttatccccccacccacaaatcaatcgatcaaataatcaattggacggatagaggaaaaggatgaaaatagcattggggaaggaggagagacggaagagaaagagaggaaaaggaaaaattcgaagcaaggagggggagaaagaagaggaaaaggatgaaatagcagtggggaaggaggagagacggaagagaaagagaggaaaaggaaaaattcgacggaagaaggagggggagaaagaggaggaaaaggatgaaaatagcattggggaaggaggagagacggaagagaaagagaggaaaaggaaaaattcgaagcaagaaggaggggagaaagaggaggaaaaggatgaaaatagcagtggggaaggaggagagacggaagagaaagagaggaaaaggaaaaattcgaagaaggagggggagaaagaagaggaaaaggatgaaaatagcagtggggaaggaggagagacggaagagaaagagaggaaaaggaaaaattcgaagcaaggagggggagaaagaagaggaaaaggatgaaaatagcagtggggaaggaggagagacggaagagaaagagaggaaaaggaaaaattcgaagcaaggagggggagaaagaagaggaaaaggatgaaaatagcagtggggaaggaggagagacggaagagaaagagaggaaaaggaaaaattcgaagcaaggagggggagaaagaagaggaaaaggatgaaaatagcagtggggaaggaggagagacggaagagaaagagaggaaaaggaaaaattcgacggaagaaggagggggagaaagaggaggaaaaggatgaaaatagcagtggggaaggaggagagacggaagagaaagagaggaaaaggaaaaattcgaagcaaggagggggagaaagaagaggaaaaggatgaaaatagcagtggggaaggaggagagacggaagagaaagagaggaaaaggaaaaattcgacggaagaaggagggggagaaagaggaggaaaaggatgaaaatagca

SEQ ID NO: 9097 - DNA, 1560 bp, Heterodera glycines
ggaaaacgataaaaatttatgaaatggcaaaaatttttgagtttttgagacataatttttgataattttttttccaaagtagtaaaatattcggggacggggcaactgccccttgcccccctccctggttacgggcttgtgtgaagccgaataaatttgtctcataattctctctcttaagcggtcaccggtcgttctccgatggttcgccgccatcaaactcaaaatcagcatattccgccgcccaatcaccagaaagtcatctctgcactcgcctcttcccgtcttcaatgtcagaatcagcaacctttgtcaaattctacgcagcaacaaacgatgccaaaaagcaatgccagtggaagccgtcccgggtcgcttaaggtgtcatatagagttagttagcgatgtgactccgtcctcttcgagactcgcttcgaatgcttttctttttagggtgaacgtccctatgggtcggctgctgataaaattcacaggcatgggaatcaggcgacgacttcaacattctctccggctgatgttgatacagttccgtcttcggctgttggtcctccagtggaaccatttctgcgtcgagtcggttcgaccaaacaccgaatccaacgacccccgccagtgccggacgaagatggattcgttaggatgagtccacgaagcatcaagcacaagcaacctcaagaaaaaccacagaaaaatgttgaagacgagggtacatcatatgcttaataaattcaaaaatttatttattttaagccattcattcccggctagaacagagcaattccctctcagtcacagcacaacaacaacaaccgcaacaatcaaaacggatagcatctggtaagaaagatcttcatgctttttcatttctgatattctgtaatattagtgataaaagacagtgccatcaatcgcaatggtagcgagttgaaaagggtgccgttggcaagtaaattgccacagccgaggtcatgttcgttaaaaaacactccatcggcggcacatcaacagccgatgcatttgcgaaggggcgataatggcaccgttgagcatccacgaccaacacaacggcaacatgagcaaatgatgttcggttactcagcgccagaggtgaagaaagctggcaaatcgatgtaatattgccataatggggaaacataatttgggctcgttatcgatttgtgagttgtaacttctgtaggttatttctaggctaattttgtgtttaatcaaattcttgaagtgtttgtttttgacgcataactcttaaaaaataatttcctcatcgacatttcccgcccagcacaggcaacagcgatccgagggcggcggaatcagcgaaggccgtcaccgggtccatagagcagccaacaatgtcacttacatatcagtggatgctgacgaagaaagtgttaacttaccaattgtacagaaggaacaacagcaccagcagcaccactcctcgctgccaccacaatggcgtcaccaaattgacgacggccaacgacggcacaagccaataatggaggaaaagcagcggat

SEQ ID NO: 9098 - DNA, 1912 bp, Heterodera glycines
caggtcgaagtcggcgatacagcaacagaagcggccgactgtggccacttccctcgtggaccaacagacgccatccgctggcagtagcaggaacagaacgaaacggtcggaaccgatggccaaaccattgtttgcacaagatgagaccagagtggtgcgacgcttttaaacgtgggtgatagaataacaaagcaaacacaagcgaatccacacaatttaattgtattttacagagtgaggcaccgccgtaacacttattgttagtcacttattttttggggttggcttcgaaaaaacaaatgtcgccctaacaatgcctcacaataaatgtgtttttgccgctatccttgaattctttgttatattgttcccaaataagtcccaaaaataaaaaggtatttgacaccattgttttcactaaacttattcttcatacatcttgtcaaattctgttctgttccgtccacccccttccccttttctctgcttttctcttccaaattcattcattgagcgatgagtggtttatccgaatatatacaataaatgcaagttgagaacacattcctccaatttaaaatgcatttcctgtacctttccaacgaaaaaagtgatgccaagaatttcgcataatattttcaatattattttaattaaaatattcaagtaatgaacaaatgtgtcagcttttatctaaataaagttttaatgaattacaagcatttatgactatgtgtattttttcggatttagatataccatcgtttgaattttgagttttttagtgtactattttttaaacaatcaattttgtatttttctgataacgttaattgttccatgccttctctgcacgctttcgggcgaaggtggaacatcgccaggtgataatgccgcctatttgacaatcggaattatttggttttttgagtgatgacttcgttttccctggtcttaccgatctgtttgctcgaagcgcatggtacgatttgaatgttctgttatttttgcaatattaattgacgaatccttttgttgggctattgtccaaattttcaacttccccagtcccaacatgcactgtttttccccaccttttcagggtgttcggctccgtggccctttttatccttcacaatcccttcgaatgcgattccgtttcctggctccctttggtgctgataatgctcgttttgaacattgtctctggcgcactttccatggctttggcccttctcagtgcccaagtgctcctttctccgaaaacctttgtgattcctttcagtagggctccattatgaacacgcagcggaggcgtcacgtttcgacgctgctttatgtccgactgcccatttttgttgctgaaatggcgtggactgttctgacaactctgatcgcattcggtaatttacacagcaaccgaataaaagcagacaatttcagatgtgttcagtaatgccagccatttgtgtcgaatttccacgggcattaggtgcgaaagaaaacatttttatgataaaagggaattaatgtcattgacagactttttattttggtggtttcaaatgcggaagaataaaatcggaagtgaatcattggtaaacgtttatgtcataggatagcggttgtgctggagcttttcctcgtcctctccactcttttcggctttgtcatcgttttcaatccgatcgacggtcgccgcatggatcgatcgatggttgacgaacgcctttactggcggaggcgcctttttcttgtgagtaatgtctgcattgccttccatcatttatttgtgttgtaatcgttcagtgtaaaatgggccaagatgcgttggtccgtgaagcaatcgacgacatcgccactttggtcgccttttactttgtggaaactgacttttgtctgtccgacatca

SEQ ID NO: 9099 - DNA, 1090 bp, Heterodera glycines
atgtgcaaaacgtttcaaaacaacggccggaatggatggaggtcgtcgaccagggcaattgaggggggaggggggggggggcttctgctaatccggagcaggtcgtttggtcgtttcctccccactctccccgagaaaacttcaaaaatttaaccgaaacttaagaatttttaagaaaccataaaattttattaatttgttacaattattttccttcattttcggaaattttaaatcttttctcgaaaatttattagtttttgtaaatttgtgaaattttctcgggggggggggggggaattgtacctctgaaaatcatttctctttttgcggaagggggcgtgggggggtgggaagggttaataaactttgtaaattgttggcctcactctaataattccctccagattccccactgtcttgagttggccaatcgttatttgggcttttctgtggccgtctacggatggcccttttacgtgctgacaaattgcgcttgctgttcctggtgtttgctgtgccgtcatttgtgcacattgagcaaaggcattgtcagcgaagagattgttgtcgttgcggacaattgttgcgcatgccatcagaggtaagaaaaaaaagcaaaaaatttagcagcattttcatatgtttttttaccgtttggctttgtcaaatataaaatttgtttccaagtgcgtttatgcttcggttggattcccattgtcgcctttgtttcctctcttttcgcaaccgcctcttcgaagtgccattcgctgtgcttgtggacaataaaacacgggcaattgttgtcacaattcgaggttcctttttgagtattacacaatttgctaatgactgaatttgaatgcgatgtcttctccgcttctcaattgcgtttcccaccttcccattttcaggctccgcttctttcatggatctgatcaccgatctttcgctgagtgatgaactgctcgaatgctcagtggacgttgattctgacccaattctgtgcaatgacaaggaattggatggccgaggggaagtgcgcgttcacaagggaatgcttcgcggagcaaggcgagttccaccaaaa

SEQ ID NO: 9100 - DNA, 1706 bp, Heterodera glycines
  unsure (1)..(1706): unsure at all n locations
atgggactcgtaaactgttgttggggcgcgtaaaatgtcatggaacgcgtaaaaccgactagaaccgtgaaaccttaaacttgtctggacgcagttggcccgctgccgactaattttttaaaatttttgaagaaattaaatatttgacagaaatcataggcaaaatcaatatttttgcaaaatatgtatgattctcagggtatttgttgttttatatttttcacaaatctattctctttaagttgtcagtgtataacatgtttctggtataagtgtctttcgtctccacgtttctcaatttttgtccgggcgattgatttgccgctccctttcactgtcgtcactccaaaattcccaactcaactctccccggccaaatctccacgttcggctcttctttcaggggtcatctgagcaacctttttggaagtgttcagcaggtgaatgaatggactcactgtcctttccttcgcttccgtttcacttatctcaatttctcagtggtttaacacttcggccagcgcgagagttgtatcatcggcagacgaagcgttcactccgtccttcgaacaaagtgcacttagcccaccgctcagccaaactcatatgaattcgattaggtatttttgttcgtttatttctgttttatggttgtttaagcagccaaggactcgccgaaccatctgtgatgaacaattccaacaccaatctgcaaacatttcgcgaagtgttgttcaatgaaactgtgctgaagttgctgaggcgttacgaatttgttggggtgagaacaaacgaacggattcgtcatgcgaaaatatcattaattacttaaaccaatttagtccatagggtcgggggcacaaggattggttatgtgagtgaatgttcaaaataaaacgcaaatatagacagagtttcagttgctgcaaggatttgctgacgaatcaacgtgtggcaatcaaaaggctgacgaggcctttcgccaatgttatccatgcaaaaaggggtcggtccaagcttcgcttatgcttttcaatcgttgttcatctcatccatttagcttatcgtgagttcgaaatcatgaacctggtgaaccatcgcaacgtacgttttttgttttgtttttcctgtcttccgtcctgcctaaatttagatcatcaaattacttaacgcgtacactccccaatcgtccttggatgagttcagcgacatttacttggtaatggagtgcatggacgccaacctttgctcggtggtccaaatgggcttagaccacgaaaggctgtcctttttgctttaccaggtaaaagaggcgaaatgagcctaatttgtagatacatttttattttaagatgctttgcggaataaatcatttgcacaaagccggaatcattcatagggtaatcagtcctttaattatgccattcttttcaattatttgtgttaatgttctgtatgtattttgctgctccaggatctcaagcccagcaacattgtggtcgatatgaattgccaactcaaaatccttgattttggacttgcgagaaacagcggcgagagcatgctgatgacgccatatgtgagaagggagaggccgtacgcaccgaaggggtcggcctccataggaatattcatgatgcgaagcaagggcgtagccangggggcgcgggtgaggagactaaacctatctcattctaataccatca

SEQ ID NO: 9101 - DNA, 3617 bp, Heterodera glycines
agattttgcatagttttttaatagatttttgtacaacatttaaaattttgcgtcaaattttaaaattctatataaaatattattaacattagcaaaaaatttattattaaaaaaaaaaaaattccttcaactttgtcaacattttgaccctaacccccattcttatcagtgtatttttgttatccgggtacccggacctaccgacattgagcatgtgcagagaatggaagcggttttctccaggcttcagcagaatgatctgcgcatcaaaaaagagaagtgctcatttttgaaggataaattgatctatttggggcatgtgatcgacaaaacaggaataagtccatcaccggaaaaggttaaggcaataaaagaaatgccggaaccaaagaccatcagagttcgaatcattcctgggaatggtcaattattacagtaaattcgtcaaagatttggcagagtgtgttgaaccattgacagacttcgccggaaggatgtcgaatgggattggagtgatgagcagacaaaagcatttaatttggtcaaggaaaagctgacctcagacaaagtgctcgtgcattatgacccaaaaaacaatttgtttttggctacggatgcttctgattacggaattggaattcaattattttcggaattgaaaaattcaagcagtacctatatggccgaaaattcgttttacaaacggatcatgagcctctgaagaaatttacggccaataggcgaaatgccagtggtggcagcaagaagactacaccgatggggcctaattctgatagagacccaaaaagacaccttgctcaaattagtcaaaaaatttgtcaaggagggttggccaaataaagtggacaaggaatttcgaccattttacattgctcggaattcgttggaaattcagtccggatgtttgatgctcggaataagaaccgtgattccagctacatttcggcccgaaatttttcaactgatacattcagcacatccatgaatcgtcagaatgaaatccttggcacgacaaaaagtttggtggccaggattggacaaagcgattgaagaaatccgaaagtcgtgccggccatgtcaaattaatgcttctgaagaacgaaaagttccgttgcatccatgggaagaacccgaacggccttggcagcgattacatgtcgatttttgtggtcctttttggggatttatgtggtttgtaatggtcgatgccaaaacaaaatggcctgaggtcattaaaatgaaaaccacgaacacaaacacgacaatttatgaaatgcgacggatttttgccatacatggactcccaaaacggggtaattttctcgttcggactttgagaggcgtttggaagcggcacgctgatcagcttaaacccgatttgacggtcgaagatcagccggaaaatgaatccgtggacagcaacacggacttcgatgatcaacaacaggagactgaagatgagcagaatggtggcccagctcctcccgaccttcggcgatcacagcggactaagaagaaaaggcagatctacgatccaagcagctgatccttgataaggagggagggatgtggtgtattcatcctcttatttaattatcgatttattttgctgtcccttgacctctgctcctccccctctcatattgttatttaagtccgtccttctcccccttccttcttcccagcgtcattccatattttgtgctattgactttctccacttttgctctacatttattttgtattatttttgctccaaataaaattgtttataaaatgttgtcggacacaacactaccttcaattttgtttttattttgaaaatttttttgtccattttatctttttatgccattgaaattgctaatacatctactgcaattcattttttccttattatatactgtatattttaaattattaataatttatcattcaattattctttctactaaagacctgctgggtgaaaaaaaatagcgtgtacgagagagataaacaatgtaaaatagtgaagacaaaatggtcaaaagaaaatagatcgaaggtgagatagtttatctccacttacaaaggaggggtcaacaatggacagtggaatttcaaaatgaaacattgaggtgggtagatcaccccaaggttctattgagaaatttaaccatttttccaaatgggtcagggtcgggtacatttttattattttaaaaatttatttaaatgtgcggccgttcgtaggagtcggattttaaatttatggtataaattttggaatttttttttgcatgagcttttatcattaaacattgtgccattaaattatgaagttttcgcctgtgcattgtatatcttacctgtgccaattacaaatatttaaaattttgttttaggttttattttagttgataaactcacattacttgttaggctaaatatttcaattttgaatttttcctaattttattaatctttaaagtaaaaatatattatttcacgattattaacgaatgaattcatcataagcttttaaatgctgccgtcacttcatatagaagataatcaagaaatccttggtcaggcgatccaaaacgatttgttcatcttaaaaaaaataataatcatttttaagaataatataataattaaggtggtaaatttttgactgatattaactaaaaattttgtcaaggtttcttcattattttcatatttcttattttagacaaatttcaaatgactggagcaaaatgtgggcatgtgaattttttttgcgaagagaccgataaccgtactttcatgttaatccactcaagtgaaaatctttagcgctgtaaagcaatattaattaattcaaattttttgtgagcatttgccgtgaacaaattttttaaatagttagggttttattttattattcttttatctcctcagggattttataaattatttaaatataaattttctattttatttattttttatttcctctgggattttattaaaaagaatttctttaaaattaatttgctatttattttttgaatttaatactgaatgttccaatgtcttacaagtactagcctgggaatgaaacggtggcactgatttgcaactcccaaaatctgggtgggtggaactactggtctaggaaactttaggttttggcaagagatcaaaatcgaaactaaagtggactgtggaagggaggaggaaggaccaataattgggacaatgtcaaatgatgtgttgaaagtaatgccaatggtgcaaccgtggtgcgacatttggggactcgacttttggggatcccgacatttggggacccaacatgacacttagtgaacccgacatttgggaatcccgacatttggggacccgacttttggggacccgacacttagggaacccgacatttggggatcccgacatttggggacccaacatgacacttagtgagcccgacatttggggatcccgacatttggggacccgacttttggggacccgacacttagggaacccgacatttggggatcgaacgacatttggggaccgaacgacatttggggaccgaacgacagttgggaatccgacactta

SEQ ID NO: 9102 - DNA, 2645 bp, Heterodera glycines
actttattgttgataatataattaagtaacgatttaatagaatatattatttttttttatacgcaatatatcatttaaagttttataactgaactttaaacatacgttatataaaaatttaagaataaaatgtatcaaactttaatgtgaaaattcaataggagaaaaattggaaaatttttcgagtttcaaaatttttttgataaataaacataaacacttttttgttacaagtattactgtcgtcgttatcttgttaattattttttataaaaaatgattttagtttcaaatgttatttaacatccattaaatttgaacatcgaaaaatgttttttgcttcaaatctcgaaaaactgcaaaattatattaaatttttaaaagatatttcgctcttaccacataccattttgagcgttttatttaactctacataattgaacaaataatattttttacccataataaaaatattttttgtatattctttgaaatttttatttagaatttcagttttcaaagatctgatctaattattttacaaaatttttgattaatatgtatcataaaaagaataatagctgtattttcttgttaaattgtctttataaaaaggatttaacggattttcttttatatatttacataaaaacttttcgtacagagaatatttttattctacactcttaattttctcgcagttctattttcttttcaatcagagtaagttttagaacattttgaacttttacctcatataaactttgtttggtagtttgggacatatttttgcaattaaataataaagttaatttacgcagttttgtttcaatttttggcaaatatttgagctttattgggattttatcaaatatttcgcgtatttcttgtatcgtttttagcaaatataaattcattccatagctaaagctttggtttttgattttcaatgcatccgtagtgtttgtcaatacttttttgagttcaatgttgaataaatattttgcaaaccataaaaatattttgaatatattacaaatttttcatttttcctgcatcacccacgtaaatttcttcattgctattttcaatagcattttaatgttaagacatattgcatttaattatttctcccgaataaaaggtcggtatatcaattgtaattatttgtttttatatttttctttccgataattttttatggtcctgttttttataattaattagttaattatttgttcattcataatagagaatcaataaaatttttaaatggaaaattgctcattgtatcgtttaataaatatttaagcatcattatttaacaatatttttattagacaaaatatatggaatttttgggattcataaattttggttttgttttattttcatatcggctgttaatttttattactaacttataaaaatttatttttaacctctttttttgttcgcccccagcttgacctcattgctctttcgaatacgatgacagtcaaacaatggttttcctcctttatataaattatcattaaataattaagtaaaattttttattttttatttttctatacttgcaaatattattagaatcattttaaaagaatgctgttttttatttattttgttcatttttagccaagatatttgcccacaaataaatgtttattatgtttattttaaatatttcttttgactttgttattatatttcattcttgacatatttatataaatgaattactttgtttaatgttttattatagctatttttatctaagaaattagctccatatttttaatatgcaatttgttgcctaattttcttgttatttagaaaattgtgccgactattttgagtgaatgctcatttaattgcaattcctccggttgttgtgataagcatatcggccatggtccgattgtatcgttcaccgcttgacgactagtgatatggtagatgtttggtgtttgaatccccaaattttggctagagattcaaatgttatgttcagaaaatgagtgccacactcagtgacgagtatttttggtagaccgattaagctggtattatatttatttattgttaatttcaatctctaacagataaaattatttattaagaatatattttaataaaaatttcattatttgaatttttcagcaaagtatattatttatttttatttgatattaatgaaatcgtacaaaatttattgtgctcacgcggccagctttgactcatcatttttcatttaattatttacattaaatttgataatatctcttatttaaaatatttatattataattaataaattttttcattaaagttgaataataaaagtgtttaattttttgataatcatttttcaattaatagatatcatggattggtaaatcatcaaattttctttattaataaccatgacattaaccgaatgttttttttcaatttgaaataattcacttacaaatttctgctttattctgtcccgtttcacgtgattaatttgatatatgattacaaattgcttaaatttacatatgatcttttattacacaaaaaaactgttttttgttttttatattttattcatgaataaatttcggtgctaggtcgatcctaaaaaagtatcaatg

SEQ ID NO: 9103 - DNA, 3546 bp, Heterodera glycines
  unsure (1)..(3546): unsure at all n locations
aaaaagnagatcntaccatcggcagtattacaatttttgtctttaatttttctggttcaaatggctgttggcaaacaggtaaaactaaaaatacaaacatatttcaaaaagaaaatatcttattttaattgaagaaaaaatccgcggagaatatcaatgcgaggctggccatggtgacaaaatcgggcaaatactgcctgggctacaaacaagcgcttaaaacacttcgttcgggcaaagcaaaattggtgatcatctccagcaacacgccgacactcaggtgcgattttgttttgaaattgtgcgattttttggagaaaacataaaatgatggaaattttttggatttttgagggcagatcaggccgatttaaataaattttctcggcggtgtctactgatactttgaactactaatttctctgaattttccaattttgactcaaatttcacatagcttgacaacttttggcataaaaataagataaatttcataaaattttttattaaatcaaaatttttggtaaggaaaaagcctttgtactagtatatacaaaaaagttgccatttattcgattgtcacaattattgttttatttgtttatggcctttagacgcagtgaagttgaatactacgccatgctgtcaaagacgggcgtgcacgagtaccatggcaacaacatcgagctgggcaccgcttgcggcaaactggttccgagtggtccatgctgtccatcactgacccgggcgactcggacatcattcgcacaatgccaaccgaggcctgacaaatctctgtgagctgttgtgatcacacactgtgctcatcgccgttgttttcttatgttgttgttgttgtttttaacttgaaaatttaaaaaaaaaatttcactcggttttttccaattttttgctttcgtaaaacgtatttatacaattacctatttgaaattttgtcgttaatttactatgagcaacatattaacagtcagtcaatacctaatgcccaattgtttcgtcatcggcgttgccggaggcactgcgtcgggaaaggtgtgtgggtgggaattgtaaaatgtggtcctagttccggttttttctcaggccgggttccgcgattatgatgaaattttgtaattttgctttgataatgaaaaatcagtgactttaatataaaaaattgttgaattttagtaatacctaaaaaaaatttgtgtcccccggtgaaattatgcggcaaaaaaaaataaaattccgacttccatagcttgttggggcctgaattccagaaattttcggagccgttcccgttgtttagccgaatgaatacacaattttccgctcaatgtttgcccgttcatttagtcgtccgtctgcggccgtatcatggagcggctggagttgcacggcagtcacaaacgcgtggtgattgttgcgcaggactctttctaccgcgatttgacctcggcggacgaaattgcgaaggcccggcgaggcgactttaattttgaccatccgaacgcatttgagcaccaactgatgctgaacacactgcgacagctgcgccagggcaaatcggtggtcatccccaaatacgacttgaaggagcagcgacggtgcgttttccatcgaaaaaccattcaaaaaaatttttttttaaaatatttctcattttttcgcagatttttggatctgttaattaatatggggagggcttaatgactggcgcaaagttccagatttagttcccttctttctggatacatgttcaattttgaattaaaattcaccaattgaagtccagcgggccatagtcaccgccgaggaaaattgattcaaaacaaaaatttattcatattcccataaattttttgctattctaatttaattgaaagcattttgaatcgtattccgatactgaaaatccttccccctttcagcctcatcgatgcgtcgcaccgtttggaagcggccgatgtcatttttggtggagggcattgttctccgattaaaggtttttgagtggtaccaaaattcaacaaaaacatgaaaacattttacgaaaaaaacaaacaaaatgccaatatatggagcggatttgaaaatgcttttttaaccattttctcttgtccagttgagcgtgacacgaccgagcttggccgtccgttggaccaagtgttgcatcagtacctttcgttggtgaaaccggtcagtctattatctgctgatgaagaaaaacaactaaataaaaattcccaaattccaagttttttccatcaaaattctttaataatttatttaaaaaaaattccctaattgctacttaaattttaaaaactcattaatttttgtttaaaaatcatttgaaatttttcgatgaaacgacctgtgcccctcccctttaaggcgtacgaagacttttgcctgcccaccaaaaagtacgccgacgtaatcattccgcgaggagcagaaaatgacgtggccattgatctgattgtgcagcacattcaggaaatcttgcggactccgacatcaaagaaaatgcgtcccgacaacggaagcgaaatggacggaaaatgagggggggggggggggaagaatcgcagagaaattttcagttttttgattgtttttcacttgtaattttttgtgtgcaatatctaatctacgaaagattactctcattttttgattttgaatttgactgtcgatataaatatgcttttaaacggttccgggacgggcgaatccgaataatgtgattaattgagcaaaaaaattcaatttgcgataaaaagcgaattttagcataaattttgctgatgggttagtaaacaaatgaaatggctgatctcaccaatccggctgcagttaaaactcatttcgaacccgaattcgtaccgccaattgaaactcatattaaaacccgaatccatacgttagaaaaaccaatttgtctatctccgtccttcgaatcaaatggaccattcgcccgtttgttgctattgctgctgcggcccttcttgcgcttgcggtggcgtcggcggtgtcgctggcggttgcggcgtcccctgatgctgttctcccgacggttgcgcgaccggtggtggtgttgctgacgacctcgctcgccgtgttgatgctgatgcccgctccacgcgccgttgcacttccgcagtgtatcgtgccgggtcgttgcggaacaaaacctgaaaatttggacgcaaaatgataatcaatcgcaaatgtgtgccgacgaatgaatcagacttacggcagcatccacattggcaggactgttgaagttcggctctgccagcagcacttggatcgacaccaaaatggattccaaggaacggttgggattccaacgctcggacggctgctcatggccaagcggatcaatgccgggtgcatgaagaatgctgatgcagacttggccactctggtcaactatttgctagagttgacgaatcatcttgttaccaatccttgggcgccccaaaattctttaatttccaagggcgtcccttggcatccaaggac

SEQ ID NO: 9104 - DNA, 809 bp, Heterodera glycines
aagaagacgacgcgcgaacaccctgccaccggcacaaagaagacggagcaggaggaacgccctgaattgtcatctgactctgatcgcgaagaggaggcggctcagaacacgaagaagcaaaacgcaaagcagccgcaggacgtggcaacaaacagcgtaaaaccaagaagacgacgcgcggacgccctgccaccggcacaaagaaggcgacgcgcggacgacctgccaccggcacaaagaagacgacgaacggacgacctgccgccggcacaaagaagacgacgcacggacgacctgccaccggcacaaagaagacgacgcacggacgacctgccgccggcacaaagaagacgacgcgcggacgccctgccaccggcacaaagaagacgacgcgcggacgacctgccgccggcacaaagaagacgacgcacggacgacctgccgccggcacaaagaagacgcgcggacgccctgccaccggccaaagaagacgacgcgcggacgacctgtcaccggcacaaagaaggcgacgcccgcgacgcacggacgacctgccgccggcacaaagaagacgacgcacggacgacctgccgccggcacaaagaagacgacgcacggacgacctgccaccggcacaaagaaggcgacgcgcggacgacctgccaccggcacaaagaagacgacgcacggacgacctgccgccggcacaaagaagacgacgcacggacgacctgccaccggcacaaagaagacgacgcacggacgacctgccgccggcacaaagaagacgacgcgcggacgccctgcca

SEQ ID NO: 9105 - DNA, 1226 bp, Heterodera glycines
tgggatggttaaataactcacatttgttggcttggactctcatggcgtcgtctcttcagcacaaccgctaattgctcgtccaccaatttgcgcaatttctcatccgcaatatgtttttcagcacccgtaatatcagcaaattttttatctaaaaatcaaaaacagaaactgttaaagttacgttttactccgacacttaggaaaaatttatttttgaaaacattttcgcagaaaaagaaatcgaatccaaactataaaatttagagagcctggaattctgagacaaatgggaccggaattggtgatggaccgggaatcccggctaaagtccggcgtagtctttatcccgtccgggcactaataaaattcaagtgcatgccacggattgggtcccaatttttcggcataatttctctgtatttttcctacttctgtcggcaatgattgaaaggggcgtcaaaagcatgccaccgcccataagcacagttgtccaatgaaacaacacttcctttgcatttttattcatgtttaatgctgaacagttgaaaattaaatgtaagcgattaaaaaggctaacaaataagtgccggccaaatttcgcggaaatcaaccaaaaatcctatttattatttttttgaaaattacgaaattgacgggattaatccgtcaaaattttccgagccccaattccggaaccgggtggtccactacttcgactttctcgctatttgtctcatttttattttttggcgccttatttcgagaagcgcgtttatttttttgccaaaatgttatgccaattcaaatatttccggacagaatttgcaaggaagtgaaaaatacagactccgtgggctttaaaattttttgaacgaatcaagggaagatttaccgattggacaacagataatcgtacaatttatttgcacctttcgtaacatacatacatacaatatacatatatagtacaacaacaacgatggttaaaaaataccatttacatggtgtacaatttagcgacatgataaacagatcacacatcaaatcacatgatgataacgggggaatataacacaatatggcatatgagacaatacataatatgggtttatccgaaataggaggactgaacgacgttgaaggttcccattctgccagacattggtggattcttcgcgcttgtgccagcttttggttccgccgatccgcgtgccgtcggtttggag

SEQ ID NO: 9106 - DNA, 2601 bp, Heterodera glycines
cgagacgcgagacattgttggtttggagccaccgcttgtgccagtcttttgtcccatgaggcgagccatcatccctttgaagccgccagaaggtgtagtcatcggtgccgatccatgcgatgtcggtttggaagagccatgagatgtcggtgccgatccacgagacgttggtttggatgatccatgagatgtcggtttggatgcgccaggtgctgagccatgagatgtcggtgccgatccatgcgatgttggtttggaagagccatgagatgtcggtgccgatccacgagacgttggtttggatgatccatgcgatgtcggtgccgatccacgagacgtcggtttggacgatccacgagacgcccgcttgtccttgccattcgataacgactcttgagttgactgtggcgtttcaatgccatgttctgctgcgtagccgcttcttgccgtactgccgccaaaccagtcgctccgcttctttgataatgcttcaatgcctcctcctcctcttcctccagcaacagccggtgccgccgctgcctttcgtcctcgtccacggatgatcaacaggcgtgatatgttccccgtggtgcgcgcccacaatgactgtcctcctccgcgtcccgccgatggatttgaccagtacgagcgtggcggttgtcgcagttggttcttgcgtcgtttgagtaccatgaagcatgtgatggccaagagcagggcgataagcagcagactgaaaaattgggggaaaatgatgaaatgttgtttaaaaatgaatgtgccagagtcagtagtgccaaaaaagcgatcacaacaaaaacacacacattgcagttacaatcagcgcccatgcccagcccggaagaccaccgctgcccgcaacacatttcatcaaattgtgcgcaggtgtaccatgcttgaccaacagacgcgcatctttctgaacggtaacaaaaaattggtgatgaacacgaacataagtttggcaaaacgttcaaaaagtgcgccgccgccgccaccactcacaatgagcacttcccagcgacagttggttgctatctgttttgtgccgatgttgactacagtgtgacgagcatccggcaattcgtgaacttttttcagttcgatagcgcaatacatgtagtaggatatgcaatgggtgccacagttaggcatgaacggaaagccggaagactgtggaagaaaagagtgattgatgtgatgtatacacataacgaaatgtccgctttcgctcacccctttctgattgcctgtcgacgaacatgtgccattgttaatacgcaagagatcgcaatttgtgtcgacatccggatgggcaatcatgaacatgactttgtgtccttcaggcttcatcagcagaattggttgagcagcatcaggcgatccagcaatgtcacgtttcgcgaaataactgaaaatgggagtgatcatttgtcttggtaaaatttgactggcattgatgtaaaaagacggcacacttacacatctggtcccctctgtttgaagccgttcaattcggtgccttccttgatgcaatcgtagtcgcgcgacaaccgcatcatttcggcactgcagcagcgacagaggatcactgaagcgagcacggcagcgatgagcagactttgttgaaacggaaggatggcacggaacaccatcataaatgggaagaaatgaagtgtttggtggaataaaagtgtgttttgtggaagtgagtggcaaatgcgggggaaagaagcgcttttataagggcaaaaaaaggatgaaaattttttgcatctctccgttatttttggttcgataaaaattgaaaagctactgaactatttagtatatatacctaactaaaattgcatcatttttatttcacatttaggtatacacaaaattttatagctaaaattcgtaaaatcataaattcatcgaaatccattattcactgttcgtatctgttgtccatattctgtgcctgatttgcaaaaaaataacaaaaatcacgtggcatttatatatcgacaaaatatcagaaaaattaaaattttgtgatgatttttaatgaatttgaggtgaacgggttgaagtaaaaaaaccaatacaatttaagacaggataatagattagtcgtacatttatgtatgtgtacaatccgttccgattgttccgattccaacattttttagagctcgaattccgccgactgctaattgcagcaattgatggtcgtgaaaagaattcgagctaattgcagtcaatctttgaactctctaataatcacttcattaaattcgctttacaaattatcaaacaagagcatttccattttacacacatgcttacctaatcttgtccaattagtcaattgattgaaatttcgaaactccaaatttgcttccatttcacaaatttagtcgctaatattccccagcagacaaaaggtctgctgatcccccaatagtaaaagcagcaaatgactgatcagcagagcacacatcatccgtccaacgggatcaccgacgagagaagaaaaagcaccagccaccatcacacactggcggcgatttgatctttgattaggcaggcgac

SEQ ID NO: 9107 - DNA, 2506 bp, Heterodera glycines
ttgaaaacaggctgtcacctgagcggttaagccttcatgaggcacgaccggcagcgactgtttgaagtcaccgctgaaaatgaccgtttttcctccgaagaggagatccttgtgctggcgaattgccatctctttgcacactcggtcgatgacctcaatcaccgtgttgtgaagcatggtgatctcatcaatgatgatgagttgggcctcacgaatccgacgggcaaagaagctctccagcggaatgcttgggagtttgtctaatgacacttctctacccagacgaaacgtggaatgggctgttttcccatatggcagcaaaatggctgcacacccagtggatgccgtagcaagcactttgtaggtgtatggggcctttcgcaagcgcctaataatttggccaaacaggaatgtctttcctgtgcctccatcgccgtatatgaagaaacggcgggggacagtcgaatccctagggttcgactgtattgccaacaaaacagcatcaaagaccttctgttggtcgctgttaagtggcggaggggtatttggctgtggacgaggatttggttgccctggaggcaaattcaaatcatcatcgccaaagaaaaactcttcaattgccgcgtcagtatttttggcaattgaagttggcgggtctggcaggctaaaatgcacacagcttaagttaaagcagctgtgcagccgccaatcaatgtcggctagggcttcaagctctgctactttatgctgtgccagagtaataatgccttgcggattgtacatttggtctttgtacttgttccacaattctatggcattactcggctggccatagaccaggatgctcacaaaaagccatctcatctgatctggccagcgcgacagagctgcctccgccagagttttgtcccaaattttgtcgtcttcaagaagaccatgcattattgcagcctcagtgaatgaggtacaaagcaacccattaaccatcttaagatggtctgggtctccaggaaagtgacgcataagtgaatagagcgcgaacctttccgggtccgatgggggtacaggaacaattcggccgataggtggccttttaatttgctgccttttgtacaggacccatttgtcctttgcccatcggaaccgctctgggactttttcgaaaagaatgtccttaaactttggatcattcttccactcattttgccattgtttccaataggctgaacactgcgtttctggcagttcgccttgctggatttgttgagctttgctcaccagctggaaagccctatatacaatgggctgttggtttggcaaatgaattgccaatttgacaacatgatgcgaaagacgggcaaatggcattgaatgaacaatggcatatgcttccgttgcaccacgaaagttcatcttggcatattgagccggctcgtcaattttgattttattgccggactcttctttgcactcgacataacaatgtcctggccctttaaaagggtacttgagtgcgtatttaatatttgctttgttaccatatgcaaacagtacattatggtgtactcggtaacgtagcagaatataaggattatacggcacgacatgtgagttgtcgtatattaggccgtttacctctaattgggcaccaccatcagttggtgaaggccggaaatacatcgcgggcctgtccgggcgcaaaatcgtacattttgagtaaggggctgggaaccccttcttgcaccgcccgtaaattgggtcgctaggaccacaccaactgtcactgcatctgtgcagttgcatatgcattgtttcgcggatttcgcgatgcatttttgcaatgggcgtgtcgtcatctttatcaggcaaagatggaatgtgcgcccatatgtattcctgaatgacatatggaactgcgtccaggtctgtttgcgccacaatgtgggcatgtgggcctcctcggccttggaactccattgattcaccgtaaccaaggattgttccgaagaactttttgtcataaagttcttctcggaactcagcgattttgctgctccagacacgcatccacatgtcaaaacggtcagtaaatacttgaccgtttttgtgtaaattctctttgaactcaggccattccctgttgttcgtgaaagtaatgaagagacgcgctttcttcgcgtcatggcaccgtgcaaaaacggtgttgcaatcttcatacattttcttccaatattggagagaatttacgttgtgttcggaaagccgaacaacactgccaatgtcatcaacagttttctgttgggcattggggttttgccgtgcttgctgcctgttgtattggttgaccaaatactgcagcagattttttggagtgctgatccgcagatccatgtcaggtctacgcaaaaatgttgctatttgccaatcaatttttgcagcctggtcaaggatccagcgctgaccaagtcctccaccacatgaaagaatgtggtggtattgcaactcc

SEQ ID NO: 9108 - DNA, 3058 bp, Heterodera glycines
tttagaaaatactaacttttaaaaaaaaaaaattttctttattctttttttgtgcaattgtcatcatcacattaaagaatgcaatttttttaattaattggaatgtttgaaaaaaaagaaaaatatgaaaattttcaaaaattcctaattttggactaactgttttttagagtcaaaaatttttgaagcaattctgaaaatttctttcatcttccaagcacgaacctgttatacatgttagttgtctgatcactgatcacatctctgatcataggatttattttttctatgaatttaataaataattaattttcttaaatctgattgaataattaatttaccacaggacattgcattcgaatggaatggaaatgtgacggctctggcgactgtcgaaatggcgaagatgaaaaagattgccgtaagtgcatttattaattaactaataagttaattagcattattttaaaatggagaaaattgttgcttttgacaaaaaattggtcgaaaaatacatatttaaaaaatattttttataaaaagttaaaaaatccttttcccaagttaaacaggagaaagagaataatttttaaatctcaattaaattaatttagaagcatacagaatttgatttttaagtcgaacaaaatcgatgaaacactgaaattgttgtaaatgagcagtattctgtacaaatttacagttttctgaaccgtatcccatcaaaatgttcatcaaaatgcaaaaaagcaataaaataatgaggaaaaatatttgtattaatttaaaaaaaatatattttaatatttttagcccatcccggatgcaaagccgaccaatggcaatgtgacaagtacgaatggcattccgtctcctgtattgtaagggaaaaaaacaaaatgccaaatacatttacataattcaatttttttaaagcatgaataccaacgctgcgacaacatcacagactgttccgatggaagtgatgagcgcgattgtcgtaagtttagatttaaatttttgttagacattgtttaaataatgataaaattggaaatttttacagttaaataagcccctagttacggtaaaattattttaatttttagggtaaaacaaataattttcaaaattcagaatttttcaaatttcttgcaaaaattcttgaaaatttggaaaggatggagaagggggcgggcggggacgatttggacgcaataaaaataaaattttaatataaaaaacaattcaaatttgaaatcagccaagggttcaaattttatgaaaaaacaaaattcagccgcaagtccggtgaactgtgaggtgaatgatgggtcggtgttcagctgcgcggacggccgccaatgcttcccaattgcacggaaatgtgacggcaactacgactgtcgtgacctcagcgatgaaaaggattcatgcgcaacaaatcatacggtaggagatcggttcagagggtgctgggacgttagtcaaaaaccatcaaatggaaattttttgacagaaaattattcataacttcacccaaaatgaatcaaattttattatcttggtatttttagctaaccctaagtgttttctattatcctgcgaaatttcaaaaaaattcattaagtttcaaaaaagttatcacctgagaagttcaaaaaaccaagtttttttcaatatttttggtcataacttttttaaatcttagcgcatttttttgaaattttgtaggctaatagaaagcacttagggctatcgaatgacatcaaaaattaaaaatttagttgttttggaacaaagttatatcaaaaaatattttcatttgatggtttttgactaacgtcatagcaccgttcagagtacctttggtgtacggtgctattttcccctttggtattcagtatgaaaaatcctaaaaataattaattttaaaagaattgcggggacattgaaaaaatgaagaaaattaaaactttaaaaaagagaaaaatctaaatcctcaaaatcttaaataattatttctgcatctcctttaagcctttcttttcgtctccctattatccctttaaaatttattgtgtgttttgatgtgcttttagaagagtaataaatggccaatttgttaaaaataatttaaaaattataaatttatgtttttatttataggcttgttttccttaccaatttcgttgcgcggacagaacacaatgcattcaggtcggcggcctcattaaaattggacaatttaattggtttttttttcacatttcagaaggtctgggtgtgtgatggaacgccagattgtgtgagcaaaatttaaaaaaaaaataaaattaaaaatatatttatttaaaattcaggcagacaaatcggtcagtgcgcgaagtttagtataaaaatttaaattgatttgttcaaatgccaggacgaaccttcgacatgccaatttccagcatgccaaactggcgattttcaatgtaaaaattgtttgattatttaattaatttaaatttttactttttttcattcaggcaagaatcgccgatgtgttccgcataaattccgctgtgattattacgatgattgtggtaagatatattaaaatttaaaaaatacgcataattatgtaactattattttatgatcaattctttattttttttttaattctgacgaatttttttgtataattatatattttaaataaatttactataattctataagaatatttatttacatttttaaaatgtttagttgaaaagatgtgttactaatattttaattttaattaactaattatttgtaatttgactttaaaatgttaatgaatgactttttaattaattaacaaattaacaaatatggtgaaaataaatacatttattgttaaataattagttgaagatttcttatttgttgttttaaacatttttaaatttataaaaatatattgtatattatttaaaaattttttttttataatttttccaacgacaaattttttttccaaaaatctttagtcaaaatcattattttttcctaattttctgtt

SEQ ID NO: 9109 - DNA, 4171 bp, Heterodera glycines
gcttattgaaggtcatgatcattatcttttaataaatgagattattcagtgcattttctgatcaactagtttttacagcttcgacttattttaccacgtacaattttaattaattatttaaaatttaatttttttaaaattcttattcccttttttgatcattactgctccttagctttgatcatcaatgattttataataatctgatcactttttccaggaaataacctttggtccacgcttggttgccaatctggctgtgttgcgtcgccgggcggcggtgtttgcacatgtccccagggatacaaattggacgaacgttttcaacgcacatgctcaggtgggtgtttgaaaaatagaatttttcgaaaaatttggaaaaatgcaaattttttaaattcaattttaagactaagaatttaagttttctactaattttctgtaaaataccttagagtaagtttcagttcttgcattttcttttattttttataattatcaaaataaaataatttcaaagagtccgcatttcaacaacaaaaaaaattattattttttagatttttactcaaacataaattaaatatatattttttttaaatacgaaaatttcttgtggttgaaaaaaagttttttttttttttgctaattgctgtccaccggttcccgcacagacatcaacgagtgtgccgagttcggctactgtgatcaaacgtgccaaaaccatcgtccgtcattcacctgtggctgtttgggctcctgttttcggctccaaatggtccaaagcatttcgtccgggcccggcaccggtggccactccaacatgtcactgcgcggctactgtgtgtccaatgaggcggaaaaaatgcgactgtttgtggcacggcgtgagggactgtaccgggtgaacccggccaacaaagtacgggttcgggttggcgccggcattgaattttcaactggaactggtcctgaatcctgcggcatttggatactggcccagactccccccgcccgaactccccaacttatactggtcccggaacttttttggcacccgaatgaaaaatgaatttcaatccgttcacgattgaaaatgccatccctttttttatttcatctataaaaagacatattttgtggctttttcaataacaaatcaaatgtgtccactttttttcgtatctgttttttgcacctttttgtgaaaattttgtaagaaaaatgccataaatcgatcgtgctctctaggattaatctttctaatataattaattcagctcacaataaaaataagatcaatttttttttaataataatatattatttttcttattttggcaaaatttaattgccaaattttttttttgcaaactaatagtttttgaataaatattttctttcaattattcatataaatcagaaaatattaaaatagtcatatccaactttatttttaacggcatttgggtattatttttttaaatatttttggtgttttaaatgtttaaattcatttttaaaggatgaacaggcggtgaaaattgcgtccggcgagttcatctatggcgtcgattttgactatgagcagaagaaaatgttctggacagatcgcatggcacattcactgttccgtgccgacatcactccgacgggagacattgaaaagattaaaaaattggacttaaaatcgtgagcattaaaatttttatccatgaaaaaaaaaactattttgtgggtttaaaagtcaatttttcttcattttttacaattttaatgggatgattttcaattttcatatatttttggtattttatttctattttggaattttcagaggaatttttatacaaattaatgacaaaaaaatatcatggaagatttctaaaaatttctttaaagaaagcaataattgttcattttctcaggctgatctatccacgcaatttggctgtcgattggatcacgaaaaatgtgacaataaaactaaattaaatatttaaataaatcgttaaaattaaaaaacaggttttcaaaaaattcaattaaaaatatgagaattataactggaaaatgaattaaataaaaataaaattgtaataccaaaattaaattaactaaaatgtcaggtctacgtgatcgagagtggctctcgacgcatcgatgtggtcacttatgaaggggacaagcggacggtgctgcttgcggacgcattaactttaccgttggacatcgcgttggacccgctccggggggacatgttcttctcaaatcaactccgattagagacaggtaaaattttaggattttaaatttaaatttaaaaatgaatttaatttattaactaaaaaataatttataatagtaattgaaaattaatttaaaaataaatatatttaattaaaaatattctttgaattaaatttgtgttcaatatcttatatttttatttattttgacattgaaaatggaaatatttgtatttaaaattttatattttttttattttgacattaaaaaagtatatatttgtaattcagagcatatttaaatttaaaattattattacattaggataaaattaaatattaaaaaaatgaaatttaattttaattcattcacaaaaatatgcctttaataaaaaataataattttcatttattttattttttttttgcaatgacctttttttagctcatatggacggaacaaatcgacgcgtgctaattgagtcccacactcaccaaggcaatttagttttttaacatgaaaaaatttaggcacccaaaaagttaaggatgcctctttttgagtacggtattaagaatacagtagtcaaatcatgagacggaaaaattgacagtacacagtctaattgccaaacaaacaaaagaaatttaagtgagcggtgtcgtagttgacattgcggccaaacgtgtgtattggagtgatccgaaagttgatcgggtggagtccattgactactcgggcaatgatcggcgccaaattgccagcggaaggtgaaaagttcaaaaaaataatattttaaatttataaaatatttcagcttttttaacttttattttgttgcaccccctcgatataatactaatgaaattctaaaataaaaatataatttttaaatttatatctcacgaattttgtatttcatttcttctgcagagattttgccccgcatccctttggactcgcaatgttcgaccagtttctgtactggacagactggacacggtaaataatatggtttcaaaattgtaatgtacaaaaaaaaattattttaatatataaatggtaaaaacaaattattttttttttcatttataataattatattaaaatttaatattattatatacaggatttcgtagaatttaatctttttttatgaaaattggtcaatttacagaacttctagaaataagacggaaaaatgatcacgaaaatctatgaagcatactttcatctaaaatttcatttgccaagaaatataattaattattctccaaatatttttttttttgaaaattttcttcaaaaattgtaagaaaaaaatatattaaaagatttatttttattagaaaataaaaattttaaattaaaagctatgttccataaaaataaaaaaaataaaatccactgtcctaattcagacttggcataatgcgcgttgagaagtttggcgcactgtcggaagtgatttggtttgttaaaaattaaaaaaaattaataaaaattaaaattttttgcctttgctaggtccatgaaggacagcaacgtgttcccgatgggcattgctgcttaccatccaaatgcccaaccaggccccaagcaaagcgagtgcttccagcagaccattgagaatccgtgtgccaagtccgactgcgagggcatgtgcctgctgagcaaggacagtgtcgggttcggagtcggcttccgctgcgcgtgcccaattggacaggtaaaatttatagtgccaagatggccaagagggagaggcatggacacttgggcaagcaatagtaccaaatagccaagtcggaagaggggatgatcaattggacaagtaaaatagtgccgagatggcaaatcggggggattgcggtatggccaatggacagacaggtagtagtgccatagatgaatggacaga

SEQ ID NO: 9110 - DNA, 1046 bp, Heterodera glycines
acaaattcatcaggcaagcgtttcagtatattctccccccccggcgcaatgctgaatcaccgatttcttcgattgccgcagacttcaaatatcgattgctaaacaagtaaattcaaaaataacaaaaaaaaattaaaaccaaaaattcgaatatacaaagaacataaaaataaggcaaatcgcattaactagcatttattaatttgccacggtgattcccaactcacaataacattaatctcgcgaagtgtcccaacaaaggccggttgtaagaagagttcagacccgttggaatccgcaacatgcacaggaaaaatggtgtcgatggacgcggggttggaattcagaatcaattccatggcgacagtcatcgattccttgaaagaaaaataaagaagggaataaaaacggaaaacaatgccttgtccaatcgtgcaagaacctctacgaaataagaaggaaatcgctgttcatagggcaaaatggcgagagtctgaaggatctgcccgatttgcatgaggttaaaacgagcgatgtgactgacgacaaaaaaggcaattttaattggattgtaacggaaaatgcagtgacaaaaccttatcggagtgtcggagattattcccaaaggctccggattgataaccgccgaacacaaaaaataagtaaagatcaaatcagtgcatatcagcgcagcctaaactttggcattcccacaaaacgaaggaatgaattcgaaacggacacctcttcccggccaatcatttgtttctcaattaacgccgtgtacatttggccgacaagccaagtgatgctccgcggaaaggaaggcattgcgttgagaattgctagtgacggaaaagcaatttaattgtttaagaaaataattttaagcaatgttacatgaaacgaatttctcagtgagaatcaccagtctgaatttgaaaatgaaaatggggggggcagaaaatcactgctgacttgtccacaattactcgtctgtgctgcgccaccttctctttataagacttggaattttcgtcggagcc

SEQ ID NO: 9111 - DNA, 3213 bp, Heterodera glycines
tttctgaaaaaaaagttaagcctaaactttttggcctgtttaaaaaggaattaaaaatttttaaaaattttattcatctccctttttgatagaaaaagcatcagagtgcctaaactaacatgtaaataaaatctggtgcgtttcagaaccctttctgaaaaaatatttaagaattaattttgcaaaaaataaataaaaacgaaagactcagattttcgaaaatttttttgagccagctagctcggcgctcatttcagtgtaagttagtcctttaccggggagtatccctgcaaagtttggtacgcttctgctcaattagcaaaaaatatgagtgatcgaattttcactaaaaaagttaagcctacattttttggcatatttaaaaagcaattaaaaaatttttaaaatttaataattttcctgcaccgaaggtactcactcggcctcttcgcggcctcgtggtgggccttcgccccccccccgataattagggttagggattccttttttaggcaaatgcctaaattttttgcgcacttgatacgctacagataaagcacgaaaaaagcgttttctgcttggtttgggatgtctacgatgacttttataatgcctattttgttgttatttcgtcatttttggagcttttttcaggactttcgaaaatttttttaacaaaaatacaataaaacaaaaaaaagcaatttttttaattatttactaatttcatttacaattgaaatataatcaaaagaaagttttttttatttacccatctaaaaagcggtaatatatatatatatatttttttttttttgcctattcgaggattttgtgcctattttgcgattttttgtgccaaaaaaggaatccttggtaataataatccgggatatgtatcgtattagaaaaatgcccactttgttggagaaaagctcctcggaaaatgatttgtaaatgcgtgaaaatgccgaattgcctttacgcagcaattttcttgggtctgagctttgtacaagttgcagcgttattaaatggcccaatagttcgagcacatttttctcattctcaggaaaaacgcatgagccgtacattacgttgaacaatgcaaaaccaagctcttcactcgaatactaattgtacgtttattttttatatagtgtaaatattctcgtattacctgcgtaggaatcttttcagcggcgttaataaatgccgcaactgcacggggggcacccattaagagtttaaaaacatgactaagctcggcggcatgttggttaaggattttatgcgcttcaacaaaattggaagaattcaaattgctgatcaattgacaacagttgtccggagatacacttaaatcggagttgatcaattgtcgtaaaatcccctgaaacaacaaatgacaaaacattttgtgtaatttgttgttggtgcctgtacctgctcatgacggcacatccaagccaatctgcatatctccgaaaattgacttttaacctgttttagcaatgtttaaaggagggaaaataccagtgtgaataccttcgagttaaggttccgcaaaacaatttgctcgcaatcaattagtaaacgttcagaacgaagtctttcacatagtgaggaaagttcagcgaaatttgcaaaattgttgggttgttttctgctcatttagtaataaaattcgaatatttctaaaataataaataaataaattttagagatgaatttttgagaaaatcacttactatatattaagcgagtaatagccccgctccttttttagctttttgaattcgcgccgaaagtggtgttctgtttacacagaggaaaagaaacagaaaataaaaaaatataattggagactaatgagaaaggttgggtagaggagagagtgcagtgtttgtttctttgtcggcgcggatgagagggtaagagttgggtaacgcgtgctagagagcagagagagaaagcgaagagagaaaaagcgaagggagagagagggagagagagaaagagagagagcgaaagatagagagagagagcagagagagagagatgagagagagagtcgacttttatgcgtcccatcaatttttatgcgtccaatcaatttttatgcatccaatcaaattttatgcgtccaatcaatttttatgcatccaatcaaattttatgcgtccaatcaatttttatgcgtccaatcaatttttatgcgtccaatcaatttttatgcgtccaatcaaattttatgcgtccaatcaatttttatgcatccaatcaaattttatgcgtccaatcaatttttatgcgtcccatcaatttttatgcgtccaatcaatttttatgcgtccaatcaaatttttatgcgtccaatcaaatttttcattaaaataaatccattaaaacaaaaaatgcactataatagccaagtaacatcatggttttttatcacaaaaaaaaatttgcaaaacaaaagggttccccccttgttccccccttttgaaaaaattttcaaaactggtcacttttaacatagcgcctttcagcatattttggaagaaatgagattaaattaccccgtatagtttgaactattgagaaattttgtaaaaatagattagtcaatgacggaaaattgtaaatgtactgaaattagacaaaaaaattgattggacgcataaactggacttgagccgccgttttttctgctaaaataaaaaactagaaaatagttgataacaatccgaaaactagcttaattaacaagcgacaaacatgttttcgtgcatttcaggcactgggagcttaggaaaaaaatagttatatcatccctacgtatgaggcgggggtctggagtcagcttggctgcggattattttttatgatgtttgatgagaaatcatagacaaaaacattgattttgcgaaaagaactcaaattctcagcgcatttttttaaccccattcattcggaaaaccttttcccaaattaaaataaaaacgatttgatcattattttgactccttttttgtcctcaatgtaagaggatttttctcttttgtggactttttctttgacaataaacaataaaaggttacataacacacaaattaagcaaaaaaataaatattaatgttataaacatctatacaaattacatacttctctctttcaagaaatatctgaacaaagcaccttcttcctgga

SEQ ID NO: 9112 - DNA, 889 bp, Heterodera glycines
  unsure (1)..(889): unsure at all n locations
ttcaaagaatattattctgaaacaaaagccacccttccttctctgtgagattgcacgcacncaactaaattgattttgattttaagtatttactaaacctaaaaaataaacatacggcctcaatgaatgctttcttttcagaatctgcacgtgttgtccaaccaatccgcaggcaatttgaatcaactgccatcttaaatttaatttctgttattttttataaaatttcacaaatgagaacaggttgagcttcgctcgatacttacgattgtttaattagtttataggtttgactcaatacgggttccccattttccattagtcaaaatttcgattctcattggtaaacgaacaaaagtccgtaaaaatttataactacacgaaacacaaaaatatggtcattttcaattttggttacgggcctgtaaacataataagatttaagcgatagaaataccacattagctcgacaaatgaagtaatggttggttttcttacttttaccagctccgccaccaatttcttttcgattccctgtcgctgttggtcagctctgacgcgtatattgtcgatggttatgtaaggtccagtccaagttgaaaatgcgcaacgatgaaacaatgccatgccaagaatggcaccgtcggaaacattctgggcttgaacaacacaaagtccaaaaaaacgacgcatcagtgagaatttcttttcggcagaagtcggttggatggaaacatccaatgaacgccagcactgaaaattgaaacgattaaagaatgaaggaagaaaggagaatgtgacctcgatcagattcacagcggacttctcattttcagcgtccagcgaaaaaacagcaaatttaatatgcggcaaacactctaaaaaagaa

SEQ ID NO: 9113 - DNA, 1004 bp, Heterodera glycines
gagcgctatgccggccatcggattgctgccgcgtcgccctttctcagcgaatggcggcgcagcagcgaggagcagtgcctggggtgtgaaccagcgggaatttgggtgtcataacaattcatacaaaaggctcttcgtaaaattacttgggttaggcttaggcttaggcctaaactttaggttaggccgaagcttaagcgttggcctgggcctattaagcttgcttgggcctaggcttagactttattttgtgaaatacgagtttcctcttgtacgagttgccattgtgacccggggcacggatttattttgtttaatttatataaaaattcagaattctgcgtccgatcatcggttctccagaaaagcagtgatttaattataatttttaatttttgtagagccgttgcggtgccattgtttacgacaaaggagggcacatttgccactatttcatctcatcaggtaattatggcaaatggggcggcagcactcttggcatagtgccaaggaatgggaagctcacgatttgtatatggatactcgagagccgaaatctctgagactcgagagccttgattcttgagcagtctattttttttattattcggtactccgcctcacattcgtcttttgcagcgcaatggaaagcccacaaatccaatagaaaaaaaaaattaatttaaatatctttaaatttccttaaatatttttaattttattaaaaatttatctttaattttttgaaatgggaggtggtgccagttttaagaaacgcatcattaccccgtcaaattcgcttaagattcgcccaatttggtacgacaacgaaaatttgtatatttgcgtgtcacagatcgcaactgtacaggtggtctattaaatggccaattaatgaataaataaattaattaatgattgttgcaaagaaaaacatttaacggccatttttaagtttgatcagatcagtaggcttatattgtttaatcagcagcagataaatg

SEQ ID NO: 9114 - DNA, 2336 bp, Heterodera glycines
caaaatgacatcatccgaaaaaggaaatcattatgccatccctgaaccaaaaacaacgagaacaacaacaacaacttctgttggcggcaacaattcgaatgccaccgattattatgaaggtggtccttaattacctaattagttaacaattatataaataagtgcgcatattcgtggattaataatcaaatgatcaactgtattggtggtttttaattgattggactttttttaattttaaaaaacgggctcgggtcagtcgagcgcattcaattcgattcggaaggactggtgcggtcagtcttgaaatttgacggatggtgctgaactgatcgctctggaaaagtctgcgccgagttggacgcgttccatacaaaagcagacaaataattcattcattatctgatgataccaacgcatactttgggttaattacccactcactaaaagttgtcaaaaaagttcagcacgtggcagaagcagcagcagtgccatgccaacaatcggtgcacttttggccgagtttgatgacgaattggccaaacgggcacaaatggcactgccatcgccatcacaagcagcaaatgccatcgaatatgaagcccttttgttggacaaattggccaaaaagggtccgctgcaaagtgagcgtgaaattcggcgaagtccgcgcatcaacgacagaggcggcggcggagatcaaaaaagcttttggccactccaaaatgccaagatgttgatggaaatggatgaacaacaacagtttaacgaaatgattgtgtcggagaaggagggacgacagcacatggcaatggccaagggggaggacaacgacagcgagcagtccataaccgctggaggaggtgggatggacggacgggcggaaggctgctgaatgaatgatcagtggggggggggggattagggctggaaaaggccaaaaatggcgcggattggccatgcccgggattatacctaaaataatcttaaaattacgagatttcttagttttgccatgccatcaggtaccgggggaagagacccaaattgattcgcgatgagacaattgctaaaaaagttatccatgaaaattgcgaaaagacgaaatttttgaagtttttccttcttaaattttttccaggtttgaaaatctttaatattagtccttttttggctaaaaggctacaaattcctgttttttgctctccgccagcgttgaaaccaaaagaattgtaaaattcatttcgtatacattctgaaaacgtattgtcaaattgcagaaaacccttgtgacaacaattcggagatgacccatcgcatttggttggcggtggaaaacgcgcgactcgccagcgccgccggcaccgaacgaatgccgcagaaggcggccaagacgccgcgcgagtgtgtgcgcgtgtgcacaaatttattggtgagttaattaataatagggatgtgcgagaatctcgatctgagaatttctcgggtttttcgcttctcatctcgtttctcgggattatttcacggtaaaaatcttttcgcacatccataattaataagcgcagtcgggcgcggcacgtatgtgtgaagcgggtacagtaccgactaatcctgctgcaatatttactgaactaattgacggaaacagtgaaaaactgtgaactacaaataatccaatgggattaaaatgctaaaaattacctagaaaaataagcgagtttaatttatgacattataattagtccattttgccactaattaggctaattaaaatccatttttgtttatttgtgctttaacgcaggtcggcctccgtccctgcaattcatttactttttacgaacacgaaaaacactgcgtttttggccattcgggcaacgcttttccatcgcgtggggcgctggagagcattcgcaacggcgacttttcccagcggacatttcgccaattttgctacccgggtaggctttggttgattgattggtccatgcttaatgtcctgagatcagagatttttttgtcaccatttcgaggccattttgtccctgacaattttgagacaattaaaaatggcataactttatcagatttttcttaatcagttgagcaaaagtgatcgggaaatgcgtcaatgagtgatacagtactattcagaaaggatacaggaaactactgtaacttctttttgtaaaataatgtttctctgacccattttctgggatgccgtttcattttcttctagtaaaaatagttgagaatggcgaatttaaaaaatgggttcctttccaagataattgattattttttggcactatttacgtataatcttgatcgag

SEQ ID NO: 9115 - DNA, 1830 bp, Heterodera glycines
  unsure (1)..(1830): unsure at all n locations
ctgtattttgaggtggaaattttggaagaaatntgntaataaaaatgatttgtattttccatatttatttctttttcagaatggttgcgtcgaatcggccggagaaatcgcagaaggttttggcataaaacaacaattttgcaaaaaattaattagaaatttatttgctcaaattaagagacaagtcaaatgggctccgtgcgaaggatgagaaagaaaatatgagagaataaaatgcataaaaataaatatatcagagatttaattttttccaacaaaagcaaataaaaatcctaaatttacgtggcgttagaagcagaaatgaattaggaataaaatttagcattttctggagaaaagtaccttatttcggacaactaatgattcgaataattaaggctattaaagtcaataaaaaagttcgggtttcgtttctttttagaaaacaacgggaatatagaccgaaaaggtgtccaattataaatcattttcgattttgccaattcgttttttgactttgacctcaatttattattttcacatactttttgtcttttattcctgttatcatccatatattttgtcacttactccacgacccatttatctgaatattcgtcagagtaagtgcttttcgtccttctatgacttatttttatgaataaacaataaacaattcctaagagcgtctctcttctcctctattttttgttattcatttccccatcttttctcataaacaaaaacatcgccgtccaatcgccggttacgccgattcatccccaattccaattttaccctcacaaaaataaaatttggttgcagcattttattttacaaaaaataataaataattcaaacatttgtcagcctgtaaattaaaaaaaccattgtttccaaaaattatttttgtttacccataaacctgaatattcattcggaatttaatatttcgtgaaattgtgcaagggaaaatgccttttttggttgtcgttggtctcgtggtttggatttatgccggcttatgtgtcgcttgtgctgctttaacagtgaattttaatgcttattattagcgttaaattccaaattttgtgactcaaatttagtgatttatttcaaaatcttaaattaaaaaaaagtattaattggaaaaattttcgaaaattcaaatgaaaattcatggctgtttatataatattcatagttaatgggcatatgctacggcaatcaggggttggatttcttcagggatattcgaaaaggaaataatagtaaaatgagagtcattaaatagaaatgagaattcaaatgaaaattcatgggtgtttatataatattcatagttaatgggcatatgctacggcaatcaggggttggatttcttcagggatattcgaaaaggaaataatagtaaaatgagagtcattaaatagaaatgagaattcaaatgaaaattcatgggtgtttatataatattcatagttaatgggcatgtgctacggcaatcaggggttggatttcttcagggatattcgaaaaggaaataatagtaaaatgagagtcattaaatagaaatgagaattcaaatgaaaattcatgggtgtttatataatattcatagttaatgggcatgtgctacggcaatcaggggttggatttcttcagggatattcgaaaaggaaataataataaaatgagagtcattaaatagaaatgagaattcaaatgaaaattcatggctgtttatataatattcatagttaatgggcatatactacggcaatcaggaggggatttcttcagggatattcgaaaaggaaataatagtaa

SEQ ID NO: 9116 - DNA, 2925 bp, Heterodera glycines
  unsure (1)..(2925): unsure at all n locations
taaattttaatatttgcctctaccaatttcaaatatatttttataataatatttttatatatatttttactaacaagcattacgaatcaaattattttcaacacatcgaaatacgaataaaaaattactagaatttactccctaataaattccaaaaaaaaatcaaactttataatgaaatttaaagcttagtcaattatttaaacacaaaaagtattaaataattcatctaatgccaaaatttttactattttataattaataattttccgaaaataaaacaaaatagaataaataacaaatattaaatcgtcatgttattttagtaattttaaaaataaactaaaaaacttaatccagcaaaattaaaacaaagaaagattctttattaaaaaggaaaaaagaaatgctaacttcttgtaaaagatagaaattaagaatttcagccttctttaattgataacaaaatttttgcaataatttttacctttctatcatttgtttgcgaatgtaataaataatgtaaagtttcataacataaacacaacacaaacatctaatattttattttttacaaattttcagttcataaaatttgagaatgagttgaatgaataaaatactttattttaataaaattaattaatttcaaaaaatccactaaaaatttaccgagtccagttttgcgtcagggccatcgctgcgtccacagtcaaatgcgctaatgagagctgccaacagactaaatatggccaaaatcaaaattcattatttgaccaagttttccctgattaaaattcgctctttttttgggctatttgaaaccgattaaatcattttttcgtgatcaaaattttttgatttcaattttcaagggttaatttgtgtgagttgcctcaattaacataccaaagtgcgagccaaacgttcatgttgaaaatcgttgatttgaagagtgggattgatgagaagaaacggttggaaaattaatgcctaaaattaagcaataaaattaatgaaatgtcaatgagtacctccaaagcaaatgagtgagtgctttattggcatttctcttggccatatcgttgcttaaatacaaaccaattgcctcctcttgcctttgtcattgttttttaattatttttactgtgatttttcctcattaaacgcaaataattccacgcaaatatttaatgttcttttagcagtaaaaaattactggccaataaatgtgtacataaaagtgctgattgaagtgggccaaaactttggtgaagaaagaggttctttgtctccaattttccccacgaaattcgccaataatttggcgtaacatttatttttactttaaattaataaaaaattgctggccaacaaatgtagtaattaatagcatttgccgggcgagtgttagctgaagaaaaatttgttgtaattttacttaactcgctttgtcacttttccataagaatgacaaaagttcagtcaaaagagcactttagttttttgcgtcaattttaatttttctatgataaccgtaaaattctaattttttgaaaaaatcaaaaataaacttccgaaaacttccaatcttttttcaaaatttcagaaaaagataatggcatccgacacccaaaaattttccctcgattcatagggattgattgccccgcttttcccccgctttaccacaacaaatcattcattcattccttccttttcaattgttcaattgtctcaattcattcatcgcaaattccactttttccgcgcttttcatcgccacaaatttctccaatcggttcaccgatttctcagattcgtttcaattggattggctttttcacccctctcccgctttttgcgactttccccgctttgcgtagtcctaaaatattttcgcgccacaaaaatccgtttatttttagccctttcaattctttacgacctttgaattttttaaaatttataaacaaaaattatactaaaatgattctaagctttgtgcttatttaaccctttacaaataatttttccaaaaaaaaaaattttttttaattttattaacatattttaatacctctttgttggtttttgtgcatattttatacacattttagcatttttttatacatattttatttacatattttgtcatcgcttcgcagagcgatgacgaagcacgaaaaaagaaagaaagaaatgactaatcataaagcgaggacggaggccaaattgactgttatttaaccgccacccttttgccttttctgtcagttgaagcataaagagcaaatttgttgggcttttcaatcaataggcaaataatttaatattgttcatttaagcttgtaaaatttcgggttcctctggcggctataccagagaaggttcacttaatttattataacagtaaataagacgtaacaaagtggtgcaacggccgaatcctaaggcaaaaagtttgtgtaaaataaaaagagtgtagtgggtgaaccgttataaatgtcggaaccaatcagaacggctttagggataatggtcgagaatttaatcggtagactgaatgaacttctaccaattgtcagagcacagcagaggaacgaagagggattaaataaattgagagaagatagaatatttttaacagatttattagaaagaattgagcaaaaaaaccgtgaatgggatacatatataagagaaataggagaagaagctcagaatgaggaaaatgaaagataccgcttatttacccataatgggcgacatttttatgaatgggcagaaaggggaagagaaatggtcagcagaattaatattattctagctaatgaagatggagaaagtttagcagagagtgtgnnaatcataagaattgngcaaagagaaaaaattgaacagaaggaaatggcgacaatgaaa

SEQ ID NO: 9117 - DNA, 2522 bp, Heterodera glycines
aattacatgtttttgtagatgcatcaaaagatgcatatgcgacctgtgtttatctgagaagcgaagagaaagaaacagaaattcaacttttatattcacgcagcagattaaggccacggaaaatgaaaatttcaattccaagaatggaacttttgggagtgctaattggaacaagggcgatcaaatttgtgaaaacagaaattgggataacgatagatggaatgtatttatggtgtgattctaaaccagtacttagttgggtcaattcaaactgtgaccagcctcgatttgttgccaacagacttagtgaaatcaaattaaattatgggttggaatttgggtatgtctcaactgaacaaaatccagcagatgtggcaagcaggggttgtacaccaaaggaattaaagacacacccgttatggtggacaggaccagaatggctaaaaaaggcacagttacattggccaaatgaaatgaattttaaaattatacagtcaggagaccctcaagacaattgtcaaggatgccaaaagtcatttggcgtcattgaagacagagaaccggaaatggaacttattaattttaagaattataaagaatggcataaattagtgaaaatttttgcaagaatgcttaaaattgtaaataaatgggtacagttaattaaaaaacaaacaaatttaaaagtatcggaaggagaatacatcacgccaatggattacgaaatttctgaaaagatactcttaaaattgggtcaaaaaggatggaaagaatatgtcggaaaaaacaaccaaataaggtgggaaaaggacatcgatggattaattcgattaaaaacgaggattgagaggagtgcaacaccaaagtcatttcataatccaattgtatttccaaaagggtccaaaatcctggaaatccttattttaagagcgcataaaaatgtgatgcatgaaagagttgacgcaactttaaataattttttgagtgaattttgggcgcctggagttagaaatgcaattaaacaggttctgaaaaattgtgtgatttgtagaaagaatcgaggacctccttttgctctaccacccatgccacctcatccaaaatatagagtcagaagatccaacccgtttgagtttgtgtcattagattatttgggtccgtcagtaatcaaatcaaaaaataaaggtgaaccaagtggaaaatattggattgttttaataacttgtcttacaacaagagccgtatatttagaaccagtgtttgatttaacagcagaaacatttttacatgtgttaagaagattcgcaagcagacgagggaaaccaaaaagtataatgtcagataatgctcaaacatttaaattagccgcaaaggctggagaaatgtacgaaccaaaaaacacaaatataaaaaatgaagaaattagataattatttaactaaaaataaaattctttggaaatttattccggctttatccccctgggaaaatggatgtgcagaaaggctggttaaaatttgtaaagatgcctttaagtctgcattgggacgaattattttaaataaagaagaactgtgtacttttacggcagaagtcgaaacgattctaaattcgagaccaataacacatgtgtcaattgaacctgacggagaaagagctcttcgaccaattgactttattaatcccggagcggaattgggtatatttttgtcaaaaaacgggaatgagaatgaccaagattatagaactggtcaggcatcattagaagagagactaaaagaaaggtggaaacgtacaattagagcgttagacatattttgggacaggtggaaataaagaaaatttaattatgttgagaaatcggaaccaatgggattcacaaggtcccaaaatcacaaagatcatcgggaaacaaaattgggcgaagtggggatggttgaagatgatttatatccaaggaatacttggccgatgggacgaaatgcttaaatcgaatggaataccaggggtgattagaagtgtgagtgtaaaaatgatttctggacgagtggtggaaaggcccattagcaaactttatcctttagaagcatctcaaaaagaattaaatggtttaaacgaggaagataaagcaagattaattagggatgattcaaaaaaggaatttccggcgataagggaacaaataaattcaaaagagaataagcataaaatgataacaagagcaaaaacgaaagcaataaaattgggtctgctttctgtaattttattgttattaattgtaaagggcgaaagtgaaagggtgaacaaaaagattttaaggtgtgaagattgtaaattaaaatgtgaaaatatgggtatttatatgaaaacaccaattcgtatggaaaaaattcaaatttgttgtttgggaagttgttttacccatctatatacaaaagagttacaagataatttaccgaaagagcaattattaattgatcatgaaagaatagtaacctattgtcaaaaagaaaaagaaaata

SEQ ID NO: 9118 - DNA, 878 bp, Heterodera glycines
ttttggttatttgtgtgttttggccgtgctcagttgcctctttgtgccgtttcagcgccgaattccaaaatttttaattaccgcaattggcaaaatgttataccaagctgacgcacacaatcatcgaggtgggcaagtacagttgtagcacaaaataggtcatcagtcgggatagtcgcaaacgcatgcgaagacatgcgtaagtgccggtgttggtgtgcgaagtgcactccacgccggtgtcaatgtggtcgagaaggaagttgggcaagtcttggccaacgcctgggcaaacattcgaaatgcaacaacagaattccatttttaaaatcatttcgaattttaaagtttaatatgaatttaaaatttaatgctccgaatttgattatcttttttgtgtgtacgattttatcgtaataacgaaaatttacaatggattagtttttgttgtaaagcaaaaatttcccgaaaaattcaataatttcatttgaaaaagtgacataaaaaagaaaaaatcgctttaaattaaattgagttttcagtgaaataaattattatttttttgttacttcaaaaagaacattttttcaattttccttgaagaaaaaatgtttttatatttaaaagttattaaaactaattttggtaattattttcttaactttttcccattttcatcactttttagttaaatattttggttttttgtaactaaaatccgcgcccttcttatgcataaatttcgcgttttgagaattacacaaaaaattattatttatatttggtaaaaaacggcgattgctccaccataaatttgcttgctcttttacttacatttttcggcaaataccccccccccgtaatggaacttttggggc

SEQ ID NO: 9119 - DNA, 2893 bp, Heterodera glycines
  unsure (1)..(2893): unsure at all n locations
tcggtgcgcgtccttttcagtggggaaaaatgtatcgggtagccaaattcgcgcttcnacatggggaacagtcagaaattttgggggagatggactctgaaaaagagttaattagtgtaattaattaattttcaaaatgccatttgtgggcccaattgtgcatatgcaagccgtcggtccacccattgttcgcggaaagtgatttgcaagctgtactccatgtccaccacgtcgatgttgcttaacatgcgcaccagaatgttcacactgacacggacagctcaaacaaagaaaaacaacatcaataaattacttaatctctatttgaaaatatatttttaaaatttaattccttcccccgcagcgacaattttcaaacaaatgacaaaattaaatattttttaacaagctatagtggtaataagctattaaacatcctaattgaataaatttcccatatttatttaattaattagcatgctaattgaccaaatccccacccgtttcgtttgctcccgcttcgattggcggtcggacgcgtctgtcgtaattgcgcaataattggcccaaaatttgttggtctcttgccagccaattgctgtgcaatttgctttcattttgcttctgttgcagctgagtttgttgtcgcaattttgcataattttgaatggacaaaatgccgaaaagcggacaaagcgccgacaaaacaaaaagaagacaaaacgacgaaaacatttggacgaaataaaacaagagaaaaataatctaggtaaaaaataaaaatataagatagacagaatgaaaatgaaaattaacggattttcatttccgcgtcgaagccttttttaagaatttacccgaatgaaaggactaatttgtgaaagtgacacttctcggagttcttttgggacattgaattcttcttcgtgccgcatgaattgggccaaaattggcattttacagactgatgaattagcgggcatttgaatggacatttatttaacaaatggacgaattttaaatgtggaaacaataataaataaataaataatgaaataaaataaaattgacttaaataaaaataaataattcaagccggtttataaattgtattttgaaaaattaaattgattgataaaatagtattatctaattaattttattatttaataattttaattagccgttggaaactctaaaaaacaaatccttaactaataaaaataaaaattgacttatattaaatgaagaataaataatacaagcgttttataaattggatttaagattgataattaaagcgtataatacaatagatatatttaactaatttagcaattaatcattttaattagccgttggaaactctcaaaataaaatgatttgatagtgattttgactgaacggagcatctcacattttcattttcagttgagtttcgtgtactgttgttatgttagcaaacttttgtttgttttgtttgttcaccaattgtaaagtgtgtgcttagttagaccgactgaaatttgtgcagaaaaccaaaagcaaatatcgcataattgatcccaacggacgaaaagcgaaaattaaaaaaaggaaaaacatattattttagggaaaaagcattggttcaaaaatatgtttaattaaatccgtaaatgaaaatcaaatggcaagcattgattgactcacttcgagaagcaatttgagttgtcacttaaagctatttttaaaagacccattttggcttttcttcaccaatgctaatgacacaaatttcgcatttactctttgttaaattgacttaatttattaatacaaattaaattaatttttaggagtaatatttttatcaactttttatttctatcaatttgaccagttttttatataaaattttttaataataactttatattgtttcagagatgaaactttcatgttccaatttacactatatataatcactttgaattttactttatttttcacgaaaacgaacgaaattaaaaaattttaaatccgaaacgaaaaccaaacgaaaattttttgacggacgaaaacccaaacagaaaaacgaaactcaaaaaatgccaaaaaaggggacgaaacgaaaacgacacgaaatatcacacaacactgcccgggaccggagcagggcaaatgtcgccagtctaaacgtcgcctacaaatttttggaccataaattttttctttctcaaccaaattaaacattcttggtatcgtccgaaaacatttgaaagccgctattaacctcaaatcttagaaatttttttgttcatgtacaaaaaaaaaatcagggcaaaaaagattcaaaaaactcggtttttgagttccttctggccataacttttttgaaacttaataaatttttgagatttagcagaataataataaatacactgagcaattgaacaacaccaagaatgctgctccaaccctaattttaaggttcttaatttttccagaaaattatgaatttctgaaaagaataattcaattttttgttagaattaaattgcccaaaataaaatcatattttgaatcagcgacctataaaattctccgcgaaaatatattggccaaatattttggcacgaagaacagtaattttcttttatttttttaacaacttctatatctgttcatttaaattcacttgcatattgccatttgcttgccaatgactttccaattaagccaacactttaccatccgaatttggcatcccaaaatcgaaattggagacattttaaaagttcattaaataaattcgaaattggagacattttaaaagttcattanataaattcgaaattggagacattttaaaagttcattaaataaattcgaaattggagacattttaaaa

SEQ ID NO: 9120 - DNA, 1688 bp, Heterodera glycines
  unsure (1)..(1688): unsure at all n locations
cccccccccccccaattgctntgctcctccttcgccgcacctcatcaaaatcaaatcaaaaaaataattgttgtgcccaatttacacactaatggacaacgaatgtgtgaaggctgcaaaagtttcgaaagcattgctaaaaaacaaataaaaataatttttatccgaatttacattcaaattaaaaaaacattttttgaaactttttttttcgatttatcaatttccaaatatatataaaaacgagtttttctcatttttcgtcaattcgtccgaaagtcaatttgtgtgtcaacagtcaatcacataattgccccataaacaatttaaaaacatgaaaaggacagccaaaatatgtgtatttggaaagtgaaatcaaatcaaaatatgagttaaatttcataaaaatcataattttatatgaaatcttatttaatttaaataataattttcattttaataatttttcattataatataatattgcataacgaaatgaccaaaaatccgattaaataataaacataaataaataaatcactttcattgggcgacattttaacacgaattaatcttcttttgtcgctattttaacctccgcttttgtacacaatatgcaatacatttttattcattcacattatgtgcaaaatcaaaatcaacccacaaacaaataaataaattgatctaaaaatgaattaaaaaataaaacattcaaaatgaattttcaattttaattcatttaaatttttaaattaatttcgaatttttattcagcaatttatgccgcagatcagcagaatagaagtgctgccgacagatgctcatcaactaaatcttggacaaccatcaaatagacaaaatgaacgaaatgccattcgaaacagagagtaaaaaaaaataaaatattaattaaaaataatggatgttgtttacccgttggcactttgtgccattgtccaattgtcattttgccctaattgtgcccgcaggcatcgaccccctttgtgccgtcggtgttccgcttctggcgcaggcccccgtcgacgcgttcaactgttgccgacctttgaccgtctgttgcagcgaatgttcggcgcgtacacgcgccatttgctggtggattggcaccgcgcattcattggtctctctctattcatttaattattatttaatttatttaaattaatttataattttcccaaatttttcgaattgcttttcacttttccaaagtgttctcttttcagttggtcccattcttctgaccgcgctgttcagctgcggctttctgcgccttcgcgaggcgaccattttggacgccaaggaattgtacacgccgcgcagtgcgccgagttgggaagaggaaagaacatttgagcaggcaaatgactattctatacaattttagtcggttttacgggtcccatccaattggattaattaattacaaaacaggcatttataaataggaaataattatcaaaaaataagatagttgcgacgcatttcctccaaaatattttttatttatttttgtgtttgaatgataacgacgaattgagtactgactagagaccagacactgactaangntcggagggatccnntgagtgngatcccgaccgaatcccgatcccgattgatcaagaagattttggaaaaatgatcggggccggatccctaat

SEQ ID NO: 9121 - DNA, 5685 bp, Heterodera glycines
  unsure (1)..(5685): unsure at all n locations
ggggacctctagagtcttaaaaaatagaagaaaaaatgggagaaatttaattnttgtcacaaataatgaactaatgatgagagaaatttaatgtttattgaatgaaaatattacaaatttgctaaatcaaacagctaaagtatctttctaattcaacaatctgcaataaaaccaataataataatgagtaaaaaactaaaggcaaattaattatgctcaaaaatttaattcttaatattcaattgtaatatatatctcatagataaaaatcgcgccattttcttcttagttagcctttgctaattagtattaccctaagtaattttcaattagccgcctatcttttcgatagatgcgatgaaaaattcttaaattttattatgcaaaatactcattttgttttgttctctaaattaaatacattttagtgattgtataaaaaatttaagtttttgcataaatttaaatcggaagaaaagaaaatattttctcagcatttttcgaccataacttttcgaaattaatttattgtttttgcaggataaagataactattctatatatattcaaaaaaggtctttgttaatttttgagacaatccccaattcctaaaatattaagctaaattgtggatgatagactcttgattttatttcaaccacaataaatttcagaaaagaaatgctactaatatccatcataataataagccgaataaaggtgatggccagcgcgatgtttggtggcaaattgcaacggaaacatttgggcagagcgattggtggggagagaatggtaaagaaacacactgatcacttcgcgatgagtcaacacgccggacaaaactgtcaaaagcaacgaaaaattaaaaaaaagcaattaaagacgaaccaattttctctgaaaattgctcttttgcgaagagtggaaaacgaattttgaacagtgccgggccaagtgcggcacgacgattctcagcggaacattcggtgccattttggcggcatttttcgtctgcccaacggagtgcctgcaagaaataacatttttgcaaagtcaggaatttttgagcaaagcccctgtttctaaccccaaccccttttgccattttccaaaattctgggctcagatttttacttacggcattccaaattgagagttccccgctaatgttcaattggtcacgttcaagaattttagacaacaaattctgatcaatttgcaaaaatgcatcggaacggaacaaagtttccgcagttcgatcaatgtaatccaagcagcgaagggcaaaattctaaagaaagaaattttggctaagttatttcgattattaaagccatagttaatgtttaacacacccgcacggaaattttgaaaaagggtgaaattttgtaaaatttgccgaaccaatttaaattgtttagctttttaaacattttcaatatactatttaatgcaagtgagatgatgaaaaaataaagtttatgcgaaagtatgcctaactttaatgatcaattttgaaaattcacagaaaaaaaaatcatgaaaattccatagagcctaatttgatgttaaacaaaaacaaaatacataaaattattcggaacaaaaggaaaggtttcatatctcttcaagatataaaaaaaaaattttataatacaaaagggggtaaactgaaagtttggttcggaagtcccaacgtcacttgggtacatctcatttgtaaggggatgaaaatctagtcctttttttttgcttttcaagcatttatgccttaaaatttcatacattctcgttgagaaggcaagcttggtcataagcgaggaacacattgttcaattgagagattgggaagaccaagcaggcattgtccagcaaggagatgttgtactttttggcttaaaccatgtaataataaggtacttctgggttttgctacccctccccataaaatttatctatgactttcatcatatgattttgccggtgatttttcaaaaaagccaattgttgggctagaacttttgaaagaaacatcgaagaaccctgaaacaagtaccattcgattcatctcgactatgagaatcggttgatatttgagaagactggttctttttttaaatcattgacaaaatggctcaagtccagtttatgcgtcccatcgacttttatgcgtccaatcaaatttttatgcgtccaatcaaatttttcattaaaataaatccattaaaacaaaaaatgcactataatagccaagtaacagccggcctttttctcacaatttgtcggcaaaaaccaatactagccgctttttctctccgttcgttggcaaaaaacagccagccggcatttttctccattcttcaaactccggttgctatgtttcgacgagctatattactgctgacctgccctttaattttgtgtatggaatggcaaggctttatcattgacaaattcggatatcgaagagcgcaaccttggcattgttgcggaatttgtcctgacaataacaacatctatgacaaaggtcgttgtgttaacgaatatagctacgaaacggaaaccgatcgttatattcgcataaattaccccgtatagtttgaactattgtgaaattttgtaaaaatagattagtcaatgacggaaaattgtaaatgcactaaaattagacaaaaaaattgattggacgcataaaagtcgatgggacgcataaactggacttgagccgacaaaattacaggatgaaaatctgatcaaatcatagattttagtactttttatagcggacttgataagtgcataaaattatcgtagaaaagtgttttcctttgtcgggatcatgatatttttatggggaggggtagcaaaacacagaagtaccataataatatattaagggcaaattcaaaaaatttcacccgcgtaaagcactgccattgcgttgtgtccattcagtccgtttgaatcttccgcataaataaagctgagcatcactttgaacgcaccaacttcaatgtcgggcactttcacaacggcactttcggcagatgcttaaaaagtttttttattatttttaattttaccctttcatcacataataataataataattagggcgtccaaaaatatggatataaaatcgcgaaatatggccataaaatatggacaacaaatcgcaaaatatggacataaaattgccaaaatatcaaaatatggacataaaattgcaaaatatggacataaattttccgaatttatgggtaaatttccaaaaaaaattttaaagttcataaattctagtaaaatacatctaaaatggttaaataaggtataagaactcgtttttagaagaaaacaagcaatttctggagaaaaacgacccaaaaatcgaaaatttccatttttgcttatttttgacataaattaaccaatttttaagaaaatttaaatttaatcaattttttcgacaacatttcgctaaaaaatgactttttggaaaattttctggtctttaagggtcgaaatcccacttagctgatgggggccgttttattagaggttttttggaaaaaagccaaaatatggacataaatggcgaaatatggaaaaatatggatatggaaagtcatcctagacgcttcaaaccaagcaaaaaacatgtttttcgtgcgtttcagacctcccacagtccaggaaaaaaatatggatttccatataattggaagccctaataataatatttgtaccgtttttcgtttttccatttttttcatcaaaacggaacatcgcttcaaacacatcagaagcagtcatcataaccaatttgtgtgcacgcaaaagcttaagaacagaacaaatacaaaataaaattggggaataaatgtttaaaataaataataaacaaatattttaaattttaattttataaaattattttggaacccactcaggccccaggggtggagcgcgcatagaaaaatcccgcggccgcgcattaaaatttccgcggccgcggatcgagcaaaaaaaaatgccgcgaatcgcggatcgcgcatttattaaaatgtttccaattttttaaaccattttaaatttttttttaatcttattatttaaaatagagtgccacgggacagggaattttgggcaaacccggaaccgggacctttcgggttgaaaaaccgggaatttttggctgggaaaaccgggaaaaaagccgggaataaattttgagtggaatttgttaactgaatttgtcaaaaaaacggccaaatatttggttaattagtgggtttttagactgtttaaaaatgaaagaaaaataaaagcttgaaattttatttattaattaaaataatgtaaagaaaatatgaaaaaaatctattccgttcgagaatggaacccaagagacaaacactgcaggctacaaggttagcaactaaccacagggcccggatttacataaacaaatacttatttttgaatatattacataaaaaacaatcgcttcgaaaaataatttaaggctcaaaaaagtgacaagtgctcaccagagcaccagactcttaatccctgtaagaaaaatgaaacccctaacgngtggggtatggcccaaaaaaaaaggatatgggcaaaaggcgaggggccaaaaaatcagaacaacaatatacttgttcactttgcagtagcaccgaaatgggaaaacgggggccaaaattgggcacaatgaaaaaggcgagacgatcggcgacacgcgacagatgaaaagctgggaaacaaatttatttgcaatcttcactgatcagtgagtgagtgatcagcaggaacaggccaaggatattaattcaaaactataaaatttctttttttctgttaccaatagaatttaatttgttttgcaagctaaaattttaagacttaaaaaatagaaatttctgaatatttttagtaaaattttgaaacaagtattagcccttgagagcgaaaaacaaatcgaacccaaaattaatgggattgcccttaaatagcacaagattgctgttgaaattgacatgaaatttgtcattttgtcaacaatgtccttgggaatttgggaatttccctgatctgttcttggatttgctttctgctctgatctcctcaactgttgctgaaacataccattctgtggcgagacggacagttcgcattcggccgttttttgacgtgcgccatgggacagtgccgagttgggacccaaaaacagcgatttgtaagtgatttgttcggcattttttgatcagaattaccacctttacaattgcaaaaattgtgctgctcgctggcgcacactggtgatagcccgaaaatgggctgtcgttgctgatcagcagcagcagcagcggaggatgggagacgaatgtcgagaaactaaacattgagagagacaatcagtgacgactgattgttgcttaaactgcttaaatttagttaattattattagagcccggatgtgggcagagaccccgcggggattttgcgacggttcccacactcgcccccgaataatggagacggagcctccgcaaaaatcggcattttttaaagaagctcccgtccaaagcagtttgattaatccccgctcgtccaagtccccacaagaaagtaacagctagagcaggattaatggcataattagtgat

SEQ ID NO: 9122 - DNA, 1043 bp, Heterodera glycines
ccaggggtggagcgcgcacagaaaaatcccgcggccgcgcattcaaattgccgcggccgcgaccgcgcatcgcgcaaaaaaaaaaatgccgcggccgcgcattcaaattgccgcggccgcgaccgcgcatcgcgcaaaaaaaaatgccgcgaatcgcggtcgcgctccagccctgtcaggcccgtagcgagggggtggggaattcctaaaaaagaaagttttcggattccccactccgaaatttttttttgactacgggcttgggcccatttacctctttttcttctccttggccaaccaaaaagtgaatgtccgccccattagccgtgctcaacaaaagtttcattcggtccaccaatttggttgacattgaagtttctaattttaaatttgtaaagtaaaaaaaaaaatttaaaagacctaaaaagaaaatgaatatggaaaaagatacccaaaaggaacagattttctaattcagtttgttgaattttgaaagaaactttttgaaattttgcagacatagcccatatgctaattctctgcaaaaaaatactattttttttgttcatgaaaatgatttttcttctttcaatataataaaatcgataatgttattttgaaggaaaattgaaatgaattccttcgcgaaaatttttttgggttaattatgaatagggagcggatttgttaggtttttatttatttttactgcggatttaatccaaggagaaaagcacaaccttcgttttaacgcctctatccgtccctagtaattaatccctattttgggtgttcgccactaaaatagcggcgtccttattttggcacttttggcatttcgcccctatttaggcatttctgaaaatttcttatcgtaatgcaataaaaaaatacacacacaaggaccaccctcttgaaaaattcttcaaaatgttgggaaaagtaaaaaattttcaagttttttggacagaattaaaaaatcattaaatattcgcctaaagatgaaaaaataagccggaaagtcgaattttctgtatgaaaaa

SEQ ID NO: 9123 - DNA, 811 bp, Heterodera glycines
  unsure (1)..(811): unsure at all n locations
aaaattgnaaaattttagtgtttttagagttttcaatgattaaaattgaaaaaaatttgaaaatttgaagtttcaatgcttaaaatttgaaaatttgaagtttcaatgcttaaaatttgaaaattggatgccttttagagtttttcaatgaataaactgaaaaatttgaaaattttagtgtttttagagttttcaatgattaaaattgaaaaaaatttgaaaatttgaagtttcaatgcttaaaatttgaaaattttagtgtttttagagttttcaatgaataaactgaaaaatttgaaaattttagtgttcttagagttttcaatgattaaaattgaaaaaaatttgaaaatttgaagtttcaatgcttaaaatttgaaaattttagtgtttttagagttttcaatgaataaactgaaaaatttgaaaattttagtgtttttagagttttcaatgattaaaattgaaaaaaatttgaaaatttgaagtttcaatgcttaaaatttgaaaattttagtgtttttagagttttcaatgaataaactgaaaaatttgaaaattttagtgtttttagagttttcaatgaataaactgaaaaatttgaagtttcaatgcttaaaatttgaaaattttgtgtttttagagttttcaatgaataaactgaaaaatttgaaaattttagtgtttttagagttttcaatgattaaaattgaaaaaaatttgaaaatttgaagtttcaatgcttaaaatttgaaaattggatgccttttagagtttttcaatgaataaactgaaaaatttgaaaatttta

SEQ ID NO: 9124 - DNA, 2086 bp, Heterodera glycines
agcgcatccaattccttctacaatcgcctttatacatcccattatgagcgctaaaattatcagagtgccgaaaatcgcatgtgatctaagcctagcaaaaaatggtgtaagtaaaaatcgtaattacgctcaaaaagctcctcaaacaattttagcgcttccaattccttctacaatcgcctttatacatcccattatgagcgctaaaattatcagagtgccgaaaatcgcatgtgatctaagcctagcaaaaaatggtgtaagtaaaaatcgtaattacgctcaaaaagcttctcaaacaattttagcgcatccaattccttctacaatcgcctttatacatcccattatgagcgctaaaattatcagagtgccgaaaatcgcatgtgatctaagcctagcaaaaaatggtgtaagtaaaaatcgtaattacgctcaaaaagcttctcaaacaattttagcgcatccaattccttctacaatcgcctttatacatcccattatgagcgctaaaattatcagagtgccgaaaatcgcatgtgatctaagcctagcaaaaaatggtgtaagtaaaaatcgtaattacgctcaaaaagctcctcaaacaattttagcgcttccaattccttctacaatcgcctttatacatcccattatgagcgctaaaattatcagagtgccgaaaatcgcatgtgatctaagcctagaaaaaatggtctaacaagggaacctcgcgaactgtaactcggaaaatgggtataaatttggtaccattcgatagagcagggtcgacttctattgtgaatttttaattttacgtgcctatagcgaaaaataaaaaagttatgaggcctcaaaaaccctaattttcccctgtgttttcccttcagtgctggtggtcaagtggtgcagaatggcgccatggtgactggtggttcgactccgcgtgggttcaacaattcttattgtttttattaatcattttaaagtaccaaaaagtggtcaaaaacaagtttaaagcacgaaataattaattacaacggtgtttggcgagaataaaatgatcgaaacagagattattagaacaccaagcgcaccggataaaaggaggagaagtacaattttggcattcaatataaacatcaatttttttaaaacaatattcgggtggagtttcgaaagatgggatgtcgataatgcctaaaaaacctgacattttccagctatattgagtgaaagacttaaaaatgggtgcagaaaattggaaatggatttcatttaatacacgaccaatattttttttgcatttaacagcaattttttgcaggtgtgaaatcgtcaatttaaatttataataataaaaagagtattttgaaacggttataaataattgtaattactataattatttcgtgctttaaacttgtttttgaccactttttggtactttaaaatgattaataaaaacaataagaattgttgaacccacgcggagtcgaaccaccagtcaccatggcgccattctgcaccacttgaccaccagcactgaagggaaaacacaggggaaaattagggtttttgaggcctcataacttttttatttttcgctataggcacgtaaaattaaaaattcacaataaagtcgaccctgctctatcgaatggtaccaaatttatacccattttccgagttacagttcgcgaggttcccttgtaagtaaaaatcgtaattacgctcaaaaagcttctcaaacaattttagcacatccaattccttctacaatcgcctttatacatcccattatgaacgctaaaattatcagagtgccgaaaatcgcatgtgatctaagcctagcaaaaaatggtgaaagtaaaaatcgtaattacgctcaaaaagctcctcaaacaattttagcgcttccaattccttctacaatcgcctttatacatcccattatgagcgctaaaattatcagagtgccgaaaatcgcatgtgatctaagcctagcaaaaaatggtgtaagtaaaaatcgtaattacgctcaaaaagcttctcaaacaattatagcgcatccaattccttctac

SEQ ID NO: 9125 - DNA, 1274 bp, Heterodera glycines
taaaaatgcgaaattcgaaaaattaaatattcgattttcttctaagttcgggtccgggtttcggaattgttcgaaatgcctgtcaaattcgtgatcagcgaccccgaaaaccccataataaggtatttaattcaactttttttaaaaaaatttctaaaaaaggggggaacaaaccaaagtattacccaatttcttccaactaaccttttatctaaagcagatattttcgaaaggttggcgtgaaaatgaacgcataataggatggtgactcatcggctttgattgtattttaaaaagggagagaatcctcttgatacaaatactctgtgccgtatgttgtgaccattcgatgttttcatttctttatttatccattcgcatgtgattgttgttgttttgtttatttgcaccgaattaatcacaaaaggggggacgaatatcacatcactttgtatttttacagtcactcattttgcacagaaaatgccaatatactgtatgtaatactttgtttaaataaatgttgccaatttgcgaatgtgtgactcaaacccattggaaacaaaagagggtaaacaattagttgtcaatgagtgcttttcacagctcgtcgtgggatggctttaatttgggttccacgttttcgatgaaccattcgaacggcttgcagttcagcttctctttcagtttcaatcgttctgccaaatcgccgggatcggttctttttgctgctggtcgaattgcggtgtattttttctgaaatcgctgctgcgtggggggcgggacaaaaaacgcgccaacctcaaaatcgtccaaccaaacgcgggccgtcctcagcgagttgtacaggctcgagtcgacgcccggcttgccgcggtacgggcggcgcatgcgaaacacgtggccgacgcgggaacacggcgcgaccagcacctcgccaccgcacagccaaacgcggattgagaactcgatattctccgcgccccatatttccatgcccatgtcgtactcgccaatctcacggaaataatcgcgagacaccgccaaaaggcctttaagtgcagtgattggcgtaaccgatgagtgttttctttttctcatttctttgtctcctcacattccctctcccccttttttgaccatttccctttctcccccacctccactcattgctggcgttttgtacggcttcacattgttttcctccacgtcgaaatacgaccagtctgaaaaggacaaatgccatttggatgatttggggggggggggggggg

SEQ ID NO: 9126 - DNA, 1603 bp, Heterodera glycines
ctgatcagtccctgtcgttccgaggcctttatgaagcggattttgctttcccaattgcccttcgcaattttcgcatattccttcagtgagtcgccaatgtccaaattggactctgtgaagtcgtcgtagagaatcacttcagtcaaaagatgtgccggcgattcgttgaagattgagttgatctgtaaacaattggcaagttgttaacatccgtttgaatttttgcgttttctccgtgcgtccattagccatccattggcccattaattaaataattaattgccccattcgaatgcatttgttttttcggcctttctttccactgcaattaccattctgacgagcactgacagcatttcattgtggtaaatgaccaccacagtgacctttgagtgcactttggagaagtcaatctcagcgcaccttttcaaaaacgttgtgtactttttgtgatatttcaagattattctcgagtaaatatccattcgtttcgtccgtttgtccttcgttactcacttcggatgtgccattttgtccaactttctcgtcggtccgattttgtcgctcacccattggttgaagtaatacctgtgccgtactcttttatctccctctgtttgtcccccccccctctctctttctcctctctctctcccacctgtgctgtcccctctcccaatattccttttcgtctccgctttcctccgctggcgtgtctttggtcacattgcatttggagggaaacaccggcaaatttgcccatttctgcaactctttctccgggttaacccacggacattccggcaaatcggaggagcaaagggaagggcaaaagaaaggcaaaaggaggaggaactacgggagaagcgccattggagccgaaacagcacaagtggccgaacaatgagctaaactggtcaaattcgatattcaaataaggcggaggatgggcgaaggaatgcgacgggcaattggggggggggggaaaggacagcaaatgattcgactgcagcgcgttcattaagggacacccttttccccgtttagacgacgtggcgctgttccaccgattggtctcccgcgacgacaaaacgtgtctccaaaatgcgcgatatctttttccaaggtaagcacgaaacttctagaaaaagtcggcaacaattgatcgcccgggggcgcatggatgcgatgctccgctcgcagtcagtcacagcgatgcgcagatgaaagcagagggagagaagggaagggcggggagggagggaagaaaggcagtcactgcgcgatcagtgtcgatcagtcagttccccactctgccccccccccgacataatgaaatctatacactgacgtttaattccatccgaaagtgtcgatgatcaaagaaaaccgaaaacgtccaaaaaatttaaacagttttatatgcaatttaatatgaaccgaattgtcaattgtgaaagggcgaagaaaagacaaacagacatttggaagttgggaaatggaagtgtttggaggagaattcgaaatgaaaaagagacaagacaaatgaggaaaaggggagtggtcaacagctttcaggtaagctaagatgccatcttttcac

SEQ ID NO: 9127 - DNA, 1688 bp, Heterodera glycines
gtgaggggaaattgaagggtaccataagaagccgagataggctaatccatcattattgatttcttcgttctaattgtctctttgttaggtatgtttctttacctagactttgactaaatgttatttggctattaggttagaatagaaattcagctaattgggagataatcggcggatgaatggtcagcgagaggggagagagaggacaaagcgcgaaagcgatggacgatttacggacagtgagtgccattgccgttggtcagggagagcggccatgaaatcgtcattcatcttgtacattttcttcgttcatgaagatttgccaaagtttagtggtacgacaccgccggagggagtgccgccggggggtggtggcgggagatgctgttgttggtggtgatggaagtggacgggcggggcggccaacacggacggaggcagcgaagcgaaatggtggtgatgggcgtgcgattgttgaggagcggacgtgacaaaggccgtctgctgatgcggctggggcatgtgctggtgatgaccgccgcggcctccgaaaggtgacgccgttgagggaccaccgccgaattcgccgcccgcaccgcccccagccaacgaactcagctgattagcgtagacctgacaataacttggatttattttgggttcgcttcccacatgtattcccaccattgctgcctcgtaaactgcttgctgttgtgccaccaattgcgccgctgcaaagtcgcgcgcattcagccccgtcgtgccgttgttgtttgaactgctccgtcccgacgttgccatgccaaatgcgtttgtccctgttatagtgcccggctgatgcggaggatgagggaacccgtttccgaacactaaaatgagcccggatttgctatggcggaccattaatatcagtttgtttacttcctggattgactgttggataagcggtcaaaagcccgtggtgatggccatgcgaagacacggtcggcccgtaaaaaggcggcatccgcggcatatacgaagcgtaggcaagcaactgctcgggggccaacccgtaaaggttacgagcagccgctgcccgcgttttgttcaattggacggggagcatcacttccttgggttgggcctgaaagaaatgattcaatgggacggggggcaaatggaaagaaaaagcattggtacttacttatatgttatctgtgcggagattttcaaaaaaaaaaaattttttttgaaaataaatttgttttataggttttcggggtcgggaaaactgattctggcatctgttttgacccaattcgaaccccgaacccggactcgaacaaaaaagtcaaaaatccatttttcaaaaaaattcaggcgctatttaaaaaagagggcctttttgaatttttttttgcactttttttggtcgaattttttttatttattttaatataaatttgttttttaccagatggtacgtatttcacgctatttaataattgaaaataattttgaaaagaaaatttggcgatagttaaaaattgaaagatttttaatttatcaaaaaccaaaggggggacccttttgtttcgcaaaattcttttggcatagaaaaccgtgaatggacttttattcgccataatttataatttcattctccataattggactgctaatgtttagtattcattacgatgtgt

SEQ ID NO: 9128 - DNA, 1393 bp, Heterodera glycines
ccccccccccccccccgctcttcttgcgtacgtaaggcactcaccccgatgccgttgggtcgccttgtcaaacatcagcatggcatcttcaatctgggaaaggaagcaaatgcttagccatcatttatcaccgtttagtcctttgtcacctttccatattgcgcaaaatacgctttgatgtcgtcgagcgtcgaatttgaggagagaccgcctatgaacactttcttcgttttgaccaccattttcggctgctgcttctttggaaatgccactttcggatcgatccttttcccatccaactcatgacaatcattggccaacactttctcaactgccgttgggtcagcaaatgtgataaaaccaaagcctcgggcccgtttagtggtcgggtcgcgcataacctaaaagcaatggaactaaactgactgattgattgtgtgtatttaaagcccccttcccctcacattgtttcccgggtaatttgtttgatttcaaaattcttagaggattttgcaaaaaaagggacattcaaaatcaaaaaatgataatttttgaagattactctagatttaaaaaaatagttttcttttattgtggagcgactcaccatgcattcgttgacctctccaaatttgcaaaagtaatcacgaaggccctctgcaaagcaatggtaaaaataatttaaaaaacgatttcaattaccggctgaggtctgccaactcaagccaccgataaacgatttttctgaaagattttctttaaaaacccacaaagattgaaatcacagagtgccgcgagtgccgtgccctctctcccctccctcccaccaaccccggctcgttctgctgccctcccgcatcgctctccccactttcgtccacattcgttgtcgtcgcctgcgattccgcatccgtcgcttcagtcaatggagcggaactcgaactgccgccgccgagctttcgttctgctgacggcgttttctgcttgttgtttgttttgtcatccaaacattccttcgccgattgtttcttcggcactgagttgggcttaacattttgaagccatggttagttttattttcacaaaacatggcggaattaaaaaatattgggatatgtaactgtcaaatgatgcaattcgacgtggttcaaaccccttccctgaattccacccaacccccaaaattcaacttcccccgaattgcccgtcgtgcgtccacctggtgctgaagccgttgctgcactgtcaagttgtcgtcctgctgatcgctctcctcccgtccttcctcgtccttctcctccccctccgtctcttcgttttcgttcgcccccctctcattatccttccgtctgttcgcctcctcgccattcttttcacctccgtcttcactcat

SEQ ID NO: 9129 - DNA, 1640 bp, Heterodera glycines
aaaagccccagataatttgttaaaaattccaattctccacaaagcgccctaataaaattttttgattaatctcaaatatcttctggaccaccacaacccatagcttatctaggtagcgaagctcccaaagcgcgaagcgctttttcccagctaaatagtcgacggttcacgcacccgctagttattgaattatatatttacatattttaagtaaaataaaaatgtctgttgaagattaaatatacttcttgaacaattcattaaacaagtttaaaatatattgctgaaacatactatgagtataaatatgagttttaatattaaaatgagttttatattttaaggattttttcgttctttatttaataattttatttgaaatatattttaaggatagaatgaattataattatttcgatatatgtaatcttttcttattattttaattttcatttattttattaaaaataagaaattttttttaatattcacctgatgcggatattttatctaattaaggaattttttaatgaattatgtttattaactaaaaatcattaattcatttgtataattgatattataaacttaaaattgagtttaatagtctcttctcatatgatttttgttaatttttgtaatttttaatccaatttaaatttttaaatcttttttttaagtttttaaaaaacaaagagttcttttttgtttgttcgtttttttaaacaaattattatccttcgtattatataatttcaatatttatatatattatttaaaattacaatatataaacgaacgcgttaacacttttttattttaaaatcaaatgatttacgatatatttatacaatatgattcattttgaaatcttaatttttaaatatttacattttttcatgcattttaagactggtagtccaagtgtttttcacatgaagtttgctgttctttcttgtgctgtgagaaacatcgttttttggtattaaattgtatattttttaagtaagtctcggtatttgcctttttgatcgaataattagtatgtagaaaaaatgaacatcacaataaaagttttttatattaataaaataattgaaaataagttaaaaaagaaacatttaatacagcatcgaactacaataattttatatattaaacaataatcaaaaagatttaaaaaagtaaaaaatttaagaaaattaacaataacactaccaagaacaattagaataattattacaaaaaaatgaatagaaacgctaaaataaaagtataaattgattattttaaataaaatattatttattttttctttaaccactttaatatgatttaaaatcaaattttctgcgagtttgattgaattcttgaatcgctgaagaacaattacgaaagcataaaatactttattcagaaataatacctaaataaaaaaacaatataagacaaatacttaaatatattagtttgtatttttgcaatggaaaacaaaaaaacttcgcaatgcatcaaagaaaattatcaatgtaattcttttggggggtggaagtttgggcaccaaattaaggatttaaaaaataaaaatatttttatttgtctataaattgcaaccatcttatttaaaaggatattaaatt

SEQ ID NO: 9130 - DNA, 3140 bp, Heterodera glycines
  unsure (1)..(3140): unsure at all n locations
gcacaagggttgttaaaatttactaaattntaatgatttatataaccttttatatatttattttgttttatttttgaaatccctcactctggtgcccaaacttccctgcccaaacttcatgtcgccattcgtttaaatatttatttttaaaaatcatcataaaatatgttaaaaaaactgcaaaagacgcttcactgtggctcccggaattttcgacagcaaaggacttttcgatagaagcacaaaaaataataatcagaattactagagaaacggtttttacgttttttaactagaaaaattttaaaaatgaatccaaaaggatcggcccttaaaattttaaaaatagacttctaagaagaatgaaaaaattttctcaaaaatttatctccaattttttcatttattttattggtaagaatttcagattttaaaaattattaatctcaatactggttttggcttcaaagtttcactttaggaataaatctgtaataaataacaactaaaaagtttgttaataattaattgttattttattgaattagctataaaaatatgatttaagaaaactttacaaatcgattaatctttattaattcaaaaacaacaatattgaatcaatcattttttttgttatttatggtttttttcttttttgtttttttagtctagtttttttctaatttgatttaaaaaattttattaaaggttttttagtttacgtttgaaaaaagttttattaaacagtcatggtctatgattcgctgatactattccgcatttatttgttttcattattatgctcagaatctcgttccaaagcatgccacataacttaaatagttcgagcttctttgtcttttttatttaattgttttttaaattcattatatttacacacaaacaacttatttatatttattgattcaaggttgtaatattttatctttttatattattttaatgacattaatgagaaggcgtaaaatatccacttacgaattttttttattatttattggtcatatattgtaagaaataactgctttccaactttctccctcatctaatatcaaatctaattcaattaatttgatgaaaattaagaaaaaccttatgaataaaattatgaatttttagctttgcaaatttaattttcaattgaatattaaacaattgtcattttttcaattaaattaattattcttttttaattttagtgcattgataaaatacattttttcttcgtgttcataataattattaagatttatttttttcataaaattttagtggattataaattagtctaactgatttttgcttacaatataatataaatatttcaataataataatttttcttaaattttcgttgcattgtttgtcctgctgttgcatttatcattttagataaaagttaatttttttattttgttaatctttcgatttttgtgtgctgttttttgaattttggcttccatgctaatttaattatttctgattattaatatattttcaaaaataaggcttttgtatatatattgaagcttgtgattagttgctatttttataataattgtataaaggggaagagtttataaaacttacataatactctgaaactattaacccgggaaataattcaagaacattacaaattttggaaatatttaaacagggtaagaatttaccaaacatatcaaaattctgaaaacatttaacaaatatattttggaagttattatgaattattaatttttttgtttctatttttttatttagatttaaattttcttattcataagaaaataattgacaatgatctgttaaaaaaaaattaatatggctgaatatatttcgtttgggtttcgatttttggacatagttcgaattttgtttagaacataatatttaaaataattaagcaggtgaaccttttattgttgcttcagtcgataatatagtaatatcaaccgaatttcattgattatttctcacatgttaaatgctaatttttataaaatttaatgttcacatgattaacaaatatactttcacaataaattattgcttgcgcttacatgcccgttccttcgaaaatagttaatattcattttaaaaatttttatttttgggattcctttctctcgaaatattttattaatcattttttcgaagtttttattttaactcattttccccgtttttatttttaatgttttttgtcatatcattgttgatctgaattattttggcaacggaatcaacagcaaagtgaaaacaccgaaagggaatggccaattgaggacaattgttttttcgaaggctggggaggaattggccgactcaacaggtccaacgacgaagttgttgaaagccgacacagaacgaaaattgtcagccgttgatggcacaattacgaataaagctgcgtcaagtcacgctatcaggcctgttcaaaattgtagttttcgttttttccgcacattttacaggtcaaattatgatgttggtctgtgccactgctgattgtccacccttactgtcccttttggaagtcgaatgccctgccgatggatttgaagcgctgaggacatagctttgtagagggcgaggatgtcatatcattgttgatttgaattattttggcgttttgttttagtttttgtgaccctttattttattttttttttggggtatgtgtgatatatgtgctcttcctaaatttgtaattgattgctgtgtgctgttttattaattggaagtaaaagaaagcagtgaaaagagacagcgatttggttttggatttgggatacaattcccctttcccattggactattctttttcctacgacgtggcgctcctgtacaaaggtggctcagcagtggcaataaacgacaaatttggacgagcaacgattttaaaaggaaaagtaaacccttctgcaatttgtaacagtaaaagcaaatcctggtctctggaaaagggaaacaaatccctaatgaagtttcttcattggttgtggccacgaaatcaataaaacggtaaaactaaatccctctgcatatcaaaaaaactcaacttcgaaaagagaaaagccgtaaagtgtgaaacaaatcacgaaaattgtcag

SEQ ID NO: 9131 - DNA, 1510 bp, Heterodera glycines
gctagtaataaaaaataataattctcaactatgagcaaaaaattgacataatgccataatttaatatccaaatatgttataaattcaaaaatttaccaaatttcctttgattattttttccacttttccaaatgctcattttcaaggacgtccttgcatccaaggacattttttattttcaagaaagagggcccaatttcaaggacgtccttgccattcaaggacggatcccatccctgatttataatatttgcttattgacctctaatgcacatacattattaattaatttttccttttttcaaacaataaaatcattattattattatttataataaaaatcattaataatattcaaatgtcaatttcgaatgattcgacaaatgacggctttacaccaccagcagcagcagctgatcagcagcaaggttgagaagagatcaattattatgacaaggaaaaaaaataattaaaatggtgctggtgcattcctaaaaaaccaccacccatgcgcgtttcttaaatccgccaaaatgggatatggcagctcgtttcctaaaagcgataaatgttatacgtgtatattttattgttcgagaaaaaccatatatcagaaaacatttgaataaatgactccatttcagtgttttgatgaaaattttaaagaatagcaaaatattttcgatctttattaactaggcgtctgagggcatgcgtgccgagtttagtcagccgtttgtttacaaaatgaaaaatacaaatggattatgttttttaaaggtttcttcagagagtgttaagattaaagttgaattccggcccaaaattcgcctcaattttgtcttcggaatcgtgcaaagtgacacaagtgaaaagagggccatcttcagaaggaaaaagtgccacaaaatcgacggaatctgaaaaaatcccattaaaaatgccgttttagtcatttgtcaacccaaacggtgtccgtttttcgtgaaaaaatttggtgcgttgccaaaataatgccacagccgatgacatctccgatgccaaatttggcactttgactgccaatttggcaggaaccgttgacccaaaaaaggccatcgcttcggtgtccgtaactgttaggataagtgccaacccttccgtacaatggcatttctttggtcgcaagtccaatcattgcgcacctaaaaattattataaattataaatttaaaatataatttttatttttctaagatttatttacattttcatactgatgattttcatttcgatgtaagaaatggacgaatttgtgctcagaatgcagacagagttttgtgaacattgagcgacttcctttcaattaaaataatcgtatttaaagtgattttaattttaattattaaatttctttaataatttttttgttaatttgtgacaattacctcttaagcgatttcctttgtattggaccatcaaacgtttggcaccaatgatttccaattctctgggccaaatggtgccatc

SEQ ID NO: 9132 - DNA, 2800 bp, Heterodera glycines
tttctgtttggacttagtcctgaatacccggcttagttgggcccgaaatatcaagagtcccgtctaattctgtttaaacgcataaaatgttaagtctttgaacagaccgagccttgtaatgatacaaataatacaaatgcatgacattgataaagaatgaatggtaatgagtctagcaaaataagcaggttaattgagcggatactcgttcaaaaatgttcgattcctagcttgattaaaatttactatgcttttaaattggatgattgcaatttatagtcatttaaaattatttttatttttaaatccttaatttggtgcccaaacttccccctccctgaaaaagccctgccccggcgagtgtccggtccaaattttgggcgcgagttaaacttttttgaactgagcgaaccgggcccattccataatttggaccgggcattctccggccgggaattttcgtagcgaattttaatatcacctgatcacccattgacaattcaaataatataaattaaaaatcgaacgatttgtggtgatcagtgatcgaaagccgacaaaaaattatgaaaaatttaaattatccatcttatctttcgcatattaacattaagctccaaccataattctttttatcaatgtttggattaaaagcattccctctcccattttttaggtcatcgttttgctcaacagcccaagcaaaaaaaaaaaaattacttttacatattaaaaaaaagaatatttttaatgatgggtcatcattttgccgtaattactttttgccgcccaatgtcagcccataaatagacgggagatttagcgcaaacagaaaatgttcattcattcatttatatgagctgatgaattttattttccaatttgtatattttctaattattaaatgaaattttaaaataataaatccaacaatttttaaattttagtccaatcaatagcttaaaacgaaaaaatgtcttcaaatttgatgggttcgccaagctgctttttccatccaacagctgagcagggtaagagaaattatttaaaaaaaaattacgaaaaatggaaaatatttttttaaataaaaataaatttaaaataaacattttatcactacaagcagcagtggcagcagaagaagtggacaaatatgaagtgttcagttggcacggagatttgagcgaccaattggcagcacaatttttggtcactgatcagcagctgttgaaggtgggacaattcaaaacggacaaatgagcaaagagagaagaggacaaatgagcacagagagaagaggacaaatgagcacagagaggggaggaagggggaagagaccgatagattcagtaccgggcaaaaggccgacttattccgagagcaattaggaggcattttgccaaaaatcattcaattaatgagtgaatggaaattggaaattatttagtggattgaaaatattttttaatttaaggaatgccgcgaaaaacttgccaactccgaattgagagagacgaaattgctgtgcaaaaacggggaattgaatgcagagaatgtgagaaaaataaaaaataaaaatgaattatttaaaaaagaaaaatggcaaagaaggggtaaaaaacagaaactttcaaatttttaaataaaattcagaaggcgcttaaagcagagttggagaagcagaagctgatgacggaacacagtcaaattaaggccaaagtggacaaaatggagcaggaaaatcagcagcaattggacaaaaaatacggtaggaaaaatttaaaaaaaaaacaaattatttccattaccgtattcggtcctactgttaaaatgaatatttcaaaatgatttcagtttcattcgatgtgttcaatgcattggtggagcgaatcaaacgtttggagaaccagcagctgaagcagaacaaagaggaggacaaaaagggtaaaaataaattaattaacggaccgaactttacatatattgattagttaccaaattttaaattaacattaattagctaatcagttccaattattttcatgttttgttgttcaattggatactcttttagcagaggaaaagcagcagaaggaaagtgttggtcaacagaaattggatggaaaatatgccgtggtggacaaaaacaatgttttgggtgggcacaattggcaaattattttaaaaattgtcattaataaattggcgctatttaaaaaatgcggtttttgagagggggctaaaccaaggttctgttctgttgaattttaacctgtttcaaaagcgtttattagtcaaaatacactatctaaatctaaatgttaatgagttaatttaactttttgaaaatgttatttgaattgctttagtgacgtcatcgggcgaccaatcgccgccggcggttgtctcagcgaaagttgcaaaggtgggaaggaaacataattatttcacaaatgccattttaatttcaggaagtgcctaattcgaagaaacaaaatgattgggatgccaaagtttgccacaaagacatcgaaatcattggggaaaagcaattgacgatcaattgcaagggcaacagatttggtaattaaaaataaattaaacaatgtaatttattattatttttttttaattaggatggcgctctgtttttgcgaaatttcccatcacaaacttttgtcgccccggcattttctacttcgaaatgaaaggcatcaaataggaaaggtgggcatttggaggaagaggcaacctttattaaaggcagggttgccagattaaaattttaaaaagcctcatt

SEQ ID NO: 9133 - DNA, 2134 bp, Heterodera glycines
ctattctcctgcgtttcatcacccggactcattctccttatttcatcactgggactcaaccctccagcatttcaatcactgggactcaattctcttgcatttcaatcaccgagactcaaccctccagcatttcaatcactgggactcaattctcttgcatttcaatcactgggactcaaccctccagcatttcaatcactgggactcaattctcttgcatttcaatcaccgggactcaaccctccagcatttcaatcactgggactcaattctcttgcatttcaatcactgggactcaagacaccagcatttcaatcaccgggactcaattctccaggacttcaatcactgggactcaagacacctgcgtttcaatcacccggactcagtttttatgcattccaatcaccgggacctaacctcacctggtccttcggcatcgcaatcatcgagactcaattctgcgaaattccaatcaccggaactcaattctgcgacattccaataactgggactcaaccctccagcatttcaatcactgggactcaattctcttgcatttcaatcactggtcaattctcttgcattccaatcactgggacctaacctcacctggtccttcggcatcgcaatcatcgagactcaattctgcgaaattccaatcaccggaactcaattctgcgacattccaataactgggactcaaccctccagcatttcaatcactgggactcaattctcttgcatttcaatcactgggactcaattctcttgcattccaatcactgggacctaacctcacctggtccttcggcattccaatcactgggactcaattctgcgatattccaatcaccgggactcaattctgcgacattccaataactgggactcaactaaccagcattccaatcactgggactcaattctccatcattcctattcccgggactcaatcccaccagcattccaatcactgggacacaattcttcacttttcacggattcttcggcatcgcaatcaccgagaactcagttctccgacattccaatcactgggactcaattctccgccattccaatcaccgagactcaatccttcactattccaaacaatgaactcaatgttacggattcatcggcatgtcaatcaccgggacttaattcagacctttcagcataatttttgaattttaaaaatgtatttcaattatgaaatatagagatcggcctgtacctggatccaggcctgtatttttcctggatccaggtacaggtacaggccatttttcggcagcctgtatttttcctgtacctgtattttcctgtacttttgtacagaaaatacaggtacaggtcatttttggaatacaggtacaggtacaggccttaaaaacctgtatttcctgtattaatttttaatcactattttttggcgaaatgtctgaaaaattaggaaaaattcaaaaaaaaatatcattttattcagtgaaactgtcaaatttgaaaaattaataatgttttggcgaaatgtcataaatagttcaaggtggacttggtcgttttggcgccagcccattgtgctatacctttttttattttcaacaaaatctaacgatctttgtagcattcgaacgcccttcacatgtcaatttggcgcatgctttaataaaattataatgttcttatgagcacaaaatttttgatcaaaattccgatttgtaaaagctacagtttcaggtagccccgaaaatccttataaaaaattggttaaaatcgcaaaaatgtgtctttttttgaaaaaatctgttaacaaactgctttaaaaattgcaaattttatcccggcggcgcctgccggcaccgccggaccctcgtcccctccccaagtttcccaaaaaaattttttgaaaaagcgcgacgttaaaaaagtaagaaaatcaaaaaagggtcatttagggatattaaaaaatttttggaaaaaattcttggtagagggtaagataggcacaaaatgtaacctaattaagcttataatcatcttttagtattcgaaaagttaatttttagtattttttatagggtaaattggttcttttctgttttgtgacccccccccccgccccttcctgaaa

SEQ ID NO: 9134 - DNA, 3356 bp, Heterodera glycines
ctgggactcagtttttatgcattccatcactgggaccctcttaggctggtccttcggcatcgcaatcatcgagactccattctgcgacattccaataactgggactcaactaaccagcattccaatcactgggactcaattctccttcattccaattcccgggactcaatcccaccagcattccaatcactgggactaaatccttcacttttcacggattctttggcatcgtaataaccgaggactcagttctccgacattccaatcactgggactcaattctccgccattccaatcaccgaggactcaatccttcactattccaaacaatgaactcaattttacggattcatcggcatgtcaatcacgggacttaattcagacctgttcagcataattttggaattttaaaaacgtatttctattatgaaatacaatttgcgtagaaaatccttttcattataaatacttgttctcttccattttaataatttcttttacataaacatctacatacaaaaaaagaacaaataaactgaccttatatcgttaaaagaaacttatttttgtcaaaacaaacaataagtgcgataaatccatccaattaaaaccatatccattaaaagaggcataattgacatccgctttaattacaaaaacaaaaaaactccatttcaaagtcaaacaatttctcgaaccaaaactttttcaatacaatatcaaaactaagtgtaagatcatttccattgactttgcatatacaaaaacaattctttttctttacaaaagtgttaagagcattcatttccatatgcactttgctaatataacaaaaacaaaatacttttctcttaataaatgcaatagaaagcattcattgcgatttcattatcattaataaaacatacaaaatctattttgtaattaaaaaaggaaaactaaaaagaagacaattagtttaactgtgattttacaaaaactgactaaaacaaaaatgaaaaaaccaaaaccaaacatttctttttttcaaattcatttttaacgcaaaacaattacaaaacgccacacaaattcaaacattggacacatgatacggaccggaccgggtcagtttagtctggccggtttagtctggccggtttagtctggccgttttagtctggccagtttagtcagagggtcggtttagtcagagggtcggtttagtcagaggatcggtttagtctggcaagctgtttttgcccataactcttaaaatattttttttgtcaattataaaaggaaaaacttaaaatatctatgtttagctacaatataaatgcatatcccaattagaaaataaaaacaaagcgaaaccttcagtttggcaccgcctttttcagtcaaatttatattcttctagcaaagtaaaaccctaatttttttcacgttttttccatagaaagcttctacaggcttttgcttgttcatattcaactgtcatccgcttcatcaacacaattcgatatgagaaaagtcaattgatgcagacatcgcacgatgcatcgctggtgaagtccctcctcaaaaaacgcgaaaatatcgtgccgttgatacgaattcttcgactcttacagggttacaataccatcaacaacattaaccctgttcaccaaaatgatcaaaattaccatgccaatgttaatcccgataatatcatcaattttctcgttggtatttctcgaaatatgaaatatgcccgtattcatttttcaatgttttgttattttttcgttggtaatacattgataaatatgttatggtgttaattttaaagattttcggaaaaaaaaatccgaattgaatcaatgtagggcaaaaacagcttgccagactaaaacgaccctctgactaaaacggccagactaaaccgaccctctgactaaactggccagactaaaacggccagactaaaccggccagactaaaccgacccccaccggatacggacaccaaactttattatataggaatgcaaaagttaaaggactgatttgtgcatttaattcaaaaaatccggctattatatgtaataaacagggcttccatttttatgtaaatacatatttttttcctggcttctccatgctctaaatagtgggaaaaacactttcttttttgtgtttgcgaacaaaaatcgggacttttatttcgggatttttctacatattacatatgtacatatttttataccagaggtcgcatcgaaaattttccgaaataagtaaatcagtagtaaaaaataagtttttagggtcaaaattaagtacatttttaaaacgttgttttggggcttgtttttgcattttattcaataaaatgagcatttacgaaatatttctcacctccagcaatttttttgagcaattcaggacgtgaaaaaagaaatttaaacatttccgaacatttttgatcaaaattcactttcacttgcaccagacttttcactgtttctacttcgagcgaattccttttatcagtccattgggcaccacaaagtgaaaaagctcgttccacaaatgcattagagactgggattgccataactttgctgatcagaacgtacaaatttgggagttgagcctatttttttgtaaataagcaagctagaaaatgccattcaccttgaaaaccagcttccatttctcctcgattgaaatgccaaaaaaatgggggatctctgccaggattctgttcatatctgttatttcgtcaaataacttgtcttccaattatttatgttttggaggagccatgaacctataagctaggctaaatagaacctttatgaatctcaataaagcgaattaaaaagtaatagaaagagaaaaacaagactgcaaaaaaaaaaaaaaattaatattcgctttaaaacaaagataaaaaaattgaatttctctagaatgccaaaataagtacattacttacaaataagtacatttaaaatatgtaagttttggaccctcaaaataagtaaaatacttacaaataagtaaaaatgcgacctctggttaacaccccttaattataaaagaaaatttacgttttccatctcgccattcggctcccggtaaattggacaccagaaaattggacgccgaaaagtggacactagaagattggacaccaatggaaaattggacaccggaatattagacactatttggttaaaaaataaattaattaaaaataaataaaacaaaaaatttggtttggctaaaagattttattttagtctgcacatacttatgttttttataagcgtaataaaacggaaataaataatgtttttattaaataaaacatcagcaaaagaa

SEQ ID NO: 9135 - DNA, 1051 bp, Heterodera glycines
tgagtcccagtgatgaaatgttggtggattgagtcacagtgatgggaatgttggtggattgagtcacagtgattgaaatgcagaagaattgagtcccagtgatataatgcaggagggttgagtcctgttgattggaatgttggtgaattgagtcccagtgattggaatgctgttggaatgttggtggattgagtcccggtgattggaatgttggtggattgagtcccactgattggaatgctgttggaatgttggtggattgagtcctgttgattggaatgttggtggattgagtcccagtgattgaaatgctggtggattgagtcccgttaattggaatgttggtggattgagtcccactgattgaaatgctggtggattgagtcccgttgattggaatgctggtggattgagtcccattgattgaaatgctggtggattgagtcccgttgattggaatgttggtggattgagtcccactgattgaaatgctgttggaatgttggtggattgagtcccagtgattggaatgctgttggaatgttagtggattgagtcccagtgattgaaatgttggtggattgagtcctgttgattggaatgttggtggattgagtcccagtgattgaaatgctggtggattgagtcccgttaattggaatgttggtggattgagtcccactgattgaaatgctggtggattgagtcccgttgattggaatgttggtggattgagtcccagtgattgaaatgctggtggattgagtcccagtgattgaaatgctggtggattgagtcccgttgattggaatgttggtggattgagtcccagtgattgaaatgctgttggaatgttggtggattgagtcccagtgattggaatgctgtgatgttggattgagtcccagtgattgaaatgctggtggattgagtcccgttaattgaaatgttggtggattgagtctcactgattgaaatgctgttggaatgttggtggattgagtcccagtgattggaatgttggtggattgagtcccagtgattgaaatgc

SEQ ID NO: 9136 - DNA, 2694 bp, Heterodera glycines
tgattggaatgttggtggattgagccccagtgattggaatgttggtggattgagtcccagtgattgaaatgctggtggattgagtcccgttgattggaatgttggtggattgagtcccgttgattgaaatgctggtggattgagtcccgttgattggaatgttggtgggttgagtcccagtgattgaaatgctggtggattgagtcccgttgattggaatgttggtggattgagccccagtgattggaatgttggtggattgagtcccagtgattgaaatgctggtggattgagtcccgttgattggaatgttggtggattgagtcccgttgattggaatgttagtggattgagtcccagtgattgaaatgctggtggattgagtcccgttgattggaatgttggtggattgagtcccagtgattgaaagccgcgaagcggccgagccagtcgattttatcattcataatcctataatacaagcgtactacctagcgggggatgcgccgaaggcgctgaccccgctagtaaacataaaccaacaaaaactaaaataaaacgccaaataattttaaaattggcgattaccgtatttcctgtatttgaaggcccccctctggtagaaggccccccccctctaatttaaggcccctttttggaggggttgaaaaattgaaggcccgggccttcaaatacaggaaatacggtatgtgtttttatgttttaataagtcgctctaaatcaaaaattgttcggagaaaatgctatttttgggcttctctcgccataactaagcagcaacaaaaaaatatgttaaaacataaaaatccgagccctaataataataaattttaattttttcaatttccgttataaacagggctgccaaaaatatgcaagaaaaatgaccaaaatatgcacataaatatgcaaataaaattgcctcaaatatgcacaaaaatcgtaaaatatgcatatatgcattaaaaaattgaaaattaggggtgcaaattcaaaaaaaaaaaaatttttttttactagtgcacttgccaatgagcagctaaatttcttttaaaaaaattctctttagcaaatattgacattttttaaatcaaaaattttctcatgaaaaaaaaatttgggggaagaatttttgagaaaatttccaattcttagtggtgtgtttttaaaaattttcggtcgattcttaggggtgtatttttctgaattttttagggccgattcttaggggtgtattttccgttttattgcatttttgttaacaaattttccaaaaaatggcgaaatatgcataaatatgcacaaaaagccaaaatatgcaaataaaagtcccgacttttatacgcaaacacaaaaaagaaaatgtttttcctactatttaaagcatgtaaaggccaggaaaaaaaatgcatttgcataaaattcccagccctggttataaatttaatcattccaattttttttcatttcattattgttacatagcttacgccaaatgaaaagttaaaacgaaaggcatttaatgaaatatttggagaaaaatgggacgaaaaagatgaagaaaaaataaatgaacagaaaaaaaagaaatcattggaaaatatgggttttcaacccgaaaaggtcccggtcccgggtttgcccaaaattcccggtcccgtggcactctagaaaatattataaaataaaagaaaaaagcaattattaaatggaagaagcaatttggaagagaaaagtgaatttaaattattaaaaagtgaatgaattattgaaaaatcattgctcattatgattggtaacaaattaatcttttaattgctcccaacatttattttatgaaaaaataaatcaaactttttagaaacttgatggtttttcataccatatttagctatttcgagattttaagcttaaatctaaccaatttaaagtggaaaattatggcatattttgcgatttattcggacatattttatggtcttcagtagaattactaccgggtaatttctggttcggttccgttcctgctcgactctaaaaatgtcctctattccactataaatatttgccagtcattttatattttcactaatacccggcacccgacccggtaggtccgggtccaaaagtacactggtaagaatggggtcttgaagttgatcagcttgggaaaaaataaaaaattaatttatttatatttttataaaattattcaataccctcgctcctttggcttagtggttattctgtttggtttatttccttttttctgaggttcaattccttcgcataaaaattgtgttttaaatttttttaatagatttgtgttgaaaattttgtttcattctcaattcagtgtttgtccatagtagaaaccctaattcttaatcccatcatgttttaatggccaattttctacccagagataaacaaaatgacgagatatggattttatttaattatttcggtttgtcgatggtcttggacccctaaattacaattaaaaatttgattttttacttaatttagtttttttacgtatttattccctaaaaaacaacaaaactgaaagattaacaaatgaacttcttgattctttacagatttcttctatgataaaatataatagcaaatttctttttattaatattggcatataaaaatttttttatt

SEQ ID NO: 9137 - DNA, 1527 bp, Heterodera glycines
tctagagaaatataaaaatatgtcggtgggaaaatatcacattccggatctgggggaccaattttacttttttaatctcttaaaataccagtagtgatattattttataagaaatgtaaaaattaaaattaggcctaaaaggctaaaaaaaaagttttatttagctttacagtctccattctataatttcagaaattttttaaaatttttttacgaaattttttttatttgatcccgaaattgtccgcaaatgtccgtccgcaagtgtccgtccgcaaatgtccgtccgcaaatgtccgtccgcaaatgtccgtctgcaaatgtccgtccgcaaatgtccgtccgcaaatatccgtccgcaaatgtccgtccgcaaatgtccgtaaggcaatgatggcattggagagcaactcctttttataggcccgccctttgctctgcggggaagcggcgccaatatgtttatttattttatttttcggctttggttccattagtggatcccatcaaagcgattgatcattttatgtctttgatcagattcattatcagtatcagctccgcttcgtcaccccttctcatgctgccgcggttgttccaagccttttacaagtcgcagttcggcagactgagtgatctgaatgaacagtgcagtgccattagccgcgctgccattgattatcaaagatcctctttgctatttctcgtccgatgtctaatttgtaaggtataaattctctgtctttacaaaattccatctctcgtcccaagagccataaataagaggcagaaacaattggtgcccggacaattttttgataactttgatcagaatcttccgtaccttcctacaattacaacctcgaaaaccaaaattttacaattataatccatcgatattccacacctttgccacaagttgacatgcgtccatgccgcatatttcgaacacaaaagggctttaaaagtgcaactagtcgtccatggtgctgcacaactcttccaagtactgactgttccccgtcgatgccgccgcttttgtcgcccaattcggcggttgcactgtccatggcacgcgacgcggtccgcttgcagtgtacgtactgctcgcggttctccacctccgcaaagcaatccgagtgttgttcaaacgcggcatacccagcaccgcacatataactgataagcagaaacgaaatttaaaaaaaacggggcatttaagacaggaaaagccaattaaggaccgaacagagtcaattagaagggtaaagccaacataaggacaaattgattagaattggacgattgaatgaagccatgggcaagactccctctaattataatggcaaaaccaatatttgataaaaatttgaatttcgcattttattgatgctaactttccgctatttagtcaatttctaatttaaaattgaaattattatttacccataacttgcttcaaccgcacggatggacggactgaaacatttgagcgaatctgtgcaagccaaaattgcaaagaaaaat

SEQ ID NO: 9138 - DNA, 2094 bp, Heterodera glycines
tcaggaatgctcatttccgaggccctctatttttgagatgtcggaaattcgggttcgaaaaacatcggaagtccgagcccataatttccatcccaaatcatggtaccgaattcccacaatttaatccattttattcggtacacttttatccccttttgtatttaagcctgatgaccatgcctgtccgaaatgtcctgctacgtttgattcccgtgttggtcttaccaaccatttgaaattgcacggttcggacaaggaattcccatggtaaacaaattgaatgaatgtgtcttcactgtatttatattgtatttgcacatctattttaatcacctgctgttgttcagcgagttgtgcgacttttcatgcaccaacaaaaagacgatgcgccagcatcggttggtggcgccaaatttgaaaatttattgaattgatttatgcctccgcccacacttttgacctttttttatgtctacgggttgtgacaccccaaatttgaagactttaaattgaattagccaccgcccccaatttttccatttagccgtgttcacgggttaagtcgacgacgttcacggatcagcaacaccaccaatgttgttgtcaagggcgagttcagcagtggtggtggcagcacaaccgccgccgccgctggggcgttgaaattgtcagaaaaaacaacgcttgttggtggcaaatcaccactaccacaaccgccatcatttgccgccgctcaatgggcaaaacagtgctgtgtgaatgtgaacttggacatattggcccaacgaagtcgcaatgaagtgggacaaaacaaaaaaaaatttttggttgagctctggtcgaatgaattggtcccaagtgtcgagaaaagtctcggtttttttggtttctctaatcttcaaaacaggccgattccgtctgattgtgtgccaaattttcgggcaataattttttgaaaaaaaatcgctttcgaatgatgcaaatttttaaaaaatgactgatttgaaaaatgccgtaatcgccttgaacggaaaatttaactttattgctgttttgtaatttattcgcattaaaaatgcatattttacgcaatttttttttcttacttctaccaaaaaaaaaatcggagagaagttccgatgaactttttttttacttcccttaacaataaaaatctcacaatcagtatcttctccttaatcctgctttcccccgtagaaggtgtctatatcctcaccaacaacagtgttcaagccgattaatagcagtaacaccagtgccagtgccatcaatgctggcagcagtagcaccaatttttatacaaacaaattctgttcaacggttgctgatgtggcaagattggtgaaccaaatgcatgaacaacagctgagaaaccaacgcaaggcggcggaagaggaggaggaggaacgacggagaaaaaacggaattggaaaagctgagcaaaagcatcaacaaaaacagggaagacgaaggagtaccgtgatggaagcatgtgatgatgaagaaaaaaatgaggagaagaaggtggataagaagaaggatgggcacaaaatttgtggccataatgatggtatgccaatacttgaaaaacaacagcaacaacaactgctcgaagaacggcaacaactgccgcagcaacaacagcaaagcattgatgataataagaatatcacaagcaacattgttaatgggtgagtacgaatattgaaattgatgaactccgtctttattgtgttacgtacgaagggtctagccagacccttggctttgggggggggggggctgaagtcaaaaattcgattttaagagggtgtatttttggttttttgaaatccctaattatggggtgtattttacaaaatttttctccgtttttcgccaaaaaattaatattttttgcgattttggcttccattttacaaaaaatggtaaaatgggggtccggcggtgccgatatgcgccgccgggaaaattttttgagtattttaatgcaatttgttaagaaaattgcttaaaatttcaaaaaaatttactgagaattttttactttttgggtttcggaggggggggggc

SEQ ID NO: 9139 - DNA, 1085 bp, Heterodera glycines
cccccccccccccctgctacgcccttgttacgtacatgtacatgtacaacgcgcgagtgtgtcatgccgaacggcgcaagagagagagagagctaaatgaatgttggaactgatttcataattaacgacccggaacagggttggacgaaattatggatttcaaaaagcacctaatgtattggtatatcccatatcaacccattctaagcttgaatttttaaaaaaaattttctaaaggtgacggaaccgacggcgggggggggggggaaacgagctgctcccattttgtatccttaatttagtcttcactcctgccaattttcttcttttgattgtggcttaaaaattaaaaaaaaatcaaacatttttccagcaattccactgttgatcatcctggaaaaagctgtgacaattccatcaatgttcgcaagtcgtcctcttcaaccagctcaaacagtggcacggtggcgggcggtaaaacggtgtacgaccgtaacacgatacagtgtccgcactgtccgttccgaacacagagtcgccagcggctggaaccccatctcaaaggacataccaggtggaggaaaatggaaaaaaatgagactaaacgtcactcatctcctgtgagcccttctctctgtatcgtttcccctcgaatttttaattttctaagattaatttttaaaatttttcagccatttaatggaattttttttaaaacactatttcatcataaaactgaaaaaaaaaattggctagaaaagtttcaaaattttttgtttttttgcaaaaatttcttaaggtttttctgaaaaattgtcgctttttaaaaaatgaacttataaattaatgtccgaacgatctcgactccgtgtttaatgccagtgttcttcattttccagaacatacggcttccagtgctctgtgtgtgggttcaaaaatgattcaagcggttttattcgccggcatagtcaattgcatgacgtgccgtgccattggccaccggactatgtgggtgtgccaaacaatgaacgactgcttgcgaaactgtggggcagacgccaatcaccaaccgccgcatcaacaac

SEQ ID NO: 9140 - DNA, 1744 bp, Heterodera glycines
ctacaacaacacactttgtttgttctgtcgtcggtgccaactcctatttcgttcgggccctgctcatttggcacttcacaatgcgcgccatcaccatcgtatcattggcactaatcagcatgcattgtgccgtgaattgttagctgaacgccttgcatggagggtcggtccttcaaatccaaaaaccatatttaatttatataaaatatctgtttatcatccatacaacaggatgatcgaggggatggcggcattgaatttgaatttactccgcttacatcatcaaatggacgggatgctgcagcagcagaaggacgccggttggaaaaagagacggggaaattttgacaaaaattgaaaaaaaaaattatcaacaattttgtactaaaatcaaaaatttatgaaaaattttaacgttacattttttgccaaaaatctggacctatttttatgcaaaggttgtacaaaatgtaaatgtttgtcagatcgccctcagctgcagcttcgcttgatggttcaacaacaacggcacttacgggcgcttttgttagcaaagtgtaccgttgcaagaattgcccatttagcactgatcagattttccgattgcaaaagcatgaaaacaaacatctgatcaaatcagaacatcaggtaaaatgagtatcgatcgaattcacattatacagtagctgctccgatcatctgtatcgatttgcattagtaatgctgatcacaactttgatcagaatctttaagccataaaattcggaatgttcagcttcagattttgttattaaatcattttccaattccccccccccccctaaacaacattttttttttgaaaatgaaaatttttattgttttgaatttccttgagatttttttttatgacagtcccagtttgttttagggatttctttcgtattcaatgaaacaattaaaaaaaaattcaaattaaaaaaacagacaaatcttttttatattttttttacttgaaaaaaacctcaaagaaatttaaaaaagtaaaaaatcataaattctcttttttatcaaacaaaaatgaataaaaaaaatacggagggaggaagcgagggcggatgagctgctctttttttcaattattttcttccattttttcacagtgcccgcattgctctttttcctgccgttcattggacattttggcacaacacaagcgccttcatgacgacaacactgcacagtgcagtaccagtaacagtaacaacggcggtgcatctccaacctcatcatccgcttcaccatcggcacaaactgagcaaaaagcattggcatttgctccttttcaacacaaacaacaacaaatgacactgtcttcgacacggctggcaccaattcgtcgcaacgaagcgcactattgtccacattgtccgtactcgtccaagcacaactgtgacatgaaggcacacatgagggtaaaatgggaatgatgatgatgataaaaaaacaactatttttggtaatatttaagctgatgactccctgacccctccccacatttttagcacaaaaaaacgaattcgatcaaaagtcaaaaactcagcccgaattcgaacaaaaacaaacttctcgaatacaaactattgaaacacaaaaaggatcattttcacgattcgatcaaatttggatttaaaaaaaaattcaattttgatatttgttcaaattgtggtccgggattcggaaaaatctgaatattcttgatcag

SEQ ID NO: 9141 - DNA, 1993 bp, Heterodera glycines
  unsure (1)..(1993): unsure at all n locations
taatggactgaatcagaaataagattgtcttttatgtgggttagtgntcattcatgtcagggtcagcaatttgcccatttttaacccacgcccccgtctttgtcaaagtacacagagaatgggaaaacggagcctagcaaaaataagactcatcaaatgcaaacacaatttaaatgagcacaaatgaacataattaaaaaggaaagaaaaacttttgaagtgcagtgaatttcataaggtaacaaatactaatggaaaatctggtttttttcataaatcaaattgaacgcaaatgaacacatgtggaaaaggtgggggagaggataggtggggggggggagaagggaaaggttttcccccccggccgctgccggactaccgacaaccaatggatggcgttatgaatgaacatggttagaaggcatctggtgccgccaaatggaagccaaaattcagtttttgttaagtgtgggtccaattcaatattatattagcgttatcaatgataatattaaaaaaatccaaaccgcatgaacaacggcgggaatcacagggacggtgttggcctgctgctgcgcaggagtcactagggacggtgttggcctgctgctgcgcaggagtcactaggaactagtgttggcctgctgctgcgcaggagtcacagagacggtgttggactgctgcggtgcttttgggttcattttcttacggataaaaaattttttggcaaaactaaaacagagactgtaaaatgaactcgaaaaagcaacaaaataaagtaacaatgtgaaatggtgctatagacattgaaactaatattggtattatggcttcattagcagtggtgggatccgagattcacataaataaatcagaatttggttccaaaaaccagtcgtggccgtgagatgctttggtggtccccacaaatttttatgaaagagcggggtcattgagatcaatgttgatggcagaaagcccatcaaatgaattgtcattgcgaaatagggggatttgggtcttcaacaacacatgaaaggtggcgtaaacgacaaaagtcccatgaacacagaacctcgggtttttgttgagcagtgagcacagcttaatcgcatcacttcgcttcttcagttcttctcctgtcaacgattagcgaaggaagacatttggcatttgcgttctcagtgcagagtcctttttgcgtgccatgaggagacatttccgaacatgagcacgggtcggaagaaccaacttcatcggacgtgggcgggtgcccagttttcccattcggtactgtgtaataggaagcgcttcaacatcgcaaaggtccaggatttgcatggccgtacctttgtcggcggtggcacgaccggtgggcgttttctcctgactctccggcaagccaatcaccacgagtgaatgttggcgcctgtcttcctccacagcatcagctgctgcacactgttgttggagaagtgtggtcgtcgaaccgagcagagctgtgagttgtctgatgaacagctttgcatatgccggaatggcgttgtcggcttcgatttcgggaggaatttccagatttgagacgtcgtgaagaagttttttggcggtgactgctgcgataggcgaaaaatgggtcgatggccgcttgcgatatgtgtcgtttgtttgaagcttttgttggattgctccgtgtattgcgcaggagtcacagagacggtgttggcctgctgctgcgcaggagtcacagagacggtgttggcctgctgcggtgcttttgggtccattttcttagggataaaaaattttttggcaaaactaaaacagagactgtaaaatgaactcgaaaaagcaacaaaataaagtaacaatgtgaaatggtgctatagacattgaaactaatattggtattatggcttcattagcagtggtgggatccgagattcacataaataaatcagaatttggttccaaaaaccagtcgtggccgtgagat

SEQ ID NO: 9142 - DNA, 1141 bp, Heterodera glycines
gttttacacgactttgttaaaatttttaaaaatgaatgcgcacaaaaaacagacaaaaatttttgattggaggttacgccgttagtttttttaaaatttaatcgggcaaggatgagaatccgaaaaaaacgcagggtttttttttaagattttgcatttgacgctgccattgcttttttgtctttcattttctttccttttatatcttttattttttcgtctttcgttttctgtctttgttttgttgcattttccctgtgccattttaccatataaaagcaccgccaattcctctctttccctccattcacttctctttcattaacagtgccgctgaaatggcctcccaaattcccaaaattctgcccactcttctcttcatcgccgccgcatttctgctcaactttggctgctgtcagcaaaatgagaggtgtgtgaataactctttctgctgctgctgctgtacgtgttcaacatttaatttgttctttttcgctttcagccaaacgacggaaactcttcgcgccagaaatgcttcttcatcaaccgaaactcttccactgaacatcacaaccaccaaaaaagaaacgacggttgccactccttcgactacagaagctggcactgaggcggcgacaactgatgatactaatgacgaacaatcattgctgttttggattttgattgggtccgtgtcattttgttcaacgcttttcacagccattcattcatttttctcctcccatttttagcgtcattgtagcaattgtgctcttcttggtcctgctggtgtgcattgtgtgctgcatgcgaggaggaagccaaaaagatgcgcgcgaaaccgtcaatggcaagagcggaggggctgtgaccaaattaacgatgaatggggacaacgccgacagtacctgtgcttcacaatcagcatccgtgcccgacgaaggatggttcgcgccggaatcattacgggtaatactatagatggtacccccctttttgaagaaaatttttttttgttctgaaaagtcttggaaacatgtttatgggggggggggggtcgaggtcgctgattacgaatatggcatccatttcaaccaattcgggatcccggacccgaattcgaaaagtcgaaaactcaaaa

SEQ ID NO: 9143 - DNA, 3974 bp, Heterodera glycines
  unsure (1)..(3974): unsure at all n locations
actcacgtaaaacacgttgtagctaaattaaactcagattcgtgattagcatcaaaaattagcctagaaaaaattattagaaaaaaaaaattcaggcgggggtggcaaaacccggaagtgccaaaaaaagaatttgtttaaataagtatatttataaagaaagtcccaatcttttacatacagtagagacaataggggcaattttaagcaaaaggaaaaagtcttcatttttggtatttgaaatgtgaaaggtgtgtaactgagtgcatttggccatgtatttaataattgggcgactctgctcgcctcaaactgtgtactttgtgatgctaattagctgttttgaaggctaaaactatttattaaggattatgtgctgaataccaataattaatgagtgagtgcgtcttttgcatcataaaaatttttttgtttgacagcgatttaattaatttctccgctgcgtgggattaaaatcgcacgtacccaaatgttttttgagaacttctgtgaggtgttttgtgtgcttttcttactaaccacctgctgctaaattttgaaataagtcgtcataaatattgggtttttgtacaccgaacgtaatgcaaatattataaaatttttcttgaggagtgaaaggaaaaaaaaaatttactttaaaaataacgaaatttttattctaaaaatatgtcaataaccaatgaaatttatgtacaatagtaattacatttaattttgtaaataaatcatttttcctttactattaaattcatttctttcttcgtcaaacttttttaaaattcaattttaattaattgtcactcaaatttgagtttttttcccttttttcgcttatgccatcagaacatttcacaaagatagaccgtcgccaaagcaatttttcttttcatcaaaattatttcagcgatttttgtacggcaattagcatcaccatggacactgtcgggcaaaataatttcaccgaagagtgccatcgcttttgtcgtttctttcaaaatccaaacagaaaaaaatgatggaatcaaaataaattaaatatattgaataattttaaaattaaatataaaaaagagagattttaccattagaacaattaggaatatttacaagtgcatgggatgatcggctgttgctgtgtcgacaacaaatgtgccagaactgtgaaatgattatttaaactagggttaagccccgagccctcggggggcaaaaagtcgggggccggggacctcgggggtcggggcggggaggagctcaattgtcgggggtcggggaccccgatcggggaatgaccaaattttattttaacccaaaaaaccaatttttctttttaaatactcgtaaatcttcctttttttccggcggcgcctgtcggcaccgacggacttccgccccgcttgttcccgaaaatctttgaaaaaatgtgccgcacaaaaaaattcttaaaaatctgatttttttgagccgattgtatttaaatgtacgatttgcttatttcctcccaaaattgttaaaaatgataatgggagactaaaaatataaaatttaatactaactgattttaaaaaattgttcatatttttgagcctaaaatcttatttttcgggcttggtgttcatggtggaagccctgtttaaaaatacatggaaattaacagaaatttttgcgaacccttctgaacatcgaatttgaccaccattttttgcggcgctctttttcaaaaaacttagggcaacagcagaaggggatgggcggcgatgctattaggagccgcgaggaaatttttttttttttacattttaaaatttgctaacagattttttctaaaaatacctaattttgcaatttttgacaattttttgcaaaaaaaaaattggattttggggggccagcggcggtgccgataggcgccgccgaaacaatttcggaatttttaattaattttattaagaaaattgttcaaaatttcataaattttcaaaactttccccccttcgttgttgaattaactttttagatttttacaactctcggagtccccaattccccgaattagtgtcggggagtcggggagcaaaaagtcgggggccggggacctcgggggacgacatgtcgggtgtcggagcggggaataggcccaaaaatgtcggggatcagggtcggggaccggggagctcggggtcggggcttaaccctaatttaaacatcaaaaaacaattatttattataaaggaaagaaaaacaaattcatgagggttatggcaaatcgtacaataaaaatttgtttacaaaataaagcctaagcttaagcctaagcctaggactaggcctagcctaagtcattgtacgagttgtcatgattcatgaaaccactgatagttttgcactgacaaatgagaggaatttgaaaagggtgccagttttgcgagaaacttcttcgcccaatttggacaaagttaaagcataattttatttgttcttttaaatttgaataaattttaggcgagtcaacggaaaaatgcaaattatgcgatttatcttcctgattgtcattttgagataaatttgtcctcattcaattttcgatttcggaaaaaaatcctttcgacctgcccccccccccccccaccccccagggcattgcttcgaagtgagtgaaagttcaccggtggcatgcgcggaaagtgaagtgtccggcggcggatttgcggcgtctccgccgccgcctttccgcgggttctttagccgacgagggttttgtgttcatttcagtagcggcagcagtttaatccgcccaaattggtcggcgctttgtttgcctaagcattgagtgaaaaatagcgaaatgagtggacggacgaaggcaccgaccaaatgggcggatcacaacacaaacatttcgccgaattttgatcaattttgacaaaaaaaaagcgggaattatttttattgaggctaataatgctattattattattattattataaaatgattatatttaataacagtgccaacattatttaattggcttttgtattatatgccgaagaagatccattcaacttgaataaattagttatatatgtattttgacattaaataaaataagcgcggcaaaaatgtagtggatcgggtgccgatttgtcggggttggctgaagaaattaaaaatgtcggggggagggagacacaactcaacttggaagaaattcagaaaaatataaaagaaaaaatttataaatgtacaaaaaattcttagaaaaatatttaaagaaatcttacaccccattagcagcacaaaactacgatataattaagaatagaaaatttacataatattcatatattttttaaataaaattttactcgtttaaattttgttatttattattattaagtctattttttgcatttattttcttttactacactaatcacccacattaaatttgggcatcaattgctcttttttcgtcccatttgcccgaaatgctcccccaactccgtgcggaccattttcaccatctccacgagcagttggttctgctcgcccttatccccctccacttgccgcttttgttcgcctgtgcccctcccccgcacccatcgccattttttgccaaaaatttgcccagccaaacaatgggcataatcgaaccacggcacacggccaacagtcgcgcatttggtgaacaaatccatcagccacgagtggaggaagacgcgtcctcaaccgatgcaccggcgcgaagtgcgctcggaggaatcggtcagtcgaatgacagtcggaaaaccattgcaatttcgccctatggattagccaaaaaattgaataaattttcgtaataaaatttcaactttctcttcgatatttatttattgnggctacgataaagaaaatttcccaaattgttaagatagagaanaccgatatttgagacttattctctgta

SEQ ID NO: 9144 - DNA, 2820 bp, Heterodera glycines
  unsure (1)..(2820): unsure at all n locations
cgggccttcaattgacaattntcggtagataaaaaatccttcaagagttttataataggaaatatagaatttctttcgacttctcttcaattttatttaattgcctttcagaccaaagggcaagcacagcaagcggaccaatcaaagaaccgagagaggcactcactcaattaaaaaacataattgaaaaaaacaaaaatacgatgaacttttaagttattttgttatgattttgatgacaaatgccgatggcgaaacatggagggatttttgatggacgattttgactggtaccaaggcgccggatttctggacgaaaatcgtctaaggttgtgaagcaggaaaataaatgtttatgaatgaattggatattttttaagattagcaactggcacacatatcagcccaggtggaccaatttaagttttaaatgaacattaccgaatttattttttattccgtttataacacccaatataatggcataatcttaattgactcagtaattcgcattaattttatttgcatgagtaatataaattttgaattatcagatggattttatggcatcaccgcgacggacaaaattgaactgtcgggtgccaaaggcattttggtgagtgacgtcatccaatgtcagaccggcaatgctgaacttcgatttatgtattggacgagtccggaagtgaaaatcagtgggttacttacggattaattattcttcataagtgttaattcgatgtattttctttcgtcaattagccatttgcgtcaaatcggtcctccggctttttccctacttcgattactgctcaacgcccgtcgagaacaacgaccccggcccagcttacataattctgcctgatttaggaggcgatccacttcaggttagcaattgaatcccgtattgcctaattagttaataaagattatatggccataaccaaattgtcacttcagattttcatccaagcgcacaattttgtgttcaacagtgccgcattgcaaggcggatttgccatcattgacaacctcgaatattatggggaattttgcgacaatggcgccgacggatttctggcccaatcaaactccgtaagaatttgttaagcaatgagattgatcagtgaactgacccgcttttctttgctcgtttttcgacacttctcttaaggcccgctctgagacggcgcctcgcctcgcgccgcggccaaaaggcgaagaaggcactttaggctggggtcccgagctgatctataacagtgtgatcgaaaatgccccagcagcaggcggtgccgcgggtggtggcggcggcttctcctcgctgctcgattggatgctttacggcggcggtcgagggttgggcggaaatgtcaacggcacaaaggctacgccaaatactttgtcagcaacatttgaaagtccaactctgccaaatgcggcagaatccatttttgaattgagtccagcgaccaacaactttgttttcccaactcttgtgccgtcggctcaaggcttcggccccctacccacaatggcaccaatttcagacccaataccaacaaagtaaattgagattttcaagagttgaatccgtgattattctaggtttttgcaaattcgcttttaagcagtgatcagcaaatgtcctcttccgttccacccgcttttcctcccttcgccgcaattcgtccgtccaaaagccattccgaatttgaaaatgcacttcagccaaatttggaaatgcaaaatcaattaaatgcaaaattttttccacaaaatcggccctctgctgaaccgatgggcggaatccgttcattccgaattgttcagcagcagaaaagcaacacggaggagaacaacggaaaacagacaatgggtgggcataatcaatcagagccagggatttgcacttaagcgtaaagagtaaacggtgtattttggaaatttaatatatcagaatttttgctcattaaaatgggatatatcccagacaaaaagtttttcattaatagaaatttatctttgcggagggaagtcgaaattttaggagatttgagaaccgagaattgagtcggatagccgaggctaaaacccaccaaaagagagaaattccttgactggagaaccaataaatgagaatttcgaccaacccttgcaatgttacgaggcgcatcatttgaaaagtgtatttccctcatagaaacgcaccattcggccaaccgtggcagcaaaaggccattgccccatttggcattgttgcgaaaaatagaggaagaagaagcaatggagaagagtggaagaaagggggcggcaactgaactggccgaaaaggacgaagaggaggagagggaggaagaggaggacgaaagggaggcgataaacgacagggaaggaggaggaagcaaaggaagaggaggaggaggagaggaggacgaagaaagggccacggaggaaccgccggattttgtggagaaagaagaatggataggaaggagaggaagaagatgaggcactgccggcgcagagatgcgagcattaaaataataaaaatttaaaaaaacggcaaatatttgtcgtttatttggccgcttttaatcgctttcgcatctctgtgagttagtggtaatagcggcagaaagaatctcgctgatttttgatttgctttaatttatacaaaagttactataaaattatgtactcactaaaatatttaaaagaccgaaaaaggcatgaaaaaaggcgccaaaattacgtgcccggcataaggcnccaaaatctagaagaaggcaaaaaaaaaatagactaaaaataaataaa

SEQ ID NO: 9145 - DNA, 1808 bp, Heterodera glycines
  unsure (1)..(1808): unsure at all n locations
gacaaaatcaaagattttctaaaatctcgcgctccgattcgtaatcagcgtatttttccacctcagagaaaaaaataaaataaaaatttttaagtttatttttcgtcgggaccacaattctacacaatcgccgttttatccctataaacaccgccccgtttaatcggtaaaaacatataattttaggttgaatacacttaaataatatggatttgctgcaacttccttcgatttcggatggtaatttaattatggattttttaggggggtttattttgtaaccctttgttagcatatttttaaaactgaaaatatttttgttttcgaaaatatgtctctatgaaataaaactgactagggaaaagggaaatagcaaattggaaactatgcgggaaaacaactagaaatttttattaaataaggataataaataaaaaaaatgtcagcgacccagaaaaacggaaaaaactaacggaaaaacttgctaaaattggtccttttgcttaaacatagtcaatttaatcgcgcacaagttgaagaagtattttaaacaaaacgaaattttcacagacgaactcgattacgacttggatgttccggccgatggtgtcaatgccacgctcaaaacccaaagggcctccaataacaacgaggtaattagcatatcataaagaatgcaagacgattggatacaagcttattttttaaatttggttatttaaaagtcaaaagttgttccaggctggacgactttgcttggtttcctccgttttccaaaattcccataagtttgtccttatttcgatggtgattcgtcggttctttaacttcatctcaaaaccattccgaacgatgatggcaaggcattagcaaaggtcacattttgagaattggggtggtcgaccgaagtttttttagggtgcatttgattcaccataaattcactttttctttaaagttaactaaattttaagtataagcaaaaaacccttggtatcttctatggcgtacattaaatattctcttttcgcctgtaaatctttaaaaacttattttttggttttggctgtctattttgatgcgacaaaattatataaacttattttgcggcgctatattcaccgttcatccttcctaaaaatcggctaccgataagcaaaaaaggtcgtcgcctttggtactcccctccccaaagtttacgtctctgattttttgtattatgtacaattgtgtttacattctgtcatgatgcgttttgagaattgtcttgatagcaatggaacattccgaattatcacggccaaataattttaaaaccacttatactgtagaataaagtcaatttgctagtaactaattcataaaagttttaaaatatattttgaagaaaagtcaaaataattcaccatctgtcgggcggacacgaacccatgacaaatgtcaggaaaaaacgcattaaaaatatatatttgctgctaattttattcggtcaaacaattttaaatgggtttgggcagtgacaattcggaatgttctcttgtaagactttaccaaaatgtctaaatggtattctgctttctctgtccatatctgtcctttctcctttaaataaacatcatcagacaaatgctatttgaatttgtcggcatatttttggttatttttttgtcttggtcaaatttgcctgttctctcctccctttgtcaatgcaagtgcgttggtacttgtgttgtgagtgaggngatattctctatacgtcgtattgtggcggataaatgctctgtcgattacncaatgcgccgctccct

SEQ ID NO: 9146 - DNA, 1712 bp, Heterodera glycines
ccctttgcctcgccatcgcacttccctccctttccccttcaattgcttttctctttcttctccctccttttctgacctcctcaattatgtggtgagggaagttagaagaaagatggaaaagagaattttgagagaatacggtgtctggttggtctgcttgtgctagtcctccctccccctcccttttccctcccaccgctccctccctttttcattttcgtccctccctttggcatccagcacaaacacacttccatttatgcgcttgctatggttgaggatgactgcgacgttgtgactattgccttccctcccctccctttcttcatccctctgtgtattccccccgtattccttcctttcccgccgtgggtaggcggcgtccattctgctctccccgccgccaaacatttcttgctccgactatcgccactgaaaaggccggattctgctgcttgcatttattcacttctgttttcgacgaccaatggaaaatcaattgaattttaacttgcgtctcatttcgggcgtttaattcattttataacccgaaagtgctgattaacgcttcctcgtgttaattgtttttcatcctctgctgcttattttcaacgctccaatttttttcctttccgtccatttttgtcttttattgctcttctccaccgcctttcatcccacaaccggtggttaatttaattctacgctttccaagcaaaaattgaagacggcaacgaaaaggaaggcgcggttggcatttccgtcctcacgctgctgccgttgctgactcaacgaagtggtgcttctccccccccccccccctcccatgggttttgtcttctcccttcacttattagcccttgccccacccattcttttcatcattcgtcgctttctcttcgcagaataaactaacgcgaaacggtctcccgggaggaatccttttcttcttaagcaaagaaacaaagaatccgaaaagggaattgctcgccgcctgtaacttcgactcaaccttttgctgttaggttaggtgagcaaagtttcaggtgtgcgagcattccaattgcgattcgcccaaacatttaaaaaaattttttgacttttctgccttttgctcatttcgaattgtttccaggcacagaaagaaacttcgacagcaaaaaaggtgctgttcgtcgatgcatcgaaaaatagaaaacggcggagtcaggagaacgcgtggccgaactcagcagacgaaaaagaggacagcgacagagaatggccaagtggcgaggaggagcagggggcggacgcgtttgaaggtcgactggccgggcgagtgaagcgcgtggcgagtcgaacggatgacgaagcggaacaaaataacgcagccgaacgctttggggagattttgggttgcggaaaaccaagcagtactcgaaggaaggtcggtttttctcacaagcaaaacattaattttgtttcgttgaatttgggtggcaccttggaaatactttcattcttggtatcaaacgaagctctaaacttgggctaaaagcaacacacaaaaattatacttgggcactaccttctttttgtctgttgtttggattaatgctgcaaatatttcaaattattctttttcaaaattaatattaaattccgcctttttccatgccttccccccccccccccccccccaagggattttccgttgttccgtcctcccc

SEQ ID NO: 9147 - DNA, 1949 bp, Heterodera glycines
catgccttcccccccctccccccccaatgtcattttccgtttttccgtcctcccatttctttcaacagtcatcgccagcttcgcttatttattagagcatacacacacacataaatatatgtgctctccgtttctgtggttagagaggacacgagtaaattcggaaggatgggggagggtaattggagatgacgacgactgctttgatggcagacgagcgccattgggttggttggattggcgcgagaatttcctgccgaccctccaaatccgtcccatttgatataaaattgagtgaaggtcggagagtgagtgagtgggcaaattgcagcaaaagtgacgcggcgggcgctgatcgttgaaaggagatggacggaacagcggacatccgtcgctgttgcggcaaagcgtcggcttcgcttaatcgccagcctctcttgcgctttgtgtgcattgggctgaatgaatgcctctttctgggccatcattagcaatgatttgagcgattgattgctttgggatgcggggggaggggcaataaaaacaacaatttcgttggatggtaaatgatttattatttgggcggttgcctttcaacaaattgttgacagaacaaaaataaattttgttcttttaccataacattttcaaattaatgtacaataaaagggaattgcatcttttgggttgtttgtgacctccaaaagtgaagcaaaagaaacagcgaaagggacgcgtcgcctttcgcttggagagaaaagggaggagagaaggagaccttgaaaatgtatacaaacaaatttatgtatttaacctttatcggattgaatagaaaatatggaaaataaaagaatggatggttatttatggtgatggttgattttacaaatgacataaatataaagattatatatataattatgcgtttactcggcgagtctccagatacgagacatgaatttgaattctgaccaagaccgggatttccgagacagaacagggacaggactgaagtcctatttcaaccagactcctgctggtcctaaaatataccggaccatgaaccctggatgaatcctgctgtatgtgcagcattttgtcctgtccagtctctattgttactgagaataatcgtggcctttagctaagtgatgcggctttggaagcgctttacaattcgctcgacgcagaccccgacgatgggaacctccgcttcaacgcactgttcgtccattgcccatcggtggaccaaatgaacacctttgacatttcaaggtaaattggggaccataattatgctaatgtcatttcattattgtgccattttgtcttggtcgttgacagttcgtactaaaaatattctttggttttctctaataaaagcaaaatgtacgaattgttttgacatttgtttgtctgtcttcggacacttaccaatttgtcagggtgacttggcaattggttttcccataatcatttggctgttggcccggagatggccgagtcgaccgttgggaaagtgtccatgttttgccaatggacactttcgcacaatccttcccccccccccactttctgccactgctttttcctcctgtgcccattaaaatattcatgagcatcggctctgttgctcattcggccgaatgaatggtcgaaattatttgccagaatttggccgtaaagcgaccgacgcctggggcgcactgtaccataatggacactttgccagcattaatgcataataaaaaggcacattttgagggttaactggtggaaatgaaacacgactaaaggggggggcggaatcatggattttcaaggtttggggagggagggggtgagggaggggaaaaaggataagaagaaaaagagagagagagagaaagtcagcgaaatgtcgatcgtactatgaaaatgaaatctataaaaaaaatgccttatttttt

SEQ ID NO: 9148 - DNA, 2117 bp, Heterodera glycines
  unsure (1)..(2117): unsure at all n locations
ttgcttnntggtacttcgtccttgccaattctgatcatcctccaaatanccaaattggatttgtatgtgccttnatatatgaccgaaacttgggatgtttttgcccgtcacatttggccaatttttgcgacaagcattcgccatttgagctttgccgatggcgatgatttggataatttgcgtcgtttggtttcccctacaattctcactgattgcgaccaattcaaaatcaaacttctggccaggcattgtccaaatggttgcacactccgacaactgatggtcaaccgaagagattgtttgcagtgattatttggatccaccaaaaattgattggatcaacaacttcaaagaggtgtctcgccatttttctcaaattgtttttgtttttcccaattttgtttagacatttctccgtgccacctcttcggccagttacactgttcgaattatttttcgtgtgaaaccaatgccaattgcgccatttgaattgatgaacgaagtgacaaatgagaagctgacactgattaagggtggagcttttcgttggctgttgaaacggtgcccaattgttggggagacggcggcggtggttcagaaacagcagaagaaagacgagaaattggaccgtttgaacggagtctacttctgtctttacgatgccattttctcgactcccgggcacattgatcagcggaagaaaaagtgatcatttgagaaatcgccgaccattattgatttttgataattgggttgattgatgctaattgtttgctctttgaactcatatcacttttgtggtggacttttcaatgttactataactgaatctctagacaatttctattgatactaaagaaatttcccaacaaaaaaatcaacaatggtttatataattaacgaaagaattaaaagactttactgagagaaaataagcacaacaaattgagattgatcatttctcaaatatataattaattcattcattcccgtacacatcagacgacattttcattgctttgatccgcttcttcttctttttcttccgctggtggcgacaatggcctaaaattaattattgtttttatttttctataaaatcaaatgctattgctgctgctcacccaatggatttatcgaaactccacagatcaaaagtgacattgttcaaattggcactcggatttacgctttcttcccatttaattgctggcaccgtcgccgtctccccaattgggcaccgttgcaacagccaattacacacatttacgtcgaattcgtcgatctccttcgtcagtgtcagcttttcattcgtccgttcattcaccaattcaaatggttcaattggcattggttccacaataatataaagttgaattgtgtaactgacagaagtggtggcacggcgaaatgtctaaaaaaactggtaaaataaaaacaaattgacgaaaatatggctagacacacctccttgaagttgttgacccattccagctttggtggaccaaaataattattgcgatgcaattgcttcggttgcccattttttgtcggagtgtgcagccatttggccaacgcttggccagcagttgcatttggcccatcgtcagcaattccatcgggtaacagagcaccagaatcgattgaaaccaattgatcaagatcagtgagaatcgttggtgaagtgcgactgcgcaagttgttcaaagcatcggaattgcgaaagcccaaatgacgaatgcttttcgcaaaaataggccaaatttctcgggccaaaacatcccaaatgtctgtaagtgtttgtcggtggcaaaagaaggcatatccaactcaaatttggtgcccattctgtcccaaattggcttgtttgaacggataaatgtgagcacagaatggtcaatgtagctgaaaagggggaaaatgaagaagacgaccaaccatattaagtaattggtttctgtatagtttttgatttactgaatctgaaggaaacgaaaacggattttgtttggcagcgaatggtccggcaatggaaatcccacaaatttgccatcgatcaccacagacagtttcgcttttggtcctttgtccttgcgaattgtgatttgtctccaaat

SEQ ID NO: 9149 - DNA, 2049 bp, Heterodera glycines
  unsure (1)..(2049): unsure at all n locations
tcgggatccctaagtgtcggatccttttttggtgccctcccacaagccgcaaaacattctcagttttctcgaaacaatgacttgccaattattattattattttttttttctatccacccaactcaaattcctatttttaatatcgccaaaatggtcatccgaacagcaaacaaaattatcatcaaataaaacagtcggacatctctcaaattatcactccttcttccgctgatcactgggcccgggagtcgagaacactttttcatcgctttgatcttgcggagacagcggcctaaataaaccaaatttgaaatgaatgaacatttaaagtactgtacggaggacactactgtaccctcctgtccatgctctattcaaaagtagagtgccacgggaccgggatctggtagcggacaactgagtacaattgagtaccaaggtcccctgggactattcccggttttcccaggcaaaaattcctgggttttcaacccgaaaaggtcccggtcccgggtttgcccaaaattcccggtcccgtggcactctattcaaaagtaaggccaatctttttgcttacccaatacaatcatgataaagatggaagatcactccattcaaattgtccaaattttcgtctttttcccattgaaccgtcgccgtctccccaacaattggacaccgtttcaacagccaaatctcttcgtccttcgtcagtgtcaacttttcttgggtcatttcgttcaccaactcaaatggctcaacaatattcatttggctagccactagaagttcaagccgaacattgtaagcgacagaagtggtggcacggagaaatgtctaaacaaaaaagggagcgtaaatcaaatggcgcccggaaaatgcgtcagtggaaaaagcgtcagcagaaaatgcgtcagcgaattttattgtcttaaaaacaagttccttgcgttttcgaggtcactgaccacgaatccggtatccattccggcctatttccgaatctcgaacccggactcgaacaaaaaactcaaaagtacaaaattttggcgctacttgcaaagagcactattttgaaaatgttttcacttttttttggaaaaatttttttttgttttttttatgcagaatttgtttttttaacatggaacgtattgcatactatttaataaactgaatttatagaaaatatggctagacacacctctttgaagttgttgacccattccagctttggtggaccaaaataattattgcgatgcaattgcttcggttggccatttttgctcggagtgtgcaaccatttggacaacgcttggccagcagttgcatttggcccatcatcagcaattccatcggggaatagagcaccagaatcaattgaatacaattgatcaagatcagtgagaagtgtcggtgaaatgcggcgacgcaaattttccaaattatcggcatgaaagctcaaatgccgaatgcttttcgcaaaaagtggccaaatttcgcgggtaaaaacatcccaaatgagcttgacgtcggtcatatataaaggcagaaacaaatccaatttgatgccacttctgtcccaaatttgcttgttggaacgaagaaatgcgagcacagaatggtcaacgtaactgaaaaggggaaaaatgaagattggttttctgtatattttttgatttactaaatctgaaggtccttaaaacggattttgttgggcaacggatggtcgggaaatggaaatgccacgcatttgccatcgatcgccacagacagtttcgcttttggtcctttgtccttgcgaattctgatacgtctccaaattgtcaattcgctttttccatcgaaatgtttgtcaaccaaaacatcgaaacggtcggaaagcaatgccattttgaggccgagtttggcatagttaaaagatgggagaatgtccatccacacgtcgctacaaagccaactgaaaaattnggaaacgaaaatttaatttttcaaaaatttccnttacccgtcgntcattttgganggctcattagcacacttttccc

SEQ ID NO: 9150 - DNA, 1278 bp, Heterodera glycines
aaaaaattgaaaaatatttattaaaatgttaaattgcaattaaacaaaaaagtccgagttcaccgttccgtctctgttgtccatcaattcgcaatattcgggccgtgtcggccctgaacattgtgtcgacaaatgtccagcggtggcctttcgcgcgtcaattattgttctattaaatgaaattttaaaattaaatcgattactttcttctcaatttcacctaatgtcctcattaatcacgccaaatttgagcggtttcgcgtcgacagagattaactcagcaggcaattgatggtaatgaacttgaacctaaaataatgaaaaatgtttaaaataattagttaatttaaaatcaaaatgtgtgaatcaccgtgctcggtgaacccggcacatttttggagtcaatttggacaatcaattgataagtgccgcccatcaatggcgtgtaaatgccctaaaatttattaattacccagtttcggtgattttttgttctgctacactcttgtagacttgattcctcagggcggacactttgacgggaatcttttaaaaaaaattattaatagttaattatttgtaaataattattcgcaattaattaattaattgattattaattttgttcaaattacgtccgctctttcgcccaacaatgccgcattgattttgccgacttgttcatgcatttcggatgcgtcaatgataaattcggccgactctttgacgcgtgccgtcgtcagtccttcaccacgcaaaaccacctgaacaaaaaaggcaaataatattttgtattaattatttcaatatttttattcgtttttcttctgtattccccactttgcttagttcgtctctctcctccgccgccgtttggccatttttttcagcaattgccaacaaagggtaagcacttggcacgaccaattctaaaagaatttaagcatgattaataaataattaaaaaaacctatttcccacctgaacagtacaagtacagcttgtacttggcggccctgggcggtgtgaacagcagctgatgtttgctgttgcccaacgagttcagctcaatgattggtgtgccccccgctcggcacctcccaacagttcgccgtccccgtcgcgcatctcggcacgcactttaactaaaaaagtgaatgattaataaattgaaaaaaatgagtaattcctttttttagaattgtaagttcagcttttaacgaaaaaaacaataatttaaataataagagccccggaatttttgaaatggcccgggac

SEQ ID NO: 9151 - DNA, 3372 bp, Heterodera glycines
aattaaacttaaaaaaaaaatctttaagctcttaagattaatacatttattttgttacataaattctcattttaaaacttggaatttcatggaaaaatgatttattttcgatttttgttcaaattcgggtccgggatttaaaatgagtggaaatgaatgtcattcatgatcagggccccgaaaacatgagaaaaagtaaaaacacttttttaatttttcaaacagaaagcccttgtgttaagttttttttgcaaaattgttttgggcattgtcaaataaaaactttgtgaagcttatttgcctaaaagttgcatgcctattgaatatataattttaattaatttaatttaattatttttgctgctaaccaaacacataattgatcaacgtgtaaatgttgtccggcagcagcaaatagcgcaatggaagaaatgcctgattataatattatatattaataatagtttatggaaaagtaaaaacagaaagtgttttccggaaaagtaaaaacgaaattcagaaattgttttgtggaaatacaattagcaaaacaggaattgttttttggaaaaaaaacctaaaacaaaaagcatgatcctccccacgtttttttttttatttttttggaaaaacacgtcgcaaaaaaagtacatttccggtgaaatgagaaaatggtcaatggaaaataagtatttaattctttatacgctaatatttggtgtacaaaatcttagttgaagcctcattggtttttttttttaaataagttcaaatattgagcaaaatgtctgagtattaaaaataagtttttaaataaaaaatgtattcaaacaaagcatgcacacttaattcaaaaacaattaacagaatttaaaccacaagttcatgtttattaaaaatttttcaaaaaaggggcgctaccatcgacagtattaccaaaactatgttcgaagcatttgttcacccaagaagttttacattattaagaaatgtagagtttgtaaaactaaattttagccttaattaaatccctaccgtggtgatgttgatggaagggctgatctcctcaaagacgagaatttgtttggaactacagcattgccatcaatgtcacatattttggacaaataaagggaacattttcaaattctgaaatgccaaaaaacggcacccacaaaaatggcagtatcagcatcaaagagtttgtgagatggcccgcaattgtacagacgtcaaagatggaagtgacgaacagcacggggcaatggcaaatgctggcaaaaaatggagcaaatttataaatcgtttttttgatgaatataaattcctaaggttaaccagtttttttgtaaaattatttcccaaaaaattgtgccaaaataatattaatccttttgttgtttgcaaattgtaagccaaaaaatgggcaaaatttgacgtaatttttgttgtttctcgccactgaagtttgtatttttagtggtagcatttttggttgcattggtgaaattcaaaattttgggtcaaaatatgttaacaaaccgcattcaagttttaaaatttttttcctgacggcgcctaccggcaccgtcgggcctcagtatttgatttcctgataacacaaaccaaaaacaggaatagttttctggaaaatttcaaaacaaaaaacagatattatttttcgtgtaagaatacaaaaaatacggaaatagttttccggaaaaaatacaaaaaacaaacagaaaaagttttttggaacacaaataaaaaattaaaaaagttttttaaaaaatataagcaaaaaatgggaattattatgtttttgatggttggcagggaaaccttttttaacaatgttagcgtcgcccggtgccaaacccaaattttgttgtgggaagaaagacatttttatggcattaaaaaacaatcccaaattccgtgaattggtttagaactcacatcagtgacacaaaagccacatatttggacaaaaaagtgcagacgccaaagatggaagtgacggacagcacggggcaaaggcaaatgctggcaaaaaatggggcaatttttaaatttgtttttttaaaagtaattaaaattgtttaggctaaccaattttttaaaaatgctttgccaacaaaattcgcaaaaaatatttaagtacaaaacaaaaatagttttgtggaaagcaaaagttagaaacataattgctttgttgtgaagcaaaagtcaaaatcagaaattgttttgtaaaaagtaatagaaaaaaatatattagcttttaaatttgatatggctcgctgtggcaaaatggcataaaaatgcaatttttgaggttttctaaataaatataaattaaatttttacatacatagggaacgcgacgaggaaaatgcaaccgaacaggaagagcaccgggaacaccatattgtcctgcaacgggcgcgggtaattacgcggcggcttgaaaagtctgaccaatttggcaaaaaaaatgtgtttaaaaagaataaaaattaaattaattaattaattaatttgtgttaattaaatatttaaatttatttattattaattattattttttactgatcactacatgaccaattgttaaaaactcataaaataaattagaatattattttaataaatctttattaataattgcagaaaaatgtggaaaaaagcaatttttttaaattattgaattgcaaaataatgaattaaaaagtatatatataattattttgtaaataataaaaagtgttccaccaaattttttggcaaaaatgattcgagttgttcttcggcagtgtgccatggaaatcatcagtgttgacgtttacagtgtgcgccattgttgcggtgcttcagcggcttgggcaacggcggaatgtccacgtcatcgcacacaccgaacggcctcggcaaaatttgagaaatttcctgaaaattaaaaaataaaggttttaaaaaagaatttttttttatgatgtttttgatttaaaaatatgtaatttaattaaataagcattaaattttgttgaacaaattaaagtatttgggtttcccttgctgtatttaaaattatgtggttacgaccaaatgaaagctttttgatcagtaaacattgatcatactatgctaaggaatgagtcgatcgattttcagctagcaaatttttgccataaagaattggccaattctactctcagaacccgtatttggtattgataaaatttttattgaaaagattataaaccaagaattagtcccgagagttaaattggcttattcatgactctttgtacagccagtgtcaccccacttgaaatccctgggtaatgtgcacaagaccgcaggcagcaagct

SEQ ID NO: 9152 - DNA, 1576 bp, Heterodera glycines
tagcaaaaaaggggagcgcaatgtgcacgagaagcggagagtcgggcggaagctgtgcgacaaagtcggaaatggacaatccaccagcagcggaggggatgcattagcgtgatcgaatgagtttggattaagcggagctaaggagggcaatgggatgaaaaatttcaaagaaaattaaattatattttaaaaaataagcgatgcttaagtcgtataattaatcacaaatattcggaatggttaaattaaagcaatggtacagccagacgggactgtgtcgtttttgcgccagtgttttggcggcagacttagttcaataacagaaatagtttttttgaaaacaaaaaaataaataaataaaggtttggggaaactataaaccaaaaaatggtaattgttttgatgtttaatacgaaaccaaaaagaggaaaagatttccggaaaattttaaagcaaaaacaggaatagttgtccggaaaatcacaaaccaaatcaggattttttgtgcggaaaaatattttttaaacataaaagttttgtgtaaaacacaaacaaaaatattaaaaaaaatttttggaaaaatgtaaatcagtagtgtgaattttgttttttgtttatacaaaaccaaaaacagcaaaatgtaattaataaaaaagttattgtaatgcaaaaatggttgtttatatatcatcttttaattaattactaattgattgcaaaaaaatggggtgagatgtggaacattgggctcagtgtaaactgctcaaaaaagctgaaaaagtttgccgccgtgggcctaattcaattcttttcagagggctattggtaaagtaattgtgcaagagtaataatgaagtggagatggaatttatgacttttaaaaatgcattaaagaattgtttaaatttaatatctttttgtttaactttctttgtttttttttgttaaattgtattttttaaattaaaaatgggtataaatttaattaaaatttataaattatgaatttacttagaaaatatggacgtacaaaaaagattaaaaatgtttgggttttaatcaaaccaaattttgcccattaatagtatcataatttaattggataggttaaaaagtaaaatgattttttacagtaaataaatgaaatttattttttgttaaagtaaaacgttttaaaaaatttcttttgcactgtttttttgacttaaaaatttgtaatttaattaaaaatgcattaaattttcttgaacccggaataaatgttatatggaaaatgttagggggttctcatcgccgctttttccattcacattttgctgctgcaaaatttttttgtgttgcagcaacagagaaatgggtggtgaatcataatgaaaaagggtcggtgcgaggcagaggagagggaggactgaatataacaatttttgttttttgcatttaaaagtacgttttatttagatgttcaaaaatggaaaaatttttttgagcaatttgcacactttaaaagaacgaaatataacagacaacattttaataaataatacaaatttaagtcaaatggaaaaattttgtgtta

SEQ ID NO: 9153 - DNA, 3967 bp, Heterodera glycines
ccgatcgttcaagtaccgcgtctaatttgatcgcgtgttcctctcgctgcttgcgtagcttttcaatatggtctctccgttgttgctcgtcttcgtcaaatccatctgttgactcatccatatggcgttctgttgcacctttttctctttgttcctgggcttcgtccaatgatttgttcgtcgttccttttgcttgtcgacacagtcgccgacggagaaagcgccaaaatagttcggcacgggtgtgcatcaaagtcacttcagaaagcagtaagtccagctcaatggcatcgatggttgcgttagaattttgctgagtttggaccaaattcgaggaaattggtcgagtgttgtcaatcaaagtgaacaccttcatttacgggttaacaattattgtaaatagttattacaaaatactgcagatattctcgcaattaaaaaaacacctgctgagctttctcctcaaaatgtcttcgttggatgaacgtgttcaacactcggacgcactgtttgtcacattcgggctgaatcagctcaatcagcaacagtaatttttctgggccatagaaattttcgattatcggctgatgcagctcaatgatacgtgcaacgccctcgaaaagcattgtcaaagtgtccgcataaagtacgtttttgcgtttgtcgtcagtcccaccggcctaaataaaataaaataaatggaatttaaagtgaaatgaacacctgcataatacgaaaattctggtcaccaagtgcctcaatttgaccacaaagatgagtcccaaaccgctgcagtccgctgttgtgttcgttgatcagaggaaaaagtttgaaaaagcgttccatcgatgccacgtcgccggaggactgcgcctcgtcaaaacgttgttcgatgatgcgctttaattcactggtcgcatttctaaggatttcataagaatttttcacggaatatccagcatctgaaaaaatgttgattagttaaaaacatttttaatggaaatggtttttccatgtcgacctttgctctcccgatggtcgcccattttgaaaacggccgtgtcaagcgtaaggaaacggtgaatatgttgtgctgcctcttcgtatttttcagctcgcaatgcctcctgcacgccgaatgcacaggttccaaggtcttttaagtcgttcactctttgcaaacactccacaacacggctttttccaagatccaacgcgacaactcgacaggaaatattttgagccaaggcagagacagaatcaagcgaattggccaattgacgagcattggacccgactctttcaaattcggcattaatgcgagcaactgattgatcgaacagacgctggaaattatcagtacctgaaatactaattaactgttaattttcaaacattttaaataaaataattattctaattgacctaaaactttctgcgtttgccgaaattcatctttgatccgtgatattatcgcttcctcctcctgtcttgccataaataattctgtacgaatttcattcatttgtctctcaatatcggtaagaggttttagtggtaagctgtcatcattagctctttctgctggtcgccatttcaattccgtcgttgtcaaatcatccatttccagtaaacaaataaacctaaaaaaattcattaggtgttcttgttaagacgattagctaaactaaaattcgaattttttttaaaccaaactttttttgttggtgttttggtataacaaaaaaattatgagtatccttcgtcttccgtacaatggaagggttttcacgtttttcaaaaaaaccctttttcaaatcaaataataaaaaatcaccaaaaaatgtaaaaattattttcaggaagtccgctgttacattactcactccgctaatatttaaaaggaatggttgttcaacacattaatgatgacgatgccttccaacaggcgatttcctccaatgcaaactctcggttgttgcttgtctgtgacttttttgcaaattggtaagtcattaatctgaaaatgtcatttcatctgtttacctaaactctcaataggtgtggaccgtgtagggcaattgcgcctctttttgattcactttccattcgatacgctgaaaaggcagtgtttctgaaaattgacgttgatcgctgtcgaggtgggactaaacagaaaatcacaagggacaaattaatgcttttttttactccatatttaatttttaaaggagaagagttgaaattaaatgatcgaatattttttgtcagctatgtactttcaggttcctgccaacaatacgcagttcgtgccatgccgacttttgtgattctgttaaatggtcaggaaatgggcagagtacagggcgctgatcccgctggacttgaacatttgatcgccagcttagcgaattccccggacattgggaaaggatctaccacaaagaaaactttggaagcgcatgttgccaattcagaagaaaggcgatggttggaaagattggtgtcacaatcgcaaagggtgcgccaaatgatttttaattatttgagtctcgaatttcagatgtcgatttatgaggacgaagtatcccaaacattggcactttcgcttattcccgctgaagaacttcgtgaaaaggcaacaacaaatggggaagtgaaccaatatgatttggccaaagggttgcttggctggttccatggcttcttcagctgggtaaaccatccaaaatgcgaaaagtgtggcgttgaaggaaaacccggtgatcgaggcgtacctatctatttatgtgagtttttaagagggcggcggaataccctcggaggaggagcgaaggaacggggccgatcgagttgagctgtttcgctgtgataaatgtggcgaccaaatccgtttcccacggtataacgacccgctcaaattgttggaaacgcggaaaggtcgttgtggagagtacgcaaactgttttacgctttgctgtcgatcaatgggatttcaaactcggtccagacaattttattttttaaatcgtttaagatttagctggatttctgacaatttggaccatgtttgggttgaagtttattcggaccaacttcagcgctggttgcattgtgatccctgcgaaaatgttattgacactccgttgatgtacgacaaagtcagtaggcaaataaggaaaatatattcgatgataattgtatgtaataaaaattagtaatttatatttctacccgtttaagggatggggaaagaaacatgcttatgtttttgcctttgccattgaccatgtccaagatgtcacatggcgttaccattttgaccaccgagcagcgatgaaaaggcgtaccagcgtgagagaacctgttcttcgcaactttttaaatgtgagcggagattcgatttagtaacatattttgtttgctaaagaagttgaacgcacgattggctcgtcaattgacaaatgatcgaactgccgggctgaaaaagcaaatggcctttgaattggtggagtttctcactgcccaccctcaacttcgtgatggaagcgaagcacagaatcagggccgtcgctcgggagctgaagcatggcgaaaggcccgtggtgaaagcaaataaagaaatttttataggatggacaaaggaagattattccccccccctccatttatgtataatcgtcgcacggtcatactgtatacactactgtacacctaaattagatttatttattgtctgaaaatgttaaaataaaactgaactgttctcttcaaaagcattaatttattttagtagtgacgccgttaaatttcttttgttatataaataatcaaattggaaagcatttcaagaaaccgaaaggaatggaaatcgaagaaaatggcaaagcgacttcatccgaggactccaacatgaaatggaaaactgaagaggataatttgtccggtaattataagtggttaaaaa

SEQ ID NO: 9154 - DNA, 1768 bp, Heterodera glycines
ccccccccctcgcccttcttcttcgtaggggcgggggtcgtgttttcccggccacgcctatcggcaccgcctgaccgcccgtcaccccttccccaaaagtttgttggaaaataaaagtgtggctgaatagcaaaaaaaaggtcggcagaaaaagaaaattttggaccttcaccttcgtatgaaaaatcggtcccgagacacccccccccctgtcccaatcgtccgtcgtatagcccttggtctgagacaccccttgaatatgtatgccttcacccaaaattgattaaattatatctcaacaaatacttccacccaaaccccaaatatcctcttgagacggtcccaggattttgaccttatgacgcacttttaatttcttagcagcagcagccacaacagcagcaacaacaacaatcactagctgcgcttgagtaccttttgcagctgaaaaatgcgcaattaagtgcaataatcgcatcagcaacgggcgaaaacactcaattgggcacaccggcggtgggcggacattcgcgtgagttcatccgaaaaaaagaatataaaacaagctaaaagggaatattaatggttttcgagtttatttgcataatcactgcttcaagttgcttcttccctgcccccttcgattctctctcttctcatgcaaaattcgctggccgatgtcgctggctctgctccccaaaatgtccaagtcggaagtgccgttccttcccttcctctgacggctaattcgtttgccaattttcccactaccacacacaatcagcagcagcaaaggtgggggaattcggcccgggtgcgctatattccctctagaagaatcattgttagctagaaaaatgtataaagggggtaggggggattgagctgctctctttgggctctaaaaattcaattgggcgtacatgccatgtctttagaatggtgcccgctcctcctcaaaatcagtcgtcatcgtcaacaaatgcgacgaatcagcagcatccctcacaacagcaccaaatgcatctccaacagcaacaagttacgaaggcatctcaaaaatattaaacatttgctataggttcaaaatgctgtcgcccaattgttgcgccaacaatttcccaccagcgcgcctggaattatgggaatgaacgctcttttgaacgcggccggaataagcggcggacaagcttttcctaacattggcacttttcctgtacatcagcaccaatttgacttacaatctgtgcgtatcccatcccatttcaacaatttatcatgcttttgtttgttcagctcgccgcggctgctcagccacatcatcaccaacagcagcagcagttgtcctccgctttgaacttgcaggcgttggttggggctggagcagtgcaccaaccgccgactcccatcacttccgccgcggcacccaataatattcccggcatttcgcaagaacttttattccaagcgactcttcttgcggcagcaaatttgaagtatcattcaggaaaagaagcaaaaatataataaatgctgaaatattaagcaatcccggactaattacgtcgaacacaacaccacaacagcaacagagaccaaaatgagaagaaggagagacaattaacaaatgttgtcgtcacaatttttagaaaaaactaaaatctaattataagatagtttatctttttttctttgaatatgttttgtcaatattatttgttttagaatggtaatcccatatacatatttttaattaggcaattgaact

SEQ ID NO: 9155 - DNA, 4461 bp, Heterodera glycines
  unsure (1)..(4461): unsure at all n locations
aaaaaaaatctttnccagcacgctnngaggatagcctaattcgccngggtggtcacgtgccgccggacgagcaaggctgggagagtccggtcgactcattttctccgcaaaggtcgcgacaaaatttttgttggatttaggcgtactgtatgtttatcgtatcttcaatagtttgcgttattagagtgtattaaactattaataacgttaagttcttatggcttttgaattaaagctgtttattgaaatattaattaaactgtgtgcctattccgtgagggggattactgtatcggtaccaaaagtatttggtttaaatattcctatggtattccgtttcttccttcctcaattacaattattgtttgattagccccataaaaaaataattttattaattaccgtaatacagcaagtcatggattgaatattatggattactgtctcaaaactcttgaattgtatacctttttacatatttttcttggcacagttccggcgtggacacaggacgacgggacggcgacgatgaagaggaggacatggagaaacggcgctttgaacggctgttacatgaaaaattggacatgccaacgtaaatttttaaaaatatatacgaaggcttttggaatgacatctttttttgcctagcccgaaatttatttcaagaaaaagctatcagaaaacccaaaagaaaaaaaaatcaattttaatgtttatagaataacgggaccttgatatactgagtgatttaactcattaattttaattgcacgaattaattaattaaagaagtgacaatggcctctatttggctcggacggtcgctcccgtgctaacaaaagcattggctgaggtgttgtttaaaaaataaaattaaaataagttttaaattcaaaaaaggtccttcttcgtcgtccggcaaatcccattgggtcagtcaaatttggggttatggtaattaacacagccaatcattagttggaatatatatttttgactgaatgatgcgcataattttaattaattgtgtcccataatatttataatgaattttcaatgaaaaatggtaaaaacaaaattggggtttttataaaatttaaatgcaaacagtgaaaaattcttatggttgggttatattcatatttatagttagttattcagtatatcactgacgctttttccgagagcaatcaacattctctcgacccttaggccgaaaaaaaattcttgattttttgggtcttttatatctattttttggacaatcaacccccctgggtctttctcttccccgggggcacattaacatgaatgttgctactcgcttcttactttctcgcaagggctttaataatgaagcccaagctcatcctttcctgtttttcatttttcagctttgtctccgaatggttggtccgttacattgaaaccggcgaggactattgaccctcgggggacggcggcggaggcgctgatcggagagactgacagaagcaaaacaaatccatggatcattaacacactttaattggccaacatttcattgtcccgctgactaattagtaaacttattgtattttaattatgtttggatatattcaatttgtaaattattttaaagtaaacaaattcgctatttgccagaattttgtaacatttttaaaattgtaaaatataaattagagaataattaaatcgtaattaattgacctccctcccttcttctgctgcccattattctcaccattgtttcagtgttttattgttcaattaatgtggggtcacgcaaagctcaacaaatgaaaaatctctcaacaaatcataattttttacttaaaaaaatgagagacaatttaaagaaactctaattaattttcatttgaataaaacttaatttttttatttataataataaaaatcaaaaattaatcggtgagtgataaattgggaagaagaaataattcgtgtgaatggatcaaatttgataaataataaaatctcatcactcttttaattcccaaaaaatattcaagaatttatctcttttttaaaaaataattaaaataatttaatttaatttaaatataattcaaatttcttttttaatttccaaaaattcaaaattaataaaaattaatataattattttaatacattaatatataattttgaattgtaataattttgttttatcttttaaagaccaaaaattaatcagtgagtgaatgggaaaaagcacattatttgcatggcttatttttttgtatataaaaagacttaaaataattttaggaatttatttactaattatttgcacaaaaataagtatataattttataacaatttttattaatttgccaattttgtcaaggaaaaaagctcaaaatattttctacaaaaatgtcggacaaaccttcagcagaagatggagagcatgaacaacagaagaaaatgaaatgggaaatgtaattaatttaaaattttaattttaatttaaaatttattacttttaacagttggtcacaaaattttggggaaaaactttgaatgtaaaatataaaagcaaaaaattgtaaaacccaaacccaaagcccgaaaaatcccgacttttcccgcccgagggcgaaacctcgaatttaattatactggtagaaatatatatcaaatttatattttaatttgaataaaattcattatttgaatttgaattttattaaaaagtgccaaattttagcccaatttgtgccgacgattggctggcggtgtttgctttgctgccgccgcgtcaacttggccttgaaatcgcactgctcagcccgcgctttgaccgcatggtggacgaacacttcaaaacgcgtcgttgggcattgaaatattttcgcattaaaagcaaaattggcgagaatggcacgaaggaaatgcgaatcaaaaatttcaatcgaaaagtggcaccgattgtgccaattccgcgcattccgttgccggacaaagtcgtcgacttctccggcatttcaatacggtaaataaaacaaattgatgggaatattacttaatcacgcgggatattagagaccggataattggggccggaggaatcccgaccgacggaatcccggtccccatcaatcccgatgaattacaaaacggctcgtgacggatcctaaggttgggacccgaatttaatcaaatggatccctaaaaaatcccccggaatcccgattctcgacccgtccgttctctagcagaaatgaaaatgccaaaaatgggaggaccacagaaattatttagaaagggcaaaaagagtaaaataatataataaatttaaaagatattagggaaacaaagttggggtcgtgttttgtcggggacaacaagttcggagttgcccaaattggtccggcgtttatcagagttggaagcttcggggtcggaggcggggtcaggaataagttgaaaatgccaaaaaatgccagagtttttacctgtgataaaaacccaaaattcagccaaatttccccaactcaattttagttacattgacaatgatgtgatcacttttctccaacgttttcaacgccttttcgcctcttgcgcaataaatctgagcatcaaaacaaaaagtggccgcaatttaaaatccattgaacgtttcatttggccaatgatccgacaaaacatttgtggcattattttttgcaaagccaaagattttcgccgtctccgaaagaatgccccgtccattctccgtcacattttccgcatcgatgacgataaaagtccgcggaaaataccactccaatcagtgtactttgataagggcgaattgcccaaattgccaactgccgttgaaagtgcccatgacaatggcaatgccaatgccaaagtgccgttgaacgaaagcgaagcgttgaccaaatggttgttctcctctcgtccggagaacgatttgccgcccaaagtgttgcgatgccgtgtctataactctgatattgagagttggattgcgagaattgaacaatacaaaacggtgatggtcaattttggttttaaatttgtgctgtttgtagtttaacatttctggggatgggtacggtagagccaaaaactcaaaaacattttctagtaatgtggggatatggtagagttaggcggtatgatagatcgacaataaggttattgccacattggcactttttaaatatttaggcgagtgtacggtaggctcaaaaaatgtaccgtttgccaaccaatgattgattggctcctttgtttaggcatttgtgaatggcacttctcctcgtgccaatttcatcgtccttttcaaatcctggcctctcttttcttaccgcaatcgctcaatggcggacttcgctttgaaaaatcattcaacggcggaacgattaagatttagaccattaaaaccagggtagccaattgaaaaaatttgggagtttttg

SEQ ID NO: 9156 - DNA, 4110 bp, Heterodera glycines
ttaattgcccttgtttgttctctacccaaattcctttgggcggaggagcaccagtggggtccgcatgaatagcgaacatcccttcacccgtagaaggggtgattatttggtgtgggtgcaattttgggtctttcagaccagctggagccctgcgctcattcaacaaagtcatgcgaaagaagcgaagctcttccggagtttgttgttggagaagctcagtgagctgctcacgcgcctgcttatatgcctgcgcagcaggatgatgcaattggatcatttgttctaagatctcaagagtctgctcatttagctggtgaccctgcacaaactcatcttcgtttgtgattttctccccagtaaacctggggttgtttcgacgctgttccatagcctcgactgggtccagaatgtacaactggccaaagccaggaatctgagttgtaccagcctgcatgctgcttatgcggcgatggaattctccgttaagaataacggccatcggaccgccagcagggcttggtttgttgccagcggaaacgctggcaaattggagcaggttgttataacgcgacatgtgtcgaacaaattctttcccttcacgggattgcttattccccacaatcagctgtttgagctcatcaggatgcgggttaagcattggcagtacaactcttcccttccggcagcaaatgctactgtcttcatgtgagaagagatgtgcagcgcaatcggcgcattttttgtcaccgagtttcccggagtcacaatattccgggaaatgtttggctgctgctgcagcgcattgccaccccttgtgaaatgcagagcaacgccgtgtgatcggcgttgccactcccagcgaatttgctggcggggggcgtttaggcgccggtgaaggcgaacggctaacagaagctgaatgccttttttgaacgcgcattgatcgccttggtggcgtcttaggtctgatgaaaattacatcatcagcctgcgcaattggctcttgcgggatgcaagactccgacaccaaaccaagcgtgtcagcttggttttcaccggccacttgggcttgggtgagaatggcatcaactgcctgtccacttgtctgtggttcgatgatcattatatcatcatgttcatcaacttccattagctcagcggccttggatgtcgactgcacctcatccgcatgtcgatagacaattgggcaaggagttggtaccccttccctcggatgatatggcacattgtctgtgccataaagctcgttaatgtgccacaatatgcgccgcttttcataattgatggataaatcaggcagaacaaatgtgcgattgttcataagccatgactcagcatacaggcacacgaagtacccacaactattaccatcgtgttgggccgtcagatttacggcattaaaaatcccggttaaaactgttgacggcaaaatatccgaaatgatatttttaattttattcgtcagttgcggatccaacctgccatatgtggtaggcaaagaatcggcaaaatgagtgccaaattgcacatcatggacaatgagagtccaatgtccagggaaatgtactggcaaaagtataacttctgccggaacattagggtcgtacccaaatgtcatatttttgtaaggcatgactctgtccaggccattgctccataccattgggtcaacaacgaccacttttcgttgtgatatggttgccaagtatgccaagtatgtggcagcaaagccgtcattgagaaactgggtcagatcattccaacaggtctcaatgtatcttggaccagatctaggggcaagcggtgtttcgccatcacgttcgtaaaggccaattgctgcccatttccaaattttgcaggaaaaatttcgcgtggttgcgaaattgatttgcacagtgttgaaatcaattttttcagccacattaggcaaaaccgccacatttgtgccagcttcagagctctgatccattgacgagccttcgctaattgaagcatctgttttggacctgcctggaccaccacttcttttgctgggtcgtccacggcttttttgcgtggagactggcgttgaagcaattgcttcagtagcaaacttgggtcggttaacttcggcgaccttcccttttttgctgcacggcgatgtcccaatattttgagtggccggagtgatttgtgtgtcaattgatgacacactattttgcgaagccgtgatagactccgctccggttttcgggggtcttccccgtcttttacttccaatggaagaagccggcgtgctcaattgcaaagcacttaaatttggggtgttaaaaccccggggcgatgccgccccattcccatctgcactcaatgggttgtccagaataggacagtttgaattgccctgaggagggcaatttgggataggtgagcgacctggaatgacagattgctccgtccgtcgcaggtgctcttcttgcttccttcttttcaactcacgatctttagaaggcatcttaaatacaaaatcagtgtgaaaattgggtgtaacaaaaatatgaaggaaattaaccaatgagtgcacacaaaatcaaatatttatgcaaatgaagtaataatgtgaaaaatggtgtcgtttcttcgcttgccacaaatgaagccgctgttgaaatctatcagccagggctcacctatcatcccatctgccctaagggcactgagtgcagagagttatcattattggttaaggaactaatcgataaccattgtgaaccacaatctcaagaaagagcaggtccttgaaccaccattcccaaattgaggtctttattgtcaccaaggttttacttgataagttttggttaactccgatatcctatgttacctctcaccagtccactggtcttggcaaagtgcgggaccagcttcgcgccggatgttggccggtaacaataaggaaatcatcattgtaaaccgttgtggcccacaatcctcaaaaggcaggtcctcgaaccacaatcccaagaagggcaggtccttattttctttagggtctttgcgtcgcccgacatgcacttggtttcacttcattgagaagctgacacattacattgtaaatataatggaaaccggaagtgccctaatgcagtcattgatatataataaaaagacgatttaaatgtatcccgtgagggacagctctatgttgaccactatcccatgaggggcaggtccttgttgaccacaatcccataaggggcaggtcgttgttgaccacaatcccataagaggcaggtcgttgttgaccacaatcccataacgggcaggtctttgttgaccacaatcccataacgggcaggtccttgttgaccacaatcccataacgggcaggtcgttattaaccacaatcccataaggggcaggtcgttgttgaccacaatcccataaggggcaggtcgttttgaccacaatcccataaggggcaggtcgttgttgaccacaatcccataaggggcaggtcgttgttgaccacaatcccataaggggcaggtcgttgttgaccacaatcccataaggggcaggtcgttgttgaccacaatcccataaggggcaggtcgttgttgaccacaatcccataaggggcaggtcgttgttgaccacaatcccataaggggcaggtcttggttcaccacaatcccaatggctagtgtaggaatcctacgctaggtcattagtcagcgtaggaatcctacgctaggtttttcaaaaatgatccgaggaagcgattttccactctcttttacagactttgagctcgagtaggataactacattagcctagtgtaggaaagctagtgtaggaatcctacgctaggtcattagtcagcgtaggaatcctacgctaggtttttcaaaaatgatccgaggaagcgattttccactcccttttatagactttgagctcgagtatgataactacattagcctagtgtaggaaaggctagtgtaggaatcctacgctaggtcatagtcagcgtaggattcctacgctaggtttttcaaaaatgatccgggaagcgattttccactcccttttatagactttgagct

SEQ ID NO: 9157 - DNA, 975 bp, Heterodera glycines
ttttcgaatatttaaatgctaaatcgaattatccaatatttggaggggtcaaagtcgagccacttccgaaattatacattcattttcaattccttgcagggaaatgtctttgttcaccaaatgccccgatggctttaccaatctgcagctgatcgaactgtttcgactcgactggcgccgcattcgatcagaggaggaccttctcgcccactccgatcatttgcgcgacggtccgttgggccgcggctgtctgatcggcccgaccaactccgccgactgtttgcactgtttcgagcgtctccgacgggcgattgagcaggtggaagccgtccactgggcatttgccaatttgctgaaccgttttgactgtcgtctcgctaaatttggcctcgcttccgcgacacagcccttctcgcccaacacgacgtgccacaattgcgcggttagtgccaaattcaaatgccaaaaataggggtgaatttggggtacgtctcttttcctcctccgaattgcgcttcatttgcttcccttcaaaggaatggtatcgcaaatggctgctcgtcaatttggtcgacctttggaagtacccacgtgagctttgctttccgttttcttcctttgatccctttgctcgtttagcttgtgtcaattggtgctattacacccaattagcgtgtccccatttggccactaacaaagtggtcgaatttgcaggacatcccgtgtttttgtgcaaaggtaacccaaaattctcaatagatgaatgattccgaacaattcttattcccatgcaatgaatgacccaaccaatgcttctcccccccccccccccccgcttaatcttttccctccccccacacctccgcctgggatggcgcaggccattttggcgcaagactctatatcattttgatttcacagcaaaattaaaaaatgcttggtatgattttaagtggcttgatagtgcctattaac

SEQ ID NO: 9158 - DNA, 4396 bp, Heterodera glycines
atataattttttgaaattttgcaggctaataaagaacatttagacctattgattaatatcaacattattttatttggtcgaattaaaaaaaagttatgaatctttaaacttgcctgcgccaaaatgaccccgaccccctccgcctcaccttccctttgtcatttgaggattttgggcaatcaaagaaaaaatatttttatatcaaaataaataatgccttctttcccgaagaccaacgggaagtgctcaaatgtcttggtactcaaatgtccgtgttggtactcaaatgtcagtaccccttctcgtcccccctctcccctcccctcctctcctcccacggcttttccattgattgtttccccaattattgtcaccttttgcctcagatcagcgactttcggcggagcagcattctctgaactgttcatgtttgcacccgtgcgatatggtggatgaccgattgacaaacgcagcgcaattgaacagcagcagaaacgaccaatcgcaacagcgaaaggaaaagggcggcgaaagacaacggaggccaaggccatccccccggggcaaacggtcgccggccgaggtcgaaccgccgttcgactttttcccggccgcaatttattgtgagcggaggagagaaatgtgcgcacggagcgaaaagggacgaaaatagggcaaacaaaaggaagacagagaaaaaagcgagcagtgatcagtcagagacgaaaaagcagcagagagagagagagagagaaggacagagaaaagagacaaaaaacaaaggggacgaagagacaatgctacgcgaagagggcaggaagagaagcatagcgaaacgaaaagccatgcgaacccatccaaaactcaactcattcctctcatcgatcactttgttaagttgcctttaacaaaacaaacaaagaaaaactgtacaatataatggacgggttcaattggcaaaataattaatggcacttaaaaaggggacataacagtgtttaaaggtccaacaaacatgatcaagttaatctcgcgaaaagactattaatttcctttatagacaactttaaatttataaaacacacttacatattagcatatctgctcattcatccaaaataaggtcgcccctatcttaggggcggaaagtccgtgggattcctagggacaaaaagggcttattcgtgcatttcctatcgaaataaaaccacagaaaaaatagaaagtcctaagaatcccatccctaattataagatcaatttggaaaggctacgggttttccgttggtccgattttgttttcagtttcttaagttaggttagcaattagcatgaatctttcagggtttttcctactttgaattgtgaacagttaaattttgagtgtattttgtagacgattttttatttaaaattaaaaagcagcaaaacaaaaatatacaaaaaggaaaagccaaataatacaataaagcgaattgtaatttgaatgaataggtaaggtaagtggcttcacttttactctccaaaatattcatattatttgacgttttttgttagcactgattcgaatgttaagagggaaaaaagagaattgaaagtttgaggacaaacaaatcaaataaatgcacatccaaagaattaatgaatgaatcaattaaattcatttataatttcataaaacgaatgatggctttaataatgtttctgcgtgtgttcaatgctttcaccaattgttcagtttggtgttcagcgacataaaataaatttgggaggaggagcctttggcggacgaaaagaacactttgtcgttgcgttcacaaaggaatttgagcttctgcgcctttttgtgcatgaaaacgccttaaaaacagaggaccaattagctaaccgacattgccacaatttctatggcacatttccaatggcacactttctatggcattctttccactctttttatggcatttttcttccctcccctttttttgctcaccgtccaaatgccccgtctccacgttgcgaatttcgatggctttgtttccccagcccattatttggtttgtggaaatgtaagctgaattcgttaacttttgccgttcattggcccattttggcacttaccaacggaagagggaatttcgctccattgcaattgaacattcttcacaattttgccgtaagtgttcacgtagacgccctcatctgtcgattgggttacggtattggttagggcctactgtacgtgactcccttggcttactatcgtagcacaacagtaattgcattccgttggtattcggcagaatcacaatgcaatgcgggcacatcccttggcacattgtgctcttcaaaagtgtatggtgctttttaatttgccaaaattacattcaaatggcacctgttgaggcgagtaaatgtcgtaaatggacgctgaaaaggtaaattttggcggcgaatgccaatgagtcattgtggggccaacccgagtccaagtcgatggcgtggaagccggcaaggctgccgtaaagcaccttcagacgcgcgttctcttcgatggtcaaatcgacgattaccggcgcatgggacaattggccaaaactctgaaagaagagaagcgaccgattgttgtgggcttaccatgagtaccttgaaggccatgaatttgttgtaaggctaaattcggatatttaaacaaataaagggaaaaaagagctggcccttcccactgactttgggtgcccacgcgtaaatggaaatggagtcctcaatgccaatcaccaaaaatttgatgcgctcatagcgcactgaacggaacaaatgcggaaggccaagccttggcgccgtttaccgattttgaaatgagtggcgcattggaattcgccgacatttgtccatccgttccttttctccgtctgttgcaactgaacaaagccatgtttctgagcttggcttttcctttggccttcccaccccttcagtccgcagaatcttttgcttcagccacgagaggtaataaacgcggacgcgccgtttctttccgctgattgtcaccaaaatgttctgtccctccatgacggacatttggtcaaagcgacggcgagtgatcagatggtaaactgacaaagcaattagcacggaatggcattggccatcctttgatcaccgctttacctttgccttggccacttctgtccaacagcatcagacccgtgtccgtgcctgaaattgcgcatgagaaaatgccatggcacactttgacggaaaagaatttaaatgccaattaaaaataaaaagctgaaagcctttgtaagtgcttgtcactctcacctatcagcagattaaccccccaaagagcagcacacaaaatttccccgttgaatcgctttttgtattttctaatctccggcgcgtctccgtcgctcgcggcactgtttggattcacattcacttggaccttaaaattcgatcattgtctaaatttgtgccgcccccgttttccctttacttggttcggattcggcatccgtccgggtcggtttacggtgcccgaatgaatggcgcccgccagcggcccctcgttgctgtctctgacgagtgcggtgccccctccggcgaaatatccgatgaatgacttttcccgctccttcggcctcacttggcattgctcttcgcttctcccctcggcgttcctcaacttcagttggcccggtctcttcagtgtttggaccgggtcctccaccatttcctcctcctccgccctttgctcttctctcaaaatgacttgggccacccgatttacgtaaacgatttgctcttccgtcggtgtgtcctcaattgccgatgagccgtggccactgacttcggacaaaggctttttgccgtgccgatggacgaccattccccccagtgatcggctgtccatttccacgcccgtcccttccgactcatccgacgaggaatcgaagtcgtcgcttcgcagtggcgaacgctgctgcacaagaaatggaaaatcaccgccaaaagtactgccattgtaacccgtctgccgtgccattgtccctcccgccctaagacccccaactactggggcacctaattaccctaatcacccctcccgtgccgtcccctttccctccctcgcacttctggcactgagcacggcttgacaatgcctgccactctgttcagacttccccgtgactccgtccgctgccttttctcctccgccctccgcaacaaattgctgctgttgctgcgccgtcgccactgcggggaaacggacgaacggagcaccaaagtgccgttgttattgttgttgccattgtcaaagtgtgcgctttcgcaatgcgtcggcgttgggggcaaaggtttgtcgtgggaatcgttgaaagcgttcg

SEQ ID NO: 9159 - DNA, 3505 bp, Heterodera glycines
  unsure (1)..(3505): unsure at all n locations
ttctaataattttntggcacgcaaatgaccaaaaagcgccattttcaaagatacctttcaccgtttaggacccaccaaattatgcaattggcccttttcagcggcctaagttttgatgagagaaaataaagcgatgaacggggcaaatgaattgggcgaatgaaatgctctcgaaactcttttctcgagggccggcggagattcccccgcctttgttctttttccctcccatcggcagaatgacccatcactttccttaaaacttccgacgattattacacaacggaaggacacaaaacaaaacgaacgatgggaagcgaaaatgagaaaatggaagaataattagtggaaaagagaaagtcatttggggggggggggggaatcagaagcaaaaaatgggaacaattggaaaaagggaattcgaaatgaattttaaattaaatgcaaaatgattcttaaaaaattaaaatttcatttagcgttcgtttattttttcccttagattttaatattattttatacttttttttgaagtgactgaaaatggcggacaattgccaattcaatcggcaaatttatgagccagcaaacggaaaacggcacaatgagcaaataaaagcagaaatgatccgattggtttggtcggcaagtcaaattcatcggagcgaaatgatcggacgcacttttgggcagaaccgcgccaaaagggcacacagcccattgaaaatattcgcagttcttctatttacaattcacttttttatcaaaatataaaaaagtccgaaattcgtaaaaaaaagccctaaaaatattttggatggaccaataaatgtcaattgtcttccttctacctctcttcgtgtgcatatgccataccaattgaccttgtcttgccacgatcgtacggattaatcccccgaccattaatccctccccccccgccattgtccccttccccctctcattggcaatggctaatcgcatcgcccgccaattccatggcttttattaaaaaaaatgttgcttcactcggtcaatgacgacaaattaaacacttttcttaagctgtggtggtgttaattgagttggggtctgttcttccgttctcccccctcccaatttcccccaattttacggctgtgaatgaatgacacaaataaatacatttgcgtcttcccttccccccgccccctcccatattcataaaccattcgtggcatccctcgagggcattggagcgagtgctttctcccccggggctcaaatttgattaagcaattaattccctccattccaaatggcaacagcttttccagccagtcagacagctccttcctgggacatgcttgttccagtcaatttattattagctgcataattaatgggctttgctgagcaacgacgggggaaggggattagtggcgagcagagaattagtgggattaaggtgggacaatggtttaatgagaatgatgccgggggagtgaatggcacggcacgactttggcaactgtcgtgccgttggcagaatgattttccgatttcgcggatttgaataagttttctttttgttgcgctcacatcttctcttctaaagaggcgcgaattttgcacaaccatcggcaaatatttgcgaattttcacttcggcaccaaaaagagacaaaaaacaaagcaaagagagaacaatcatcgcaaagaagaagctccacattttgtgaatgggtggggaaggacggcacttcaagacaaaatgccaaaaacaaacaaacgcagttggaacgccattgtcgggaattgggagaaaggcgccgacgggtcaacgagtacttttgccaatttgtcctcaacagaaaacaccgaagaaagaaagtgccaatgccaatcaatcagaagtaggcgaactttcaaacaaatgtgaggacgacaaatgcgcaagtttcagcaacaatttgaactgctagcccattttgtcatccattaacgtaaaatacgaccctttcccgaaacaatcggtcgacccctcccaaaaatgacaatggaatgtcataataaatgccttcccgtgattgacaattgtgtagaaagggtgggacgaacagttgaagatgggtatggtagtggagaagtttattgccgctttggtacctgtcaatgggtgcaaaatgccatggcacgaacttttgggctgacctttgaatgacaaagaccgattaattagggggagagcatccatttatgaagaggtattaggcaaatgtaatatgagcagacaaaaaaggtaagaaaagggggggggaggggggggggaatgagggaccacccaaatgccacccaaaatgggtcaccagcgggcaatgttggaactccggagaatattaatgagttttaacgctaaacgaccttaaaaagactaattcaaatggagaaaaaatattcggcggtaattttttgtgacagattttcatcattcgctcaatgagaggagacatgaaaattgatgaatgactgaagggaagcgggcgggggagaagaggtggtaattaaggggtggggtatctttgttatatcttaattttattatttttatccccctttctcacacccgtatcgtttcataatccctccccaatctctcctgtccccccccctcctctcgccccccccttcctccgcttctttgcctcgcttaataattaccccgaattgctttgtctccgcttcgcttttcccccaatttctcttccgtttggggtcacattttgggctttgtcgtctcatcttttctttgcggtaaacatcaaatcttgcaacttgacgaaacaaagccttccgcgaccgactcactcatcactctttggcgccgaagggctcaattagtccgagtaccccccaccccggcaatgttttcctattgggcattttctgtgatgggaatggccttggatcggcgatgggggataatggaactaaacaagcgaggaaagagaggaacggagctgcgaatggggataatccttctgttggattaagccgaaacggataatatgtctaattattgagtaattaatgagtttatcttatcaaaagacaaacaattaattaagtaattaatgaattattttataaagttttatggcatgacaaaaaaaatattgcacaaaaaatgtaaaacaattgacaaaattacaaaagtaagtgaatgactgaaaagaaatgaaaaattaacaaaattagggttgagaatttattttaaaacaataaattaattgtttgttttgcattaagtgaaacctaaaagtaagaaaattttaataaaaatgtgttgcattatggccaaaaatattaatagtaaaaataaaaataaaaaggaaaataataataagaatttttaattcaatttaaaaaatcaaagaaataatgccgacaggctcattcaccacagtttgaacaaatgtgccaaaatccgcccaaaaattccttccggcgacttttcgctgctcatc

SEQ ID NO: 9160 - DNA, 1867 bp, Heterodera glycines
taaagggctgaatttaagaaagaattgtaactaatttcataacaaatacaaatactcatgattgataaagcttacaaagttaggttatggctattattttttgtaatttgccgccctttcttaccgtatttttggtggattcatttcgccgttggcaatggcaaaatccactgtcaatgcccttggggaaagagtgaggcgcaaaaagggctgatgaacggcacagactttggtgatgctgggccatgtccaagtcgaaaaggtcgggcagagacaattgggagaaggggggcgacggacacggagcagcgggacggggccaaaaagtgaacatctgaggaaattggcgtaaaagcgatggaaatgccggaaaatgccgaaaaacactcaccattttggcacaaaaaagcaataaaacaaagcaaaatattaagaaaaaggatcaagcaacggagaagtgattgattttaaggagaaatctaaatttgaaaaaattaaactcgcagtaaaataatgagaatggggcgggggaagataaattggggacgaattggcactttggaattgatgagaatggcgcaagaagggaacggatcaatgaccaaccaaatgaaaacaatgaaatgaattatgaacattgaaatggaaatgaatggcaaatgattgtccgtccgtttggtcgcggggcggagccaaaaaattatggcgagaaatgaatgaatgaccaggcgaaacgcaacctgagctgatggaccgaccgaatgactgactgttggacggcacggggcggggcggggtgagcgaatgatttgcgcattgggaaaaacggaagggaaatgagaaaatgggagaggagggaaaggaagatgggggaaaggaggaagaggaatagggaaagggaggaagagaaagaggaaaagggaggaagagaaagaggaaaaggaagagggaaaagaagaaagaggaaaagagaggaaaataagggaaaggaggaagaagaagaagagagagagagagatagagcgatagagagagagtgagagagagagaagaacaaaagaggaaaagaagggaaatggggaaaaggtgagaagaaataaacaaaattatcttttattttcgaaatttcatttcatttcttatttctaccgtaattaattaattacaccaattagcaaaggaatgtccgtggtgagttacgaaactcatctcccccccccccattctttttgctttttccatttctctccccgcggcttttgcgatttcgaaattttcatttgtgtccgtctctttacacttttgtaccaaatttcatcactccgccatgttcttgtcttcaccaaccagtttgtttgaatcttcgaaagaccgttaaaataatgcggcggcggtggaagggtccgccggtgatggctttttgcgataagccgagggggcaaaaaaaggataaattattaatgattggctgattaattaatcggttcttctaaaaaccgaggctaaatgaccttgaattttcatttggtcgtgtggtcaatgcgaacagaagcgaattgatctgttgaactgaatttcgaaattaggtcaaatttgatggatcgtttaaatgctaatttatgaatttgcctttcgtcgccccgcccctttcctaccgtatttatttttctttttttctttttctttttgtttcctttcaattaataatttttgcatggcttctctcgcaaatcggcaaaaacaaaggaatggaagacaataataataaacgccgaaaatgacctgttgtggagaaattcggattaaataatccgctgaaaccctttggcggctgagtttcgacgaatgattggcggcgaatgggcgg

SEQ ID NO: 9161 - DNA, 1116 bp, Heterodera glycines
agaaaaaaatgaacaatcatttcatagttttggtatactatccaaaaatacaggttatttcttttccaaataaacataagattcctcaataaaggagacgattcctatcatcgagatatcacataaagtccaattaaacaacgccattcaggcagttgcgtaaaagtgtcagtgtttcatctcttaaacataatggcagaaatcggacaagaataaatcggtgagcagatgtcgggggtcatttagtggggggggggaggggaaattgcgcgaaaattggccaattgaacacggcggcaaagcttttgatcactgaaaaacattcccttggggcaacaaaatcattcccacggcctcatgagaaaaaacagcgaaaagggacgaaagatcaaattgcaaagaaaagaacagacagagggacggaacatcattactcaacacaatcaaaacagaagaaaaagaggagggagagcaaagcgaaccgaacggacggagaaagggagacaaaccgagaaaagggaaaagccaatgtcaagaaaagggacaaaggagcaaaaaggggcaaagtcaatgccaagaaaagggacaaacgatcaaaaaggggaaaagccaatgccaagaaaagggacaaaggagcaaaaaggggaaaagccaaggaaaaggaaagggacaaacaatcaaaaagtggaaaagccaatgccaagaaaagggacaaacgatcaaaaaggggaaaagccaatgccaagaaaagggacaaaggagaaaaaagtggaaaagccaaggaaaaggaaagggacaaacaatcaaaaagtggaaaagccaatgccaagaaaagggacaaacgatcaaaaaggggaaaagccaatgccaagaaaagggacaaaggagaaaaaagtggaaaagccaaggaaaaggaaagggacaaaggagcaaaaaggggaaaagccaaggaaaaggaaagggacaaacaatcaaaaagtggaaaagccaatgccaagaaaagggacaaaggagcaaaaaggggaaaagccaaggaaaaggaaagggacaaacaatcaaaaagtggaaaagccctatgaagaaaaagggacaaacgatcaaaaaggggaaaagcca

SEQ ID NO: 9162 - DNA, 1032 bp, Heterodera glycines
ttttgtttgttttttttcagagaaaatttataaattataattaagaataaaacttaaatctttttattttcattaaacatattttttcaccaagcacgtctccgagatataacgttgctggaaaatcaacaaaaaaaaaaaaatttaaatttctaatgagcattcaattttcaatttttattaatcaattttttttaaattgaatttaatgttccgcttaaaaagttttatattattgtacattgaattattttataatttttttttaataaattaacccaactcattgaacatttaatttaatctagttattataattatttataaacaacttttacaaaattaaatacaaaaattagttgttataatatcatcattcacaatacctttttacgaattatttttttttaattctaaattatatttaatgttccgctctaataaatttagatgcagcttttccacctataaaaattagccttgagctttgagttccttaaattcaaacagctgtctttattttaacattgatcgaatcattctggccaaacaaaaaccatgaaaaattaacacattcacttaaactcaaagtatttcttgataacacttgataaatataatattttaaaacatttaaaaattgcaatttcatttaagcaggttaaattgaaatgagtttttcattgagttcaaaagacatcaaaaacccgcagtgcgcatgttgtgaaaaggaagtgccatttggtgacaaatttagtgtcgatcgattgacgagttggcattttttgtcattaaacttcaattttaaaaatctataaacaaaaaaaaatttgctatttttcagttcacaaatcatgtttcaaatgtgccatttgcgacaaggcgcttgaggttggctcttgttcgcttgagcgtgggctgtcccgctacgaccattgtgggttttgttggggacacatgtgagaataaaaaaaatctaaaaaataagtaaaaacaaaattaaaatttttgcataaatttatgattttttta

SEQ ID NO: 9163 - DNA, 2775 bp, Heterodera glycines
cgcgctccaattgcatgaaccctgttgcagtggcttgtcacaaatagcacatttgaagcacgatttatggactaaattgatgcgaataaaaaaatctccctttggcagggatagataaagtctttgttttctttttttaaattttttttgggtccaatctttgagaaataaaaattattaaaagtgctattgagcgggagccgataataaagttaaattttatataaaaacttaattaacatacttgttagtctgtccacgacaattttgtctgttggcggcacatctttttcacatatttggcacaacgggcttttgaaatctctggagctcagacaaaaactcattttttttctaaatataatttcttaaaatggctcatggacaaaatggtcagcctatactactgatacagtatatttttttgtcgtaatatacatatcgtatctttgacgcattttttcggacaaacgtaattaaaaaataaaaattccgttaaagcaaatttgtattcaatttgactgaacaattcaatgtgctttctctcaatttgttttaagccacaatttgtttttgagtcagtgaacagctgtttgagtaagtaaaatgaacacattgcttttgaaagaaaaatttttttttattttttatatttattttgcctaatcaataaggaaaagcattgatagttgaaaatatttgaaaagttgaaaaaatgaatgaaaaaaaattagtttaaataaattaattaatttgatggattaaatatagtgagtgagtagattcaaacatatatatatatatatatgtattagaggtatttatatatttttttaattaaaatttaggaaattattttcaaaaatcttctcgtccaaaacaacaaaaataatttctgcctttttggaagagcaattaaaaattaattttgtgtccttcatcatggacttcttgtccataataagcatactttttgtcttagaatgaatgtgtcgataaaataaattggcacccacattttttttttgttcttggcaatttattttgacgagaaatttttatgtttccctggagattggaagggcaaggcgaattttaggagtaaaaattaaaaacaaaaattattgccaaaaaatttttttttggcaatatcttcaatgagcttaaaagcagtcatttttgaacattacttctaaaaaacaaaaaaaaaatttcagctctctccaagatggggccaaagatagtaatctatttgcttggcattggggtactgtggatttttgccgtagtccaatgtttaccggtcaatggaatgtctgcctatggtatgccaaaaatgtttaaatagagaaatatatataataaaaaaaaatgataaaagcatttaaaaaaatgctcaaacaatgcaaaggcaacaaatattcggcgcggttttaaaattttatgaaatagagacgaactgactcccagaaaaaattatcgtaagtttcacccagtaattaatttttgtttcttttgatttatattgtatgaagatttcttgtcccggccatccagaaccggtccggaccgttaaaattcagacccggcccagcctttcagtgcttaatagcatgctgaactaaagcaattatccttaaaatataccgtaattaaatattatctcttttgtttaatttttatgcaaattctattaaataaataattcatttattattattttttaaattttttaattggctgcagttgttgacgaccgtcctgtccatttgtcgctgaagcgtgccattggaatttactggaatgccatccaataccctggaatcgaaaaacgtaccgcctacccctatccaagtccgacggatatcaaatacattggatttgggcgaaaacgtgcaacatttgatggtgccgacaaatgaatttaacaatttttttaaggatgaacaacaaacaagcaaattaatgtgtgaattgtgagattgcgattagaaaaaaaaaagtttttaaaattattttaaaaataatttgatttcattaaaaatttaacaatttttttgacaatgtaattatgactgaataaactaaaaaaatgaaataggcacaaagtatcataaaaatgaaatagcatagaatcccatttaagtatttaaaaataacatttcaatatctttaaaaatccggtttttagtgatacatttttagaaaatttttttaaatttcccaagaaattttaaaaattcagaaatctgaaaatatatataaaaaaaagaaaatatgtaagaaaaaattgttaaattttgggtttttttgttactaatcagtgcatgtaaaatccaggaaaaaatatcgtatttacataattttgccagccctaataatcattttatagtgatttaatttatttaaatcaaaatcagttcaaatttgaattttaattatttcgtaccggcatttatctggttggccttgtgaacatcgtgggaattttttcagcaatttctttgttaaaatgtactcagtggcgaattttttaaaattcccacttcaattttttgcatataaaagttatgcgattttgaaatacatttattaaatcaaaataatttcattttaaaattattaaagttttcaaaaattatactgtgaagaaagaaaatgaattcttctacggcggaagtgcaagtcacaagggaatatgaggtaaaataaaactttaacaatgccctagtaggaataataattaaatgaataatattaattttaattccagac

SEQ ID NO: 9164 - DNA, 1076 bp, Heterodera glycines
  unsure (1)..(1076): unsure at all n locations
tagaatttctaattatttaaaatttaaatacatataaatctttacaggggnnggaaaanagaagaaagaaccncaaaaanggctttatacaggtgnnaggnaanangagnaaancaccaccaccgggngaaggananaaancnacgaaanaanagcactttaaaaggannnnnnnnannnannnatananaaaannanaaannnannannaannagnaannancaggnncncccnngnnnannngnaaanncccaancacacaaancanaaaaacccancaanncannacacnngacgancggncnaaanannncanngactcccataatgaatgaacaatgctcagcacgcgttgagcatttgttttttcatcactagcagcaccgaaaatggtttttggtaattttatttcattatccaatgcatcttttagcgcgaaaatattgtatgataatgtctaaattatgtataaacattaccaagcatacagtgttggaaaaaaagtttcttgactaaaatacacagaaaatttattcaatgattaataaaaaaaaataataatttgtcagaaagaccattgcaaaaattttgaatttatgtaaattttttttcaaaaaattttaaatttgaatacttttcctattataaaatcaaaaaagtcatttttttatttatgatatttaaaaaacaaaacatatttcgatagaaaaaaataaacttttatcaatatgaatttttgccgcaaatcatatgaaaaaaattttgccggaaatcatttgaaaatttgtgacttattattgattttaaatattacaattaaattttgcccaataaaatttaactcaaaaataaaaatttcgatataaataaataattgtttaataaaggattaatttttaattaatttatttttttttgtaatataaaaaacttagttatatatatattaattgcttttgacctttttgtcattatgacaattgctgcaatgtgaaaaaagtttttgttgcattccttcagtttcatgctgctggatcggcattaatttgagttgaatttcataattaaaaatgaa

SEQ ID NO: 9165 - DNA, 1807 bp, Heterodera glycines
tgttggagtttagaccggtgacgcgagtgtcgaggaattgctgcatgtgataggcatacctaattagaaaatacaaagtgccgcttggttggaggtcacctgtcaattatgtaaacaccaatggagcgatcgacgtggtgagagagcgaatcctcgccaacctatttcaatatgccaattttaaaacgaatttggtgcttgccaagctggacgaagtggccaaaacccgcggtgagtacactcgttgatacatcgactcactttggcacgtgtcggcaattagcagcaactcattgtaactgttcagaattggggggaaaggataagaagggaacgcgaaatgagagcactccccagcagtgatcaccgattttgctgatgcatcgtttcaatggcatctgccaagtcaacgtttgtcaactcttccgcgtcttgaaacttcaaaaagccatcgccgccgtggccggtcaaataaataagcacattactttggctatcgctgagcaaacgcctaaaataaacaccataaactaattaatgatagtttcttaaaaagtgcccagatggggtgtactacgtttttccgaagctcagttccctcccgcatcgttcccccccccccgaaaaattaaaaaattttttttactaaaagtctatgaatttgttttgtatttaactgaagcgtctttttttcttcggtactcagttgtttattgtcaaaatgacatctgatcaacttttaatatagctagttcgatttgtctcgtcgagaactgtcgattgacacatattttgttgaaaattttttattttcacttgtttttgtctaatttagggtcagttttcgtgggtttaatcggcttaaaaccctgtttgttggcgtcggaccgattcatcctctgatttttagactcacattgttagctcatcatgagcttcgaatgataccaaatttgtcaggtttcgatcgttttaaaaatcccccggataagtcaggaatgccggggggactgatagggggggggggaaggcggctgggaaacgcgctgctcccgcccagatgatagtgagttgtcataaaaccgttggagtatataaatctcagtattaccgtaaaattcacttgtttctgggcgtgtccgtatgtgttctgcccgttaaaattctcacgacactttccgcagtcacttcgtacccgcgatagtccacttcagtgtcctccaaatacaaattctgatgggcaaaggcattgttgaaaatagacgctattggaaaagaaaaattaacgaatgaagagaaaagggcaaaaccgggggaagggtttctcgcattgcatggaatgttatcggaaagcatcaaaatgatgttgctaaagggaatcagtattaagttataaccaattgaattaaagggaacaacacctgtcgggcatgccaagccgtttcaacgaacggtacagcgaaaggacattggcaacgtggcgataattgaaccaaaagcgcgaagagcaaaccaaaagagccctaaggaaggatgaaaaattttaaagacaaagacgaaaaccaatgaccaattgtttgtgtgagttgaacggctgaaaaaatcactcagagaatcggccaacgaaaatgaaggaacgagcgaagaataaaggaaaagagagaacaaaaaataaattaccatggtcgaactgtgttaaaaataagattatcggcctgtttaatttaatccaaatgtcgagcttttccatttaaaatgtgtgagattctgggaagaggaaagaaggaacagcttggataggaatcag

SEQ ID NO: 9166 - DNA, 2180 bp, Heterodera glycines
atttttttaataatattttaaccattcagaatttgaatgtcgacaaaaaatgactttgggagccatcagttgttccatccacaaacattaacgcttcaaaagactacagcttcgcttgtggtcagaccaacccgatagtgtgggccctaaaggactcaaatgattacgcagtcggaattacgctgaacaatgtgcaggtagaaagaaagaaagaccatcaattataaaaaaaaatttcataaagccactcctttcattacataaattcttttcaatttaatctgttcttgttttgccctgacaaagtggttggcagaaattaaggctctattgcagttcccacgactataaaaaataaaataatttagcaatataatgcaccatcactttttctagaagcatctcaattaaacattattgaaatcattcactagctctaagagttctatattagactgcaaaatttcaaaagaatttcctatgtttaatttgagtgctttcgaaaaaatttggtacattaaagttgccaaatatttatagtcgtctaaactacaatagggccgaaattaaaaataatctttaataaaagttgaataatctaaactaaatctatttacctttttggcttttgcatacaattagtcattccccaattcgccattccttttttaagttccaaccattcgatgcagcttacactgccggtggaaaagaagctgaccgtttaaagtttggatggaaagtcaacgattgccaggggctgttcagcattggcacttggatgggcttggtagttgccactctgctcatcggcgtgctctttttcggctttctgatgcttaattctgtgcagacaatggacagattcgatgacccgaagcagaaacagttgataattagttcgaaagagtgaatttcatcattttattttattacatttcccttaaaattttcattctttgtagctttataaatataaattttttccttgaattaagatttttagtagccattgttgtttcactttattgtattaaaaatgattgtagaatatgctaatttattaaagcattttatggaggaaagcgagaggataattttggttggtccgttgtttcgttttcctttacgttttttcagtgcagggaaagggaatgtgcacggcgtggcatcgccgttcctccgctttttgtggctgctccgatggtccgttattcgaagtgcgtcttgccaattaaacgatttatcctcccttcccattgcttttgttagacttccttttcggcgattggtttctttgtacggctgcgacttttcctacacgccgatgatttacgctgactgtttcaccaaatcggagaagtgtcgacaggtcgaattcgtaccgtcccccggtgatttgccaattgtgcaatttgcggccaaaagggcggaagaatttgcgagcgccgctcaactcgtttatgggttctgatttcaatccgatggagagtttcaatttcaaaaaagcgtagacattgccgtggaatcgacttgaactgtggctgccccaaaagtgatgtgcgctcggacggatacggctcaaaactcttggaagacccgcaattagtggccgatattgtgcgacagtgccgcgcttccatcgccgatcccgactttaccatttccatcaaaattcgcattcaatacccaatggaaaggacagtcgatttgtgcagaaaagtcaggaacataatcaagcaaattgtcagcagaagaaattctcaaagttccaggtggagcgtgccggtgtttctcacatcgctgtccatgccagaactgtcagtcagcggtcggagccgccggattatgcggcggtggcactgctgaagcaatgcttgcaagtgccaattttcgctaacggtggctgcaaaacttttgaggactcattggaaatttcgcaggcgacgggcgccgatggtaaaggcggggccatgaaaaaaaggcagggaggggaggggagggggcttcaaaatccgattttttaggggatgtattttttctagaaatctcaaattaagaaatgtgtttttcaaatttattgtagccatcaaggcgagcttgggggggggggggcccagggggccccgggcctcccccgaaatcaaaattttttgaaaaaaaaatttatttttttttta

SEQ ID NO: 9167 - DNA, 3286 bp, Heterodera glycines
cccccgaaatcagaatttttaaaaaaaaaatttattttttttaaaatattatattaattttttcgtaaaaataacaaacgagtttatgaaatgaaaaaaaacagatcatttacaattgaacgcgtctaatacacccctaaatattgaggtttacaaaaacgaaaaaatacacccctaagaaccgactttttgagttgcccccccccgaaacgaaggtcctggctacgcccttggcatggcttcgattgaattcattttaaatctccgtttttccaaggagtgatggtggccaacggtctcttggacaaccccgcaatgtttgctggtcattcgtcaactcccaaacaatgcgttcgtgattgggtccgttctttttctgtttcgcatttcaatttttatgtttattaatttagcttaatttggaactttccgaatgcattcccttcgatttgtttcatcaacaactcattttcatgctccgttcctctctcccaaaacagcaacgaaacattttcaacgcattgaaaagttcagcggcggtgagaaatttcctcgtcgatttttatttgaataatgtcgattgattggattgtccttttcgacctcacaatcagccttaacattgcacttcacgttaatatttttcttattaattaatacacgtttacgttgaataccttaaattacaactaacggattccatttttattgctttttgcccacatgatggtgctagttgatcagcttttaagtgcttttaaaagtgctcttcgtgaagtcaatccgagtgcgtctgttcagaaagttgggcttcccacaatcgcggctgatttcgaccaaattgtgcttttaaggctctatccgtccgcgatggaaaactttttgtgcagaatcgcggcttcgaactacataaaaatgtccatttggtcgctttcggaaaggcagcgccggcgatggtacatggggccgaaagagtgttgggcgaacacattcttagaggaatcgcatcagtgccgatgaagatagagtatgagaacgaagccaaaatattttttgaaagattaatttaaaagcattccctccggcctaaaaacggagttttgcacgggtgccgagcacaatttgcccgatgaaagagcattggaaaatacaaaaagaattgaacaatttgtttccgaggccaattcggcgccggaccaactcattctgttcctcgtttcgggtgcccttctttgtcttcatcactccgtcctttccctcaaaatttaaaggtggcggctcagcccttttaacagccccaatttcgggtgtcagtctgaatgacaaagtggctttgatacggcaggtgcagaacagtggtgctggcataaagcaactgaacgtgctcagaacggcactctcgagagtaaagggcggtgggctggccaaacttggccgatcgtcgaaggttttaacagccgatcacagtccgcccatttcccaaatgcacagatgataagcttggtgatctccgatatcgtcggcgaccctttggaattaatttccagcggtccaacaatgtctcagggaggtcatgtgcagaccccaatagccattctgaacgacttggaaattcttgacaaagtgcccattcgattggtcgacgcgctccgatccgcacatttagaaaaggatcagtgtaattttacattcctccccgaatgagactgattttagtcaagcatttagacgacccttctccaactgatgcgcttaatgtgatcattgccagcaattccattttgcttgacaatcttgctaaccaaattaacgattcactttcgatttctcctttcatcgtaaccaatcggttggagggcaacgccacagaattgggaattcgattttccaaactgataaagcaaagcatggtcaatggcaaattggacaggtcaataatgattgcaggtcaatttcaggagtggatcagaattagctgtttccgcacatttcattactccgcatttcgacagatttatacgacgacagtcaacgttcggccgaattcgattcacagcgcgtagtccttttatttggcggcgaatcgacggtccgttttgatgctaagaaagcgacacaaaacgcaaaaggaggcagaaaccaggagatgatcttgtcggcatttcatcacctcgccgaatgttggagcgatttaccaaaagagacaaaatgccaatgccaatttgcattgtttagcattggcagtgacgggcaggtaaacaatctgttatgcagttattcccattgtattgtgtcacacaaaacaaacaattgtaaggatggcccaactgacgcggcgggcgcctttctcaccaacgacgatttggaaggattgtcagagaacttacaattagcctcagaaattgagaaattactcaattcaaagtgctcatatcatttttggagcgactacagaaatggcaaaaacttgattaaaattggaaaaactggcgtaaacgtaatggacgtacaaatgctcatcctgaattttggaagaaaataatgacgacaatggctatttcttgcagtgattttaataaaatggttggcaatgacattagagacaaaaattagcattttcaataaaccatgagttttgggcattttctcaaaagctattcaatcgtttgaggaatttacggtagcaaaggcattctaaaagggtcggatgaagtgagcaaaagcggcggataatcgcaggtcagaaacttttgatgtgccgccggatgggtaaaaaagggaatccgacgacgaaccaaaagcgataggtcacttaaaaagtatattttaaagcttaaataataacaatcaccaaccgaaccacgagaacactccaatgcttgccccaatgagtttttgccaaaattcgtggtaataaagtgaagtgatcaacaattgcaaatcccatagcaagtgaaggagcattagagaaacgaaaagccactagaaaaagggagcctgtggtgaaaaagtcacagaaatgcatgaatgcctggattattttggtattccgttgaaatagttcaaattccttgcgggaaggaacgtgatgaatggtaacacgaggttttgagggccaattttggaatgaggtggattcctcgcagattatcaaaatgctgtagatcaacaggaaggcgtgtccactgatgtcaaaacctaagagattgtgttgaaattttattcggaaaggaagtttacaataatacaatgaccttattttggatttggaagtttaaaaaaatcc

SEQ ID NO: 9168 - DNA, 718 bp, Heterodera glycines
aatgtttttcatccaaatttgcttcggcatctgattgcactttttattttgttgatggcgtactaaataaaatgtgatttcgagaaaattattaaattaaattttgtgatgaaatattaaatgaagcaattaatgaaccaacagattaagctttcagacggcaatttatttgaaaacaaattaaaaatgaattactaaaaaatgaacatgaattcgagtaattaattgaagtttacataattccaaggttaaacaaccgtttttaaaggaaatatgaggatttgtcaataaattttgaccatttggaagcgtcctaatatgatgcttttcgaatggcttttcagctcaaagacgcaccaatttctggtgtaaaaatacgcttacaattagcagttaaaaaaaagaagcgcaagatgggtaaaaataaataaattattaaatgcggtcaattaatttttatttcagtcggatgcagtctttatttcataaaatataagaatttttacgaattaggtaatttttttaaaatttagcactgaaaaatattaaagtgggttttccggactgttcgtcttgcttcttcatattcacagcaaaaaacattcactgttcagctgcaacggacctctccacggcttttttctattttttcgtttttttatttattaaaaaaccaaagaaagcgggaacaaatacatagtttgaaagaaatcataat

SEQ ID NO: 9169 - DNA, 3240 bp, Heterodera glycines
gatggcagactcctgatgttttttttggcatttttaaaaaatttttgtttggcattccgtacaatgccaatgttcgctgtgtgtccaaacggcgcacaatccagtcaatgacgcggatgttctcacaatacccgggccacagaaatttgccgtccgccgccgatttgcggaaccaattaacctgaaatatttctataaaaaataaccgaaaattttgtttatttttacgtggaaaattcgcggcattttacggcccggctgcttcaaactgcaccaatgtgccaggtacttgccgaaattgtagcccataaatggacgcctaattaatggacaaaaatattccgtaatccgtcattacggtactaccgtaatttattcataattacagtactcagaaaaatgccgtaacccctccccgtaaatttaacattcgttttgttttaggataaacaattttactcatcagaaaaaacatacattgccatcgggtcgtgcatcactgtctttcctgaaatgctttaattacagtaatcccacaaaatttgtaactacagtaatcccatcacaaaaaaaagagaacaacaattcaccttgatgctccgcagcagctgttgtctccgactttaaacatgcgccagtgaaaatgccgtgctcccaggagaatgattccttgatgatgggtaacatttaaattggcatgccaaaaaccgaaaatttgctacatcacggagcggaaatgtaatttggtagtgttacagtcgagattttcccggggtcaattctcgatttcgagtctcggaaaagccaaacattccgacaaaaattgtgccaaaaaggaacacaaaaacaacttacaaacaccaacggcacaccctgcggacgtcgtcccccgaaaatgatcgcatcaatcggaacaccatctgaaaaaaattttcaaaaatatttttgtcgctgtccactctcgaggcgtggaaaaagtgccactaaaaccctggcaaaataccaacacgcgagactcactcggcgactcccagtcgggatggatgatcgggcactgtttggccggcgcgcagaagcgcgagttcggatgggcggccggcgttgggctgcccaatttccacggggcgcccatccaatcggttatggtgacgtcattgcggtcgcagatttcgtcctggacaaaattttcaagaattccaaggacaattcaagacaaaatgcccacctccaacccttcccagtacactttgccctccgaagtttcggcaacattggtgaagatggaattcttttggaacgtttgaacagccatcggatctgatcagaaaaatgaaatatttttttattttgagaaaaattaatatacaaattattcaaaaagccaggcattttggatttgaaaacccaaagaaatagggaggccaaagatttcaaaaaaaaaacgaaaaaattgatgcctgggaaaacgaagagccaggaaataaaaaataaacaaaaaaaattatacgaaaaactcgagcttgacaattttcaatttaatttttgttggaattgtttttatcgttttctcgcctcccccgctgctcactcgtctttttggaggtgcccggagcgacgccgaagaagccggcctgaaatgaaaatttttagaaaatttcaaaaaaaattgaacagccaaattttgcctccggattgatcgcgtaaaggcgtccgtcctcaccaaatttcatccacgcaatgtcatcgcctgaatatattgtcgaattttatgtcatggaaaaaatgtcaaaaaaatgatcatgattaactcttgattcgagactctcgaccggacgctaattagcgccactaattattgtgcctttttgcttacccacacagcgcactttccagccgggcagtgtcggctcaagcattgccaaattagttttgccgcacgcggacgggaaggcggcagcgatgaaatgctcctgtgccaaatttttgttgagcatttagcctcagggcattcaaattgatcaattagataattcatttaataattaatcaattattaccttgccctcgggactggtcacgcccataatcactgaacaattttaaatatttttgcaaaaaaaaatgcctaattgacaacataaagaattgaaaaataagcccaaagggtctttaaaaccaaaaatcaatcactgccaaatcattgatcaatttcgttgatcaggtccacaataaaaccctgctgatcaattcctttaggcccatgtaaccaaggggtggcaaaattttcatgaaattccctcaacaaatttcattaaaattttcaaaactctcacccatctggccccattttaccctattttttttttgaaaatttgactcaaaaacttagtttttctaaaaaaacggctataaatccctgtgctttttccccggcattgaagcctctgatcaaaattcattgcttacgcatatgctcggccagccatccttcgtcccgcgcaatgtttgaagcgatgcgcagcgcgaagcactttttgcccagcaacgaattgccgccatagccggagccaaacgaccaaatttcacgctcggggggccgatgggcgatgatcacgcgttctgtgagagtgtgccaaaatttgtgtggggtggcaaaacggcacaaattaatcaattaattaattgtgccacggcaccacccgccataatgaggtgccaaacaaaactcacccggattgcaaggccaacggttaatcactttctctaaaggggggggggtgaataaaatcttccatttttttctgatcaaaatgtgtattagaaaaaatgatcagattacgcgagacaaacaagcagagtacagtgccgaaaccgtcacaattttagggacatattgggaaacttatgtgtcatttttttttaaattttaattttgaaattcttttttttctggcagcctggtttaggcttggcttctattttctttaattttaaaatttttgacatttaggaagggcgtgaggctggggatgacggtaggggtcgaatttcaaaacatcttagtccggttcccacgcctgatcattttccccacgaattcaagaacgatcaaaaacagatctcggcaagcatttcattaatccgtttatatagttttataaagcttacgcttcacaggtcgtgggaggccaacggaaggaaggcacgcacaaaatctgatcaccgatcgcttcggcacat

SEQ ID NO: 9170 - DNA, 3995 bp, Heterodera glycines
  unsure (1)..(3995): unsure at all n locations
taaaatttattaattaattgcattttttgcacctgaatgccaattttggacaacggactgcccaacggtcncatggaaaatgggatgacgtacataatacggccggccataccttcattaaatttataatgatttttaatccgaatcctctaattaattacagccgggaaagcgcgtgtccaattcgtccgcgaattgtgccggaggcatccaatggcccatgatcggctccacgcccgcgggcgtatgggtgaccgtcttgatcgggggggggggggaggaatgtttgaaaaaccgtgaaaaagtgcaacaacaatgtttaattatgtaatcagggatcaatcacttaattgattttttaacggtaaaaaacttagagccaataaaaaatttgatcagaattgtcgaacaaatttgagtgatcggaaacgaacgacatactaaataactgatcaaaatcagattcaagagatcagcagattcaggtgtaccggtcagggaaatgcctttttgccccctttttgaaattggaaaactttaaaattttaataattttttttaaatccataaaaattcgaaaattttcccgtcggcgcctataaaagttttttgaaataaaaggcgccacaaaaaaagtggaaaagcatttctaattttcgctcttaaatgtatgatcagagacgagttccgaatgccgtgccgtttctgatcagaatgggcaatcgatcgcattcaaaaatcccatcaaaagttggcatatagccaatcgccccccccccatctcatctgatcacacccattttttcacctcatatttctcccgtgtgaccatccacgttttgctctccacccgggcacagtcgcgcgggtcagttcggcacaaataattgttttcgtaggccaccaacggtgtcagcacaccacgctacacaaacaaacacagaggtcagcagaacaagataaaccatgtacatacaaaatgccatttttgccatgcttttcccatttttgttttaattaactattaatgatttttagcgagagtccctggtctcgaggagtctcggccgctcgagaaaaatcccggtttttttcgtcctcggtctcgagtttgttttttgggttgcagtttttttttttggtctcgagttttttggatctcggcacttctctatctgtctcggaaaattgtcggtctcaaaaatcgctactaattttggcatttagtcgggtcaaaaagaaaattatgaacagatttttgtcctcggaattcccgaattaggttttcaataaaagcatctctatcttctgcctgcccgtgtcagtcttgaggccagaaattggtccatcggtcttcattttttgcccacctcaacaagcaggtcagtcatctcctccgcttcatgttcggaaccgtcacaaatgaaaatgccctggagggaaattcaaagtttattttggcacaatgtcaattcagcgccagccaaagtgccattcattcattcattcatttacccgtggccggcacagttccgccttctccgccacaaagcgttgcactttgaaaggcaacagatggaagtcaccctttagggggaaaaatgggtaaaaaacggcggctgtcacaaaaaattttaaaaaattgctgccagccgacgccaccacaccttcaaaattgggatgggcccaagccgtttgatcaccacttcgttgaccacgtagaaagcgtccgcgctgatctggcgcagcgaggccgacacgccgggcgtctgcttgaacggcgtcagcttggcggggtccatcgtggcactttgtgtcgcggcagtggccatttttcagggatggcacttgtatatagttgctaattttataaaatatgtagctaaaccaatttaaatgattggaaaaaatttttagacatggggagttaggttttaatgaaaattgaaattttgaggtggcgtttttgaaaataaatcagggatgaggtgaattatttcgttggaaacatatttggaattattctaaagtactgctcgagagtctcggtctgtggagcatcgactcgagatttttgctgaggtatctgcctcggaaaattttgaaaaataatctaatatgcagtagggctcgagtgtcgagtttcaactcgaaaagtctcggatttaatggggtctcattgtcagtctcgcacccggtctcaagtcatgtgatctggatttctgatcactttcagtaaagttgggtcaatcgaactttttggtaaaggcattttttcagatcaattacaaaagaccagtgatcgattaatcatctaaaattttatggataatttaaaatgtccggaatttcaatttatgtttttaggggcccgaattccgatttccgacttaagaaattttttgggccatgaattccatccttggtatcaataccctgaaaattttcatacatcatttactctcggtcttggtttgactttgtctagtttatttttatttttaaaataccatttttaatatttttttttacaattttttcccaaaaataaatttgggcggaacggaggagaaaaattgtgtaatattaatgagctgataatgagagagtgcgcaatcagtttttaattacttgtttttcaccactttcatttgtttgtttacactttatcttatgataacaacggttgttgttgttgtgatcaattggaaagtaaactgattaagctgctgattgggaatgaacgattcaaaaaatgatttatttaaattggcggaaaaattgccaaaaaaacaatttaaaaaaatttctaaaaaaattaaataaacaaatgcaaagaacttgaagaaactcgagttggacaatttgtaaacttgaaccaagctcaaggtgatattttccaaaaaacttaanaaaatgacgggaagagctgaaattacggatctgtccttatttcagaacttatcgtccttatcaactcccttatcttcttgactttgtccatcgcaaaaattgtttaatattttttcttacaattttcaataatttaaaaacaaaaaaagaaagaatgaaaaaaaataataaaattaatgcttaacagccaaaaatgtaaattttttaaaattattatcataaaatcacaaaaaccatcaacattttttaaaatatacgaaatctctttttaaattcttatagacaaaacttttcccaaccccttaataattttttctttccgttttttcatgttaggtaaaagaaaaagaaatcatagtttaaaaagccaaaaaatgaaaattttttggaaactttcagaaacttttgcttaaaatccacaaaaaccctcaaagtttgaaaaaagcattcaaaaataggcaacgctaatttcaaaaaaaaaccccccctaattgaccccttcaaaaataattatgaggggatacaaaaaatgaaatcttatgtattatagcttaaaattaaaaagatggaaattttcaaaagaaaaacagttaattgttaatatgtatcagggttggtatcgtccaagtcggtttccaaggacgggtatgccgatttgcaaggacataacgcgggaaaattcatgaaatccaagggcattcaaaatttttattatatacaatgaaaaaaatgattaaatttttatccaaatggtttacctagatggatttatccgcacagataaatggatttatctacaacaggaggaggaggaatgaaaaatgtgaacgaatgaatgaatatagaaggcaaacaaaaaaatggcaaaatagtggcgaaaaagttccaaatttagggggtgtaattttttaaatagctgttttttaatttgaaaataattaaggcaaacaactttttcactgattgcagttacaaaatattttcttagcaaatatggaacaagaaaaaaaaaatttgggggaagaatttttgtgaaaattttaccaattcttaggggtatattttttgaattttttaggtcg

SEQ ID NO: 9171 - DNA, 3904 bp, Heterodera glycines
ttcggccgcttcgcggcctcatttttttatattcttaattaattaattctaactaatatttattctaattaaaacattcaaatattatgctgttttaaaattcatttaattaaatataaagaaataataacacggatttttgtagtatattactttttcgtgagttctcatttaaatttgcaaaaaatttaaaaaaataaatgttacaaaatagaaggcgttttaaattttaataatgctaaataaattttaaattttttgtctgttattaatccgttcattttctgaatcttattttcttataaataaatacatttatttattatttaattcaagaaaaattcatttaatttaaatttaaataaattaataattaaacattttcatttttattttatagaaaaattattttaatttttttaaaattgaatttaaaaaataacaaaaataattttgacttaataattagcattaaaaaatagcagaaaataaatttaaaaatgatttacaccgtccggattcgaacctgaatgcctcagaatcccagtttacgcagggattctgaggccttaacgatgtcaaaagtgaaaactgatcacgtatccatgatcagcttcattaaatggccttaaagacatattttttgaagattttgggtgaaaaaatttttacactcaaaaatcctatgctcacccctttggtcccgaatcccaaaatcacttttatttttataacttttttcaaaaaagtgataaaaatgccaaataaaatttatataatagagcaaaaaattgcgcattttatcaatatttttttataccttagcactttgtttggagtgagttattaatttttatgtgaaaaattgaaattttcaagtttttcaggaataacttttattgtttgcaagatagaaatcccaaataaatctcataaaattctccctatttttctctattttttaaactttaaatggactgaattggacctttttgatgggagttatgaattttcaaaatgtagcttaaattttcaagggccaaaaaattctaaaatttcaaaaatttttaaaaaattccaaaatgtctataactcaaaataaagttcatattcatgatcagcgacccaaattacgtaagaaaatatgttttttttaaattttagagcaaaaaaatgtgtccatgaaatttccaaaggggtatccctttggattttggctgcaaaagcagttttaattttataactctttttaaaaaagcgataaaaatgccaaataaaatttatataatagagcaaaaaattgcggattttatcaatatttttgtgtaccttagcacattgtttggagtgagttctgaattttattatgaaaaatcgaatttttcatctttttcaggaataacatttttcattttaataatagaaatgcacaataaaaaccataaaattctcccgatttttctgcattttttgatcatttaatcttcacatttgacccatttcaaagggagttattaatttttgaacattcccccaaattttcactgggcgaaaaatgaaaaattcaaacacacccaaatttggtcaaataaaaaatttaaaaaattgaaaaaaatataaaaaaattttagaaaatatttccagccccttagaacatcgttacacgtcataaaaaatcatccgcacaccgcgggattcgaacccgggcccccctccctgggggcccccagcacacaccactggaccaaccggttctgcagggaaaaactttttttgagttttcaaaattttttttatatcattcgaaagctcttgaaaagttgcaacccaaaagtgccgtgcgtttttctttggcacaaatgtaaaaaaagttataggcaaaaaaccgaaaaaccgtcgagggggcctggattttttttggtcgaaaatttcaaaaatccaaaaacacggttggatgcagctcaaaaatatgcactgctacttgtcagggaaaccggctccgagcacttgcggccgagttattcacgaaaaacagaaatccgcttttttgggtaccaatttttggccacctgtcccggtcacggatttgctcggatcgaaaaatgtttgctggcaatgttatccggcatagtccaactggatttcctcccagcaagcgtttttcgatctgagcaaaagcaaaaaatttcgtaacactgagactgcaaacaggggccatttcagcgccgctggcgctcacctggccaccggaccggaaagcccgtatttttcctgaatccgcctcaaaaagttggtcgggacatcgaatttgcaaagccctcccggcgctcgttaggctcaaaatagcaaaaaagtgcgaatccccacttctttctataatatataaactagcgggtgcgtgaaccgtcggctatttagctgggaaaaagcgcttcgcgctttgggagcttcgctacctagatcagttatgggttgtggagtaattgttggtccagaagatatttgagattaatcaaaaaattttataggctcattcggccgctttgcggcctcagacgggcgcttcgcgcccgtttctaaatttgttgggatagcgagagaatgttccaaagaggtgcaacatattgtagaagagttacaacaaatgttagaagacgtacaaaattgttagaagaggtacaaccacggagaaagagatacaacagttattagaagaggtacactgggattcttagggcgctttgtggagaattggaatttttaacaaattatctggggcttttaggccgcttcgcggcctctaacgggcgcttcgcgcccgttttttaaatttggtgattcttaggccgtttcgcggcctcgaacgggcgcttcgcgcccgtttctaaattttgttggcttggacgggcgcttcgcgcccgttgttaaattttgttgaggccaaacgggcgcttcgcgcccgtatttaaatgttgttgagctcagacgaggtacaaaattgttggaagatgtgtggaagaggtataacagtgattagaagaggtacaactgtgattagaagaggtacaaaagtgataaaagaggtacaaaagtgattagaagaggtacaactgtgatagaagaggtacaacagtgattaaaatttgaacaaaagtgattagaagaggtacaaaagtcattagaagaggtacagaagtgattagaagaggtacaacagtgattagaagaggtacaacagtgatagaagaggtacaaatctgattaaaagaggtacaaatctgattagaagaggtacaacagtgattaaaagttgaacaaaagtgattagaagaggtacaatcatggtttaaaatgataagaaaattgtattattggatgtattataaatttatcaaattaaaaaaatccttttacttattaaaataaagttagaaatttataatatagaatatttattgaaattgaaaggaattaatttctcgaaaattcaaattaaataaaacatttattcatcagaaaataatttaaaataattaataaaacaatattaaattaaataaaaaattaaataatttaaatgaacatcattattcatcaaaaaataatttaattaaactaaaaaaatttattattaatataaccaaacatttaaatttattaaaagtaatgaaaattaacccaaaaaatacaaagaaaaataatgtacaccgcccggcttcgaacttggccccccttccctcaaaatgatactcagaatccccaatcacacagggattctgagggcttaacaatgtcaaacgtaaaatctgatcacgtattcgtgatcagcggcccaaataacccctaaagacatgtttttggaagaattttggtggaaaaattttcccactcaaaaaccatgtgc

SEQ ID NO: 9172 - DNA, 4161 bp, Heterodera glycines
  unsure (1)..(4161): unsure at all n locations
tccaaattaagtttgactcaattgcactttaataaatttaaaattttaaagcgactataatataatgaccatggcaaaaaacatagcaggatcaatatcttataacttttttcagaagcaattaaatttttaaaaaattttaaaattgtaaccggtagagaacgaacccagaactattgaatgataccaagaaatattaatttggttgaaactgctcaaaagttatgaatttatatttatgattttatatgtattattattcccttggcggatttaagaaaagacccaacatgatcattgaccaatgttgaccgcattttgaggcatttgccttttcgttgctaactttcctgaccgaaaacgcatgagaacgcgtcttataataataataattcgtggtgagacatttgcgccgcgccatttgcgccgcccagcaaaaatggactttttgcgccgcgttgtcaaaaatattattttcattaaaattgcactattataaataagttttactaaaactataagccaacgataaaaataactaattgaaaattgcaaaaaattactagtcacaaagatagacattcaattttatttaactattaaaatcttaactttgaataggttcacccaagatatgaaaaatgaagaagaataccaataacaaaaaaccgaaaaaatgatttttctctaagaaaacccaattgttttttgcttcaaaaaatgaataaatttaatattttgtaattaatttgttcaataagttatttgcatcgatttgactttaatttaattgaaaaagcactgattttcaaattttcgcccctatttaccatttttcgccttctttcgcaatttttatgcccttatttaagtacctattttgattttttttttttttttgccttaaaatccgccgcttaatgatcaggcaacgaaggcttgttatcgcatatggtcccaatgaaaacaaaagttcaaccacataaatttattttaatgagagcgcaaatgttctttttcgctgtacggcgcaaatggcgcggcgcaaaagtcggctaaccataataattattattttctgattaaatattgcattatattcatatatttatttttcgtgaattaaaattatttcttcgcttttaatctctaaaattcgatggtttaaaatttttcaaaaatttaactcattttagtgaaatattttcactttatttatcaatgtttcagcctttttatccctatttcgtccttattttgggatttttttttaataattagtgaaacttaccgctcctttcacaattgtcattgaaaaccgaaaataaaaaataattaaatgaaaaaatagagaaataaaatgggccattgacagaattgggaaaaatgaaaatgaatgaaatgttttattattttaaaagcttaaaatataggaaattatttattgtataaccggagaagcaatgtttgccaacattatgccaagttggcattttcatcaatcaaatgaaatgggcaattcaatcgaaatgcaaaataaataaaaaattaatttttcataaagcttatctatagggttatttattaacttataaccacgatcattcgttctttgatctgcacaattcactcattcattcatcgtgcgccggcggaagtgtgccgaaatatggccggccatccgttttggcattttcacgaagattttattacaaaatcattcgggaacaaatgttgaaattaattgaacatttatttgcatttgactttaggcacaacaaaatcacattttataaataaattttttcttatttctctgggatttgtccttcttattttgctgactcaaagctctgagcggacggcacggagaagaatgtgcagatgcccgtttttcagaaagtgcggccaaatcaatggcacttttgcctaaattgccgctttttatttgtttatcgctctaaacccctgttgagagtggtgggatgactcatcggttaaaatgaaagccatggaccatccatcgccaaatatcgtcggcacttcgactccgccatttcccccaaatttgccaaaaaagaaaagaaactgtgccttggccttaccggagttattctttgtatcagttcgtgcccctttgtccaacaaaaagcgcacaacgtgcgcctaagtgaatgaacaaaaatttgggggaagtccgaatttggcgggcctcacatgccccgcgagcgatgcgaacattagcgcggtgtgtccgttgctattcgtttgttcaatgctcgcgccattctcgacgagtaaagtgacttaagcataaaattattcctaattaggttagtaaagtggtggactacaagagaagtttaaacaataaaaccaatggaaaaagaatggaaattgtaaaaatgatggccaagaaagcacaccctcttctgacacaaccgaacccatcgaatccccattaagcggcgcatacccattaataataaccgatgaatgaacgaaccaatgctaatgtgtcccgcatcgcacgcaatcatcagcggagtcatgccaacttccaggcccaagtcgacgttggcaccgtgcgcaagcagcacacggcacactcccaaaaaagccgtacgaagcggcgacccaaaggagagtcccatctaataaaaattcgttttgaaaaggtccaaagccattttggctcacaatatttgtaatcgccgttgattttccgaaggctcatttggtgcgggtcggctcccttctccaactgagaaaaatagtcaaatgagtgccaatcattggaatttgttccgggcccaacggtggaaaagtctcggcttttagggtaacagaatttcttctataatgcaattagtcactgatcaggcctaatgtcccttttctgtctgttccatggcatgatcagctgttttttttgattggtgatcaaaatgctgcttatcgcccgatttgacagaaactcggacataaaccatgtctttgacttagtgtgccaagacattttttgtctttttgagatttaagagccaatgttcgaatttgctgttgacatgccaaaactgccgcaacttccggcttgtttcccactgtggcgatcagcagcggagtcagccgcttttcggtgccctttggggcgtactgtatgtacagtaagtgactgagttcgtcgcccgggagcgaattgagcagtgcacgcaactcttccgctttatttttgtagacaaaatcaaaaaattgcttcataataagcgaggactgatcagcagcagagggggcagcctaaaagtttatttcaaattttaaattggaaaattcggccaattattttggtggtgccaattccgctaattcgcgtaatctgttcagaatcaccgcaatttcagggaacagcaaagtcataattgtacatagaaatggacagacaaccgaaacagtaattgtgccgttgatcggtgtcattctcacaattaataatgaaaatgcaaaaaagaataaaatttattattgaattatatttaatttatatttttatggttttcaaagcttaaaagaatgggaatccgttaataaatattacccaaaaagattattcaaatgataaaagtgaatgaaaaaatgataattataatatgcagcgaatgaatgacgtaaaattggacggacgaacggaaaaaagcacaaaaagctaatggaaatggagagagaaaaatgtggacgagaaggcaaacccaaaaaggaaatagttattcatttaatttaattttttttaattttaagcaatttttctcaaagaccattttttgaataaaagaatctgaaaagcttcctgctataacgttgatgctgaacaagaaatgttctaaagcatttaaaatcattatttcgttccaaattagtttgaatttggcatattgtaagcgactgttgcacatttgtttaacttaaatgatttttcttgccattcatcttcacatcttttgatttttagggttgttcccaaaactcatcaattcatttgcttatttttcttggcacaatcggtcctcttcgacaacggcattttttatctttttgtgtattttactgtncgattgtccacttactgatttgtcgtataacgagcacactgaaaggagtgatctg

SEQ ID NO: 9173 - DNA, 1899 bp, Heterodera glycines
  unsure (1)..(1899): unsure at all n locations
gaacttggccactgcttcagcagttggacgggggtttctgacaaaccgatgtctttttgcgcagcacgaaattgtgcctcctcagaaatttttgcaccatccaattgatgcctgaacaaaattttttatttttgtagcatactacttttttcactttgatatcagtgcccatgaacagcgcagccgccctctgtcgaatgatattccttgactcaggctgtttattttttctttttttggtgatccattctgccagttcagtgtcgatgtccggacggtgaactgggagacctgctccgtcgagtctcattcgttcagttgttgcacacgacttttccgccgaagccttcgttttcaactccgctaaaatcgccacagaatgtgtggcacggcaatttgcagacataacagctgtgaattcctccataaattgctttacaaacagcaaaacgattccatattttctgaacttttcattaaaaattcccatttttatgcataccggaagcaaaaaataacatttttgccatttttggtgtcaattttcagaagttctttaacaaaaatgcaataaatatgatttttttttgacgcgatgacattttttggcgacatgttcaaaaaaatttcaaaaattttccactaaacaaatcagccgaaaaataatctcttagtctccattagtctaccagtctccaattatctacccctttctgaggatattgaaaaataatataccatggcatataaatagagtaaatacgttaggtacactgtgttaatttaaaataaagacaccctgttttttgggagtttgaccacttcccatgaaccgatcgagctgaatttttaactgtacgtagaaattctgaaaatattaagattctgaaagtgagaaaccgaaatgatgacggaaaaaagttttacgatttttttttcaaaaatggggtgttaatttaaaatagagacaattgataaaaacgaacaaaatctcaacaactaccaaaaataaacagataaaacaaactaaataagaaagaataaatctttttttcacatttctgtttattttgcgaacagaaatatgttcagctcgatcggttcatgggaagtggtcaaactcccaaaaaacagggtgtctttattttaaattaacacagtgtataaataaacattgtaaatatatttgtttttgttttttttttgttaatttacattgatttgtctaaaaattagggttggccgccggatccgggtatttggacaaaaatcggttccgggtattgccgggtccagaaaagccgggtccgggtattgaaaaaaccgggtatccgggactgggacccggtcgggtacccggacccggccaaccctactaaaaactacgctttttaagttaaattgggtttaaaaatcttgaaatctttacgttttttcaacaacttatttttaatttaaaaatatatagtattgaactttaataaatttcaatatacaaaaatttaaataaaacaaagaaattcaacaaaattaatgttccacaagcaaataaaaaaaattacaataaacagatcttgcttgacatgtatgttgtggtaggaatctgaaatatgcccgaaaaattaggggattcgtggccggggtataaattcggggatccgtggccgtagtcaagatacggggattcgtggccgggatatanaattcgggggttcgtggccgtagtcaagatacgggggttcatggccgggtataaattcngggggttcgtggccgggatataaattcngggggttcgtggccgggatataaattcggggatccgtgggcgtagtcaagatacggnggttcatggccgggtataaattcgggggggttcgtggccggggtataaaaaag

SEQ ID NO: 9174 - DNA, 2669 bp, Heterodera glycines
tgatcgaggacttcaagaggcggaaacggcattacgtcaacgactatttggacggtaaaatgttttgctattttttaatgaaaattttaaaattttttaggcctccgaggccatcgaactgcccaaaaaatgttttcctcaattattttcctatattttgcttgccttttgccggctattgcgtttggtgtgctgaacgatgacaacacaggcggtggcatcaatgttcgcaagggcattttggcacaggtgaaaaattggaggggggggggaattattaaaatttttattttaaaaagctaaatttaattattatttttatttataatttattaaaagaaagtttttttttaatttgttaagaaaactggctaaaattccaataataattcattagcatttcccttctttaaaaaaatattttcattattaaataattttttcaatatttccaatttattctaattaatttacttttttcattaaaccaaaatttggcgtttggaattgttttttaaatattccatgcgaaaaaaacaaaataaattttccacataaatataaaaaaaactaatatttttttttaattaattttcttacgcctaaggcaatcggcggcattttctttgccatctttggcggacaaccgatgatcattctgctaacaaccgtaccactagccatctacatcaaagtaatctacaggatatcggagtcgcttggctacgatttcttcgccatgtacgcatgtgtcgggtaagtttttttttaaactttttagcctataaatttataggaaatgtttaacaacaggctagagaatacagtatgggcgtattgtaaatgtgtattgggtgggaatactgtaaaattctgaaattatcgtaacctctataagtgctatatgggaagcagcataccgtacatttcagtgggggggggggagtactgtaaattctgaaattatctattcccacgaaaagcttgcttgaaggacgggcatacagtaactgtataggagctatgcatacagtaatttcctgaaattaccgaaaatgcttatgactttgctagaatatgggagtacttactgtaaattttgtatgggatctgaatactgtaaattactagaattaccggagatgcttaagaaatatctagaatatgtgaacagggttactgtaaattgtatgaatgaaacacactagcaattctaatttttttttttaattttaatttcgttgaaactataccgaggtttaacttcctcggtttttacgaattttccattttttatgcctaatgccttgtaaattttaaaaaaattcacaggttatggtgccaattcttcctgatactgtacgcggccactgaactgtgctcattgatgaagttagctacacggtcggcagaagaaatgttctccctgttcattgccattgcgttcactgtggaaagcatccgtgccattcatacaagtgaattttcatttaggaacggaaattaaaagaatgtgaaaatttattttcaaaatttcataatttttttcagtaaaaatttaagattttttgaaaaaaaaatcttttattttttctgatattattttgcaattttttaagaagaaatttaaaaaaagaccaaaaattttcgatataaattcaaaaaatattttgtttaacttaaaaactatgaattttttaaaactaaaaaactttcatttttataagtaaaatccaagtttttcgaagaaattccaaaaaatattattttttttaattgaagaaactatgaaattttttaaactaaaaattttcattttttttttaatttttgtcttggaggggggcataaacttgtgtttttttctgataaacaaacgaactgctgagctttaaaatttaggctttatgaacaactacgaagtttgtgaggatgcacaggccgccgctgaacaagccgaacttgcgcatcgacatcaacagcagcaactggtgcagcaccaactgaacctgtcactgctacagaaaatcatcaatccggagttgcatcacaacctcacacaggtgatgatgattggattgggaaataattaatattattttttatattattaatattcggaaattaattaccgtattccaataatacaaaagctctcgtcaccgtgagggctgaaaaatcgaaggcatcctcccccaggggctttattagaagaaatatactgtgtgtattgttttttctgtaatttatttttcattttcaaattttttcataaattttattattgtatttaagtgtatgaccaaatttcagattatttcatttttaataaaatttaggcgtccaattgacccatttttaaaaatattttgcttgaataataagtaaaattctaaaaaaaaatttctttcgaaattactttactctaaaaaaaattcctttttaccaaaatgtttcatgaattttcttttaaagaattaaaaatagttttcatttttaattttttctctcagtttctttaaatatttttcaatttttcaagaatttttttttaaagatgtggagggcggtggggtataatcttccaatcacttcttgaataaatgaaaacgtaaaaatcgggaaaataaaattcaaaaaaattatccctaactctcaaaatgaatttt

SEQ ID NO: 9175 - DNA, 3249 bp, Heterodera glycines
  unsure (1)..(3249): unsure at all n locations
aattatcttaacaaaaaagccgtaaaacgaaaaatacatccatagcatttacctcgaaaacgtttgaaatattcgtaattttgcaactgctaattatgaataaaaaaaattgtttttttttttttgcatttttttcgtgtttcatatcaattagaatggaatcttcatttttttgttttgtttctttacgtttacatttgttatttgatcaacattttcataaatcatttttttttgtaaaaaaatgatatgtcagaaatttttattaaaaagaattcaaagtgtttagtgtatggtgtttcatatatttaattacgtaaaattcctccgataaacaaaataattacttcgttttttttaaattacattgaatttattacacatatcaaaaattttatcagttaacattttgtatttaattgattcaacattatttacttgcagaagacatgttcaaaatgcgtccaaatgtgccattgtttcgagtgcccgaattttggcgtctttcttggcaggccattctcgtctgttttctgctcggctttttcctctcctttttgttttacatggaccaaaatatttgttcagcaattgtcaacaacggacaaaacaagtggaaacttttgatcaattatttaatttaaaaaatattatttttttaacacatctatctataaaatgggggttaaatggcaatttggcgcccccacaaagtgtcaaagccacgaaatgtccaaaagagtaaaaacccacgaaatgtccaaaatttttcaaaatttataaaaacaaaatgagtctaatttaggatttttagggttttcggggtcgctgaatacgaatataccctttatattacccgttgcctaaccttaggtccatccgaataataaaaaactcaaattcgagacttggacattttgtgggtcagcgggcaatttatgacaaaaaaattttttttgtttatcccttgtgctatagaagtgccatttttaaagtaaattaagtctttttggccagcgatgccgataagcgggcatcgccggagaaagttttgaaaattgagtataaaccaagattatacaaaacaataatattttgggtcaaattttgaaaaaaaaaattttaggtgaattttaagccaccgggtaaaaattttaagcatttttaatgaattttgttaagaaattggctaatagtgccagcgcataatttttgcattatgttatgaacttaattcaattaatttattttttcgtaaattttatattaatatttcgcaaattttaacatttaaaattttaaattcataaaaattagttgttttttgtttaaaaaagattaaattgacaacccaattgcatcaaattctatttttttcatttttctattttatttcctttattcaatgtaattttcataactattttttcccattaaacctttagactaaaaaaaggctctgcccagcacttggacatattcgtggtggccttgctcaacatgttcctgtccattgttgggctgccgtggatgcatggcgcgctgccccattcgccgctgcatttgcgcgcgctggccgacgtggaggagcgcgtcgcgcagggccacgtgcacgaagtgtaagtgattggctgataagggaatgattgattaatttgagattgattaatgattggcggattttggattaattgattgacttttgattaattaattgcttgctaattgcccgtcttgtactaaataataaattcttaaataaatgaagaatattccaatttaaaatttgcgtaatttaagcataatgaatgtgcgcgagactcggttggcttctttggtggtaaggttttaatttaatttaaaattttatacaacttaaatattatttctctctctttgtaaaatgttcctaaaataatggcatttaattttgaaaatttcataaaattcttaaaaattcttttttgaaatttctaacaaatttttcaaaatttttggcttccaaaacaatatcatattttaattttatcatttcaaaatgtgcattggttccagcatcttcagaaattcaagtaaaaagacggccgaaaatttccggatatttcaagccctagcgctttttcttagtcgatctaattttaaaaatttctaaaaatcaaaaacaaaaaaaaatgccctatttttttgaaaattgctaaaatttttggcatgatttatcttaaaattaaaaaaaattctcccccccccccaggcccatctgctcattctcggctctgcctttttcctgttgcccttccccctgcaatggatccccacgtcggtgctccatggcctatttttgtacatggcattcacttcactgaccggcaacgaaatggtcgaacggcttttgctgctcatcacggaacaggcaagcagaaagagagacggtagagagagagagaggagagagaggagnnagagagagagagacagagaagagagaggagaaggacaaagagtgaaacattgtagagagagagagagacagagaacagagaggagaaggacaaagagtgaaacattggagagagagagagagacagagaagagagaggagaagaacaaagagtgaaacattgtagagagagagagagacagagaagagagaggtgagagagagagagagagatgagaaggacaaagagtgaaacattggagagagagagacagagaagagagaggagaagaacaaagagtgaaacattgtagagagagagagaaacagagaagagagaggagaaggacaaagagtgaaacattgtagagagagagagagacagagaagagagaggtgagagagagagagagatgagaaggacaaagagtgaaacattgtagagagagagagagacagagaagagagaggtgagagagagagagagatgagaaggacaaagagtgaaacattggagagagagagagagacagagaagagagaggtgagagagagagagagatgagaaggacaaagagtgaaacattgtagagagagagagagacagagaagagagaggtgagagagagagagagatgagaaggacaaagagtgaaacattgtagagagagagagagacagagaagagagaggtgagagagagagagatgagaaggacaaagagtgaaacattggagagagagagagagacagagaagagagaggagaagaacaaagagtgaaacattggagagagagagagagacagagaa

SEQ ID NO: 9176 - DNA, 4234 bp, Heterodera glycines
cggcgtgaacgggattcccgcgggaaaacatgggaatcttgttcccgtttcccgtcttttttgcctgacgggatttttacgggaacgggaaaaatgacgggaatcccgttcgggaatcccgccccgttctttttggttttcccgttcccgtaaattttttctcaaaaacgggaataaaagtacactggtaagaatgggggtctgagtgaaaaaatttgaaggaaattggtgggaaaagagattttttgtgaaaaaataaatataaattcattttaattcaatagcgtatatatttatgtggcctagtggttaatacttctggtctttcattatttttctcctgagttcaattccccattaggataagatgatttttcatattttctttaaattattttatttgaaatttaattaataagaaactttgtctaactttaaaaaatattttttttggtttttaaatagccataagcccacaaattaaccaattatagttcattttttggacaaaatttgttaacaaatttcactaaaaattttaaaattttccccggcggcgcctatcggcaccgccgatcccctccctgtaccacaaaggattttgtaaaaggcgctcacaaaaaaaagagattttaaccaaaaaaagattttgtaaataagttgaaaacatagaaaaattctctaagaatattttggaattttaaaaataatagacattttaatgaaaattattgtacatatataaaaaaattttctaggattttagaacagaaaaattaccagtttttgccggtaccctcaaaaatattattaccggcttaatttcaaaaactcaagttttaaatttttcttcattaataaagcaatatttaatcatttgcatagcaagaaatttttttaattgtttaaaatataaaattttacttaaaaaataagtaaattaaaattttgtaaaaaaaaaatcaatattttttcgaaaaaaatttttcccgttcccgcccggtatcacgttaaaattgacgggatttttacgtgaacgggaaaaagtcgggaatcccgttcgggaatcccgccccgttcattttcgttttcccgttcccgttcccggaaaaaattttttaccggactctaaggattttggattcgttttgagttttgtctcaaataatacattttaatttatttaaattgaattttacatttgtgttgtagaattatcaatatttagcatttttataaatttaatattgaaaatattaaaaactttcttcttgctattataaaattattcaaataatataccgtagcaattccgtctcggaaaacgccggcatttagaggatcttgccaccatttgatttttttatgcatagtgtggatcatcttaaatgtgcatttaaactcaaaatcattggaaaaaatatattccgaaaaataaaattaattaaatataaaaataattaaatttgtaaatagtatagccgcccttggaagctagtagtttcaatggaaccctggaataatgaccagtataagccttcatcagtcgtgcttattcgttaggtgaaatcaccaattagaaaggtcagaattttcattattttttatgtaaataaattttaaattttttgcaagataaacttctttatgaataaccaaattcacatttattgcacaatgtagctttttaggagttttgagggttggaaaaatcgactctttaatccatttcgacaaagttcgaacccggacctgcattcgaacaaaaactagaaaattcaaattttttctgatttcgagtttggttcaaagttgggagccccaaatttattttatccttgccattgacatattccaatggttttgacaaattttaaattggttatttatattttttctttttaattttttacctccagtgtcattcgtgttttatatttgatttctttatgttctaacaccgtccataaatcgcggtcatttacgaacagtgttggaggaggaagcccatcacgcattcgttggatgcgtcgacccaaatcggcagtcctctggccggcgcgaattgcaatgaaaagtaggtactcctcttcattgctgaagaggtcacggcgaagtgtcgaatagtcacggctcatttttagaattttttgcttaactaaatttaaaaatgcaatatttggttttgaataatttaaaaaaacacaaaaaaagcattcactattagataatcaaaacgcaatatgatccggaaacaagaattttagcgtggaattcactccggattcattcttgaaaataaggtctgatccgggtaaattggaacaggataacggattatttaaaaaaatcgcaaaatatatgttaaatagacacaaatagtcaaataaaatttaattttgtttatattataattaggactaggaatttgatgcaagaaaaatcacgaaatatgtaaataaaatatgtataaaaaatgctaaaatatgtatgaaatatgtacagccagtgaaaatggacatcgttttttaacgggcccaattttatacttttcctttgttttagcatatcataaagttaagattaaaaaaattgaaaaataataaattagaaaaaatacaaattttttgcaattatttaaaaacaaacaaaaaagaacggggcgtgattcacgaacgggattcccgtctttttcacgttcccgtaaaaatcccatcaattttaacgggaatcccgccaggaacggtaaaaaaatttttacaaaaattttgattttttttttaaattattaattttgtttatttttaaatatttttaatttgtattaacgtaaatgattaaaacaaaaaaattaataattaaattttcggaaatgatctgtttaacagggtttccaagtgtgcttatttctaagatttgtgcttatttcagcgttacgtgcttattttgtgcttatttttaggtttgaaaacaaaaaaaatgtaaaatttgaattgttttgacttatcgtcttttattgaagcgaatatttgaattacctaattcgctctttgtcattcaaatccaacaaacctgggaaagggtcatttcggcgcccacgtttcggcgccaagccaaaaataaaatcacacaataaagggttttaaagtccggtgaataagattatgacacccatttcgacccaatcgaaccccgaaccaggactcgtacgaagactcgaaaatgaaattttcaaaaaaattcacatttatgcaacaaaaacggccaaatggacttaaattaaggtacttaacggttctctatgtacagattttcaaaaaattttttaaataaaatatacttattttaggggttttcagagtcgggataacatagaactgctatttttaccccttattcaaagtaaatgcactttatgtggctttgaagttcattttaatgtatagacctagttcgacccaaaaactgaaaaatttaactgtttgggattagaaattggtcgaaatgaatgctacatcagtgatcagtgaccttgaaaacccctgcatacttgttttcaggactagaaaaaaatttgaacaataaccaaaaatgtagacccaaatagggaacacaattttcgttaaaaaatttctttctggtttgttttttaaaatttggtttggcgccgaaacgtgggcgccgaaacgaccccgacccagaaaccttgagggccgaactgagataaaccggaaaaaattaccagtttattttattctcttgagtgataatacccaaaatttcagagaaaattgttaaaattgggcaaaatttctatttttcctcatcagacggcgccgatcggcaccgccgggcccccccaaaacttattttttttataaaaaatggaatagggcaaccgggaaaccagccttttttgtagaaaatctgttaacgaaccacacactaattttcaaaatttcccccggcggcgcctataggcaccgccggacccccttcttccgcaaaagttgtttggaaaaagcgcacagaaaaaaagtgatgttaaaagcaaatctgaatttctattaatattcgatcatttggtccaaaaatgattaattgtttaaaataactgaagtaaattcgatttttgagaattttcattaatttaatttagctttaacttttggattttataaataaatagcaaaattaaaaattaaattactgttattttcacttgaattaaatt

SEQ ID NO: 9177 - DNA, 1389 bp, Heterodera glycines
tttattatttaaaaatttcctcctaggtaattcaatctggtcaaacattcgcttcggtctcttgacataaacaacaaccaattggaatttgtccatgctcaaattttccagggctttgagcaactccgatccgttgatctttcgcacaacgatttgatcgttcgtaattaattaaattgattataatcaaaagaatttaatgattttaattaggacctcagtgccgcctctttttggggcagtgtccgtttggaacgaattgtgctgtcggaaaacaatttgcgcacaatttggcgtagcacttttcgcgaccaggtggcactgtcagaagcaaatccatctaattaattgatccttttctccgttagactctgatcattgagcttaatcttgccgggaatgttcttcactcgttggactcagttgaaaattttaaagttttattttgtattttaaaataattaagggagtttttggccaaaacaatttgctgggcttggacctcagtcgaaacaatttcacggccattccaatccgagcattggcatcggtccgagcaagccttacggtgctcaaaatgtcaaaaaatggagtgaaagtgctgaatcggagggattttgaaggaatgcgcaatttaaattcgttggaattggcagaaaatcgcatcgaaacgctggaagaggcattttgccaaggaaaacagtgccttaaaagcgtaactggttcaggaaatgttctcttttttgccaaaattgaagcatttggacctgtccggcaacccggtgaacacgtggagcccccacatttttttggtttttcattttttttttgaatttttcggtgatttcgaatcccccagggcctttccccttttgtccaacatttggacctttcgcgcaccggtctcttttcgctgcccaagttgcacaaactgttttccctgcgttatttgaatttgtcgggcaattttctgtacgaattgcccccggcagacattgaccctttgccggcacttcaaacgctcgacctcgcccgaaacaggcacaaaaataacaaatttatctttccttttagcgtattatttgtgttttatttttggagattggtcgaattgcgtgcccaactctttgacagaatgcccgagcttcggatgcttaatttaagcagtaatgtcgaactgcgttggatcgataaagcgcttatcaaagggttggggcaggtccatccgttccaataataattaattaatggctaatttggcgcttttcagttggagtctctttcgctttcccaaatgtcgtcactttcgcgactccccgacacttccgaattcgcacatctgctcagactacagtcgcttgaggtaattactctgtttgcattcattta

SEQ ID NO: 9178 - DNA, 2371 bp, Heterodera glycines
  unsure (1)..(2371): unsure at all n locations
gctccgatcactccatttccaatcgaccgatgaaaccttttcgggggaggaattggccacggctgaccttcgattattgcgcgaattgagcataactggtgccaaaataaaaaatgtatgtaaaattaaaatttttctttaattttctgaaatntcagattggccataatgccttcggccaattgcgcggctttcgtttccgtctctccgtccgaaacacccaaattcggcactttcctcccgaggcattgaatcgtttggtcggcgtgacttttctccgtctttttctgaggaataaccaacttaacacttttactccatttttgcccggcgatcagaaaacaattaacgaaagggggacaatgctggaggcaattgatttgggggtaatttattaattgtgtaattaatattatttaatatttaattaaggaaaacccattggaatgcgattgtcgaatggaatggctaagcgaatggatagcgcagcagaaaataaaaggccaagcgcagaagcagtgggccgaaacgaaagaattgttgaggacatccgaatgtgcagagggaaaagtgggggcatttcacattcatttaattatataattatggcacttttaataaatgccaaaatatttaatttgtctttggcagggtatttttggcgaattgcgcggggaacgaaacgcaaaagcgaatttgttggacacttacgaaggagcacaattcatttggtacaggtcggtgtaattaaatgatttttggaacatataaattgaattgttaaagcactgaaaagggacggccatttcggcattttccatcggcggaacaaattcttgattatggccaaaaaagcatgggtgaaggtcaccagcagcagcagcggaggatgaattgtgacgagggaggacggcggataaacggggccaagggccaaaagagaggggcgacggcgaacattttgggcattttggcactttgggcattcattcggacgacggaggcaaaacttaccaattggggagcaatgacagcataaaattggacaaaaaatatgggtaaccaaaaaaataattaattaattgtaaaaattgtcttgtggatttatgaccgccgaaatttgcatttaattttcaataataattctatcaaaaaaattatagggtcataaaactaccaaaatattttattttattttgtgttgaattgtaaatttatttccttttaattgcgggtaaataaatgattaattattaatttgattaattcgaaagtttggacgattagcgaaatgaaatcaaggacagactcttcaatttaatttccaaatcattacaaattaatttggcgaacgtttttttattataaatttaaccatttgatttaaatttttcggcttattggttactaatttttaattgcgaaatgttttaattgttttttaattttgtccttggtttgattgacggtttctgccaataaaaccaattatcaaaaaattgttaaatgaaaattctgcaagaacactgaggaaaaaagcggcgaatttctttcgttttcctttcactgctctttcaatgatcagcagcgaaaatcaaaaagtgagtgataaatcaaataattaacctttggtattcgttttatttctaaataatttccggttattttttgcaaatcaaacgaaaaaaattgacaatttttgtaaaaaattgcgcaatatgttgaaatttatattcacttaattgtgtaaatgaggtgagatgaactttttgacggaaattgtcaacaaaaaataaaaaatttatagagacaaatgattgctaatctttgaagaaaattggcaagaaaaggagccggcggggcggggcgaaaaggggggagggggtaattaagggagtgataaaaggggaaggggtaattagcggggggtgggcagaagaaaaaagaaacaaaggccaactccgtaaacaattgcgaaacaaaaatgaatttcgtcggttgactactcatttgttaattcagccaattaattaccgagtgaatgggcaaatgacccctcctcccccccgccctttcctataaattcgcactcattagcattatcactcaactcattattgcatttacccaccattcactcattcgttcattattctctgttctcgcaacaccaaaaatcagtcacatgagaccaaagcaaacggcgattgtttcctttgccgttgccggacggacggacggacgggacggaagcccccccccccgcggtgctcacctgatcattgtgctgatatgacaacagtcattagtcacgcaaatgagcttgccgaatttacccaccgcactctttcctttttagccgccccccccc

SEQ ID NO: 9179 - DNA, 1343 bp, Heterodera glycines
gatgagaattaggagtcgttgggaaatttaagtattttaaaaataatttgatattgtagcaatttttggcatttctataaaaaatttaaaaaatggaaaacaatgaaaaccctcagaatatacccaactatttttttagccaaattcctaataatatttgactattaactgattttgtttgtcttaatataaattgttgaaactttaagcagaactataaactacatcatgcattgataaatttagtaattttaaataaattaaaatgataatgaacaaaagcacaaacaaaaaaccaatacaaaggcaaataatcacattttttttctaaattttattattacactaattactacctgctgattgttgatgatatgataatgtttcgctttctaaaaagtgatgaaattggtccaatgaaaaaataaataaaaatgatgctaacaataagtcgaacctaaaaagtatcaatggaaataatatttaaatttaatcattattttatgtgtatttgctgaataataatatatcataagttagctcaaacttattcaaattaaacaatcttgatattgagcgataggttaaaaattagcaaaaatttataaaaagttgtgttgtaacaaaaaaattcctaaaatttagactcaataattttgtccctgacctttttgaaactcaataaataattttgaaatttaacagacgaattgagaaatctttgggctatcatatcaatatcgtaaaaagtgatatatatgacttaattgaagtttcaacaattttcatgcatttaaacgacattgcatttttgtatcaccataaaaatatgacacaatttattcatgcgtaattttttactgaaacaaacaattttaattttcttttatatgtattgatagctcaaaattttctcgataattggttaaagtctaaaattttttattgagttaaaaaaagttagggacaaatattcagtctaaattttacaatttcggttacaactttgaaaatttttgcaaaaacatataaaatagtagaggacacaaaaagttttaattgtttagattgaataacttttttaggttcggatcagcaccataaaaattgttgaaactgctaattgtcatcctgcacaaagacataaattttcatagaaagagtgatagtttcccttaatgttttgataaaatatattttttaattacatcattttatgcgtttttatcgccgtttggctccaatcggaaatttgtcaatgtgaaattcacattaataaaatacaaattcacatgtctatgtataattttaaaaggatgcatatgaaaaataacaaaaaatta

SEQ ID NO: 9180 - DNA, 1092 bp, Heterodera glycines
aattaaaataatttgtaaattattgaaatcattttttaccccacacccgaaaatttttgagccactcatgttgtttggccacctctatttgtcaaatatccacgaaacccggagagttgcccactgttggttgaacggcaatgccgaaaccaattcatggacaagttcaacggaacaaaacgacggcagtttttcatttttgggttattttttagtgttacaatcgaaaaattacataattagttactgaatgggaatgaattttacaattattgacgggataaactgtcttttagcacaaccttttttttgttgaccctccccaaatgataagagaaattgaccactttacaagataaatatgaaatattattaaaaatacacaaatacgttttgtattttttgaattttattgcctagaatttatgataaatttattataaatcttttagcttaaaattttttatttataaatcaatttgtatcgaaaaagaaaaaaaaattaaaaaatccgtatccgtatacggatccgtatttttcttagatacggattttttacggagtacggattttattccgtaagtccgtaatcctgatccgtattttcccaaaataccgctctctatttttttagagaaaattcgatgtgaagcgttaaaattgtggtgttctgttaatcctggcgtttattcaaatttttttgccagccaattttttatttttttttttcttattttcatttgcaatcggtttacctcagttcggcaccagctaatttttttgactataacttttttctttgccaacaacatccaacattgttggtatcattcgaagcttaatatgttcagaagctttttctattattcgaggcttaatatgttccgatttacgattagacaatttataaaaaaagttataggcacatgaaaattgcgaaaagttgaaatttttgaagttttttttaataaaattttttgaaggcttaaaaatcttttcgcttttgtaaggctaatagagcacgtgtgaagagcttttgaatgataccaacaatgtggatttgattacaaagaaaaaagttattaatcgaaa

SEQ ID NO: 9181 - DNA, 2132 bp, Heterodera glycines
  unsure (1)..(2132): unsure at all n locations
tcaaaaaatttggacgttggttgaagaaatcaaaagctatggttaaattattggaattgcttattttattttctaacttaaggtaaaggcatgtgcggattacaaaagcgacatctctcggcttattcggcgtgttccattggcttggatgcgcattgatgaggcgggaagattcttgaaaggtgtgtttcacaaattttgagatgatttcggctcattttgatctcacatttccaaattttattccctttcattttagtggtcaaagaattttcacagaattttccgactgtccgaggcttattgccatctccatcaaacgagacggtaaacatcagcagaaaacattgtgtaaattaattaattttcaaatttcctttttttagttggacgagcttttgcggtgcgctcgtgaatcggttaaaattttgatcgaatcggacgccgtcacggactatgacatgacgatgcttcgtgggggtgagttcgatgagattaatgtgctttatttaaaaaatacatttcgcacttcgggtcgttaagccggatggcatggaagggtcctgggatttttggttttacctccttttttacttatcacgccaatttttgtgcctttttaagaatttggttaaatttgagtgagtgagtgagatggaggagcggggggggggggtaccaaaaaggaaaaccggaaattttaagcgtaaaataccctctcccccatgggatcttcccaactggctggtagttcatgtcaattggtaccaatgaatttacaaaatttggtacactaataaacttttagcttaattttaaaagttttttgttgtttcagcccttttcggcatctattactacgtcatgtaccactttccgacgcctgcctaatttttgatgagagattttattgtggacgaaaagaaaaacaaattgttgttgatttctctgttgatcctgttaaattttatgcaattgagataaatttctcaaattaatcctatagactaaagtgtgacatcaaaattttcgactgacctgccctcaccccggtagaatgttgttttaaattgtttttttgacaaatgagacaaataagtcagcgatggcattcacatcttaatgaggcaaaatgccatctccgacgaatggctgggaaattctgacaataaatttaccgttgtccacccaatcttatgggcgttggcatttctttcatttccccgttttccaacgaattttcccatttttcaatgaatcgaaaaattaaagtacacaacttagagtgagcatatacaaaacaataaatgatgttttattcaaaggcactgaaatgaagacaaaaaagtgaattatcggctgaaaacaccgagaaaatgggcataatttgttgagcgccaataatttgggtgacaataatcgaatcaaaatttgaaacggatcaaaaattatttactgtattttttggtatgggcactcaactgacgagttcatgggaaaagtttggcttaatatctgcggaacagatcagcatcaaagttggcaaaacttctaattgcttactcattgatttccacccgaattaaatttgcgttttaattgcctctttaatttgtccaactttggttatctgatctaattcctcttccggcattaccaactgataatttttgatctctgatcagtgtgtgatcggattgtgtacatatcattcattgatcttttgccagatcactatcgcattctgctcctgatcccattccattcactgatcacgtccccgccgcgtttttgtgccaatgattgtcgccgcctgttgctggcgttgacccgcgatatttgtcgccggcggagcgtttgcgcccggtggcggcggtggatcatggcgcggcggtgcgccacgacgaccgcgaccaatgccactgccaacgcttgctggcccactgtcgcccctctcgtccgccagcgtagcggcgagcattgcaacgcgaccaccgccgtctccgccgccaccgttggcactcgcgcgtgccatctgttgtggactgtgctccaccgatgaacacattgtgtcctgcattgngtcaccaccagtgtggttgtcgtcaatggcaccactactgaggccattt

SEQ ID NO: 9182 - DNA, 3440 bp, Heterodera glycines
aaattaacccattaataagtttggattagcgatggcaacccgcatatcacaaaaaacaataacaacacataaccccaccaaccgggtggacaacgcgtcgcttttgtggctgctgctgctgcttttgtttgtccaccgcgcgagcgccgccgccatttccgccccggctgttccgtctccgtaccagcaacaggttgtaggtagcagctgcagctcgcttctgctgtcctcaccactaccaccagcacgcttcagttgttgttgctgtgattgctgttgctggggcgaaaactcgccaccgctgccgcttcggtcgccagcctcctctgatgaacagtcgctgctcgccgatgtcgtagtcgttgttgtggttgtcgtggttgtggacgagtcagcgactgggtggtggctgccaacgactgcgcgtgcctcagtcgccgtgtccgtgtgctgtccggcaccgccgccgccgcgtcgctgctgaccactcgccgttgccgctgtgtcgcttggcattgttgtcgctgctgtgcgagcgcaggcgctgccatcgccgccgacgctaccaccactgtaaatgccagccgatgcgaccattgtggcacgcgattcgggccttcaaaataaaagagccaaattaaaaattctgtacttgagaggtgcactacgcttcctccctcccgtatcgttcttcccccctccccaaaaaaaaaagaaattttaaaccatcagttgaatccctggtactgtaccagggtttttcttaagcgggacatgaaaaagttccaggagtcggttcaggaaggcgaaaaaattattttcaggtcgagaattggtgagaagaaaaaaatgtgatccctgcggcaaccccctgtactgtaggtactgtataccgttgaatttaccagaattttcgtttttacccctcccccctcccttcccccgtccgcttgaaatgcacttacgacagggtgcactgctccaatgccttgggcatgcgtcgggccaccgccgcggcatcgctctgtgccattttgcgcgtgatcagctccacgttgtacgggcgtggaccagcctgttgtgcgtccagcatgtattcaacgtccgatttggtgatggtctgctgttgtttgctggaaaaaaatgggaaaagaaatggcaaaatttgtgccgtttttttatttttaattactttttgcaacatcgtaacagcatgaaaagcatggcacacacgccgaacacaagcagtacactgatggccaacagagtctgtagaaatgaacaattattaaatccattagagataattatggcataattatccccctcatttaagtggcgataaatcttccgagggtcgtatttgccaatcgctgaattatttgaaggaaaaaggtaaattaaaaaaatcggtatgataattagcgatttgatactgaaagtggaaaagcgcaatttgccccaatgactaattagatgcaatttcgtcaggatcatttggtgattgtcctaggatttccatcctcgaaatcatgaccttttccaggatgtcaggatgtgaaggtcatttgattgcccttggatttccatcctcgaaaatcatgacccatgtgaaggtaatttgattgcccttggatttccataaggactgtgtacacagagaggcatccaaggataaagtcagattttttccagtgcttgagaatccgattttcagcttatcaaatttgaatggataaatcagaatgccagaaaaaccaaaaacttacaatttccgctgttgtcaaacggaatgtgctgttgttgtgctccatggcaccggtgtagtcctccggcacataaatgctggtcaaatagcgcaggggtgagtcggccgccacagtctcagccccggcaggaggcgttgacgacgcggagcggccaccagcagcagcagcgccaaacgcgccgtcaagcagtctgtgaacaggggggggggataatgatgtcattgggtctcgagactctcgaacagtgctgcaagcaattactgggaattatggcgttttctagaccccataactacggatgacggattaacatattttggtccataaatagaagattagataatttttcgagctaatttcttgcatgattttttttcaaatagtcaaaggcttttttctaatttgatttaaagagaatatctgtaaattcatattttaacggatttccaaaagaaagggttttttagttgaaaattatggattatgaaatgaccgcctttttgggccttctacaattatgttttcttaattgaaaaatagccgtaattacggattaaaaaattgtgtatactctttgagttttgccgccggaaccggcaagcgcgtgcgcgagtcaaccgcgtacaccagcagatgggtgcgtcgtgggtccgcttgcccgtcctcaccgatgaacacctgcttgaccagcacatccgcacccatgccgggcagcatcgcgttcatgtgcctgagatttggatgtgagattgatcggcatagtgattagaatatttgacgggcggcgatgatcagaaaataatgaggaacacgagacataccgaacagcatgaagaacgtccacctgatcagctggttgattgatcaccaatagcacaatgtttgtacccggctggagtttgtatatctgatcaaaatgggggtgcattgtcaggattaaaatttgaaaaaatgggtaatcccagctgccaaaatgatcgtcggggattggtcccatctggtcattgatcagagcttgaagtacccattcaatttttgattacaagcagtccattgtctgtgttagactccagtaagtaccaaaaaatcggttatcgtaacccgtgatggtttacagtactcggaattttgatcaaaaacttccaaattgatcactgactaaaagtggcgctttggcgacgtgtcgcccgtcattgaccagcacattcatacaaaattcatcaccagcagatgtgccatcatcattttggaagcttctgttgaaaaagtgtataggatttgcaaattgtgaaaaattaaaatgacaaatctagagtcacccccaaactcaccaaacccaactcatccatagacccaactcatccatacccaactcatccatagacccaactcatccatacccaactcatccataacgctgcgagttatcgtcgtggcatggcattttctgcttatgtggtcgtggcatggcattttctgcttatgtggtcttgaccgtggcattttttggttgtacggtcttagtcgtggcattaaatgccacggcgacgactcgtatcgtgctatggatgagttgggtatggatgagttgggcatggatgagttgggtatggatgagttgggtatatggatgagttgggcatggatgagttgggtatggatgagttgggt

SEQ ID NO: 9183 - DNA, 3493 bp, Heterodera glycines
tttatcccccagtcagcttcttcattacattcatttttgattttgtaaatccttttctttttctcagctctccgctgtttcttctctgaccaaagtccaaattgatcagttcaattcggtccctcagcttcatttcaccttccaaagtgtccaaatgaccgttttggcctttgttgtgcccgggttggccaatcttcggcccgacgaatcattcgatggccgtcaaattgacagaattttgcaaaaatttggcgacgaaattgagaaactgatcagagaagatcacttatttgacgaagggcaatttcgaagcagcaaaagcataaacagccaaacgatggaattgctgagcaacgctttggcattcgcaagtcgaaaagagcggaacattttaaatattaatttaattttaaattaaaatattaaaattattttaaatattattttattaagaaacaaatgaagaaatgccgcaaataatggcacaacgtgaaatgttcagccaatttgacgaaatgttaacgaaagatagacaaaaggcacttcagaaaagagaaatggtgaagcatttggtgatcggaatgaaaacattcgcaagtgaacaaaagaaaaaataaaaaaacaaataaataaaatttagattttggaaacattttcaaaattttggaaatgatttcggacaaaaatgacataaaaactgaggaaaatggcacagaaaatagggaattgatcagcaaattcagtggaagcgaaatggtcaaaagattcagcgtcactttggcatacgtcgaaacttggacaaaatgtcttttttctttttaaattgaatttttaaaaatccatttaagccaattacattaatgagcaaacaattggttttttggatttcaatttgttgtttgtaatggtggcgaaggttttccttttgtatccaaatgcgacggttccaacgctaatcgaaaaattctttgtcacttattcgacatggtaagtcaaaataaatttattttaaaattgtaaaatgccaggaaatggccaatgccaattcaattggcacaaacggacttcactcagaagggcgaatttctgagttggacgccgggccgagaacacttcgtaaagaggcaattttcgccaagaccaatgctcagactgatccgacccgtcctggccatggctatcattaccccaacattccccgagcaaaacttggcacagaatgccaatctttccacccaaaagtgcctaagaaatcatatgacaaaaggtaaattatttgagaaaaaatagttcaattaaatcataaaaaattaattccatttttagctttggcaaaaatacgaaacggaaatgaccaacaaaaggcattgtttgctcctttggagtccaaaacatttctcactatggtggggcgtttgtttgttgttgagatatttgtgggcaaaattatggcgacgccaaaacaaattgggcacttttagcaaattttgccatttcccccgggggatttttttgttaattttaatgaatttttattgcaattgggtaatgttttccgctaatttagtacgaacatttcattgtggtcacatgcacagcaagccaattccaaattgagcagttcagtgatttcgttggccaacgcattgggacggagttaaccgaaattgttgaagaccctctgaaaaaatggatcaaattttgccatttgttccccgctcggatttcggtgggccaatgcaatgggccaaattcgcagaattctcagaaaaagtaaaaagaaatatgtatgataaatataaaatattggataaataaactcaaaaaatagaaaaataatataaaaataaaattaagcggctgtaataaaatttggctgattggaattgaaatgaacgaatcgccaaaggaaatgagcaaatttaagagcaaaataaaggcaaatctaaagaagaaatttgacgagaaaataagcaaagatttcggcggatattctgctcagattgaatcggaatatgtggacgaaaggggaagaattgagcaaatatttgggtaataataagaaaaaaataaaattaaattaaaatgattttttattattttaggggaataaactcacaaattatttaagagaatgggggaaaggattagaaagatttaacaaaacatacctgaagatttgtttatccctttttttaatttattttttagtatttggggatacggtcatgcacagtatgccatccgccttttccatttcattttacaaaaataaaatactcactcatcactcccttttttgttttgtgtaattttggttgttttaattgttgttcattttttttgatcatttggccatttgattgttttggccattttggtcaactttcgttcttcgataaatgcgacaagaaatgcaaaaacaaaaatattttttagttattaggtaattaattaattctgactcgggagttattgttttggttaattttctgttgatcaaaattagtgttccaaaccacgagtgcttcccatttcattaaattttgttgatattttcgtccgatcactctccgccgtcgttcgtttgatttttgatccgccgatcgtgcctttattttcgtgctaaacgctcttcataaaaagagtcgcaatttgcactaaatctcacaatgaatcccttatttttttgtaaaattattattttattaattttaatattttatgttaatagatcaatgaatattcgttccaatttcgtcctctttttcttcatcgttttaacactttttgcgctctctcgcggagttccgctcgacgaaggcgttgacgaggagggactgtaagagaaaccatttaaaagttcacgagaatatgccactccattaaatagatctgatttaaagcatttaggcaatggtaattatctgttgaacttttatatgcttttgcagtgatttgaagccggtgcctgcctcaaaagtgacggaccgtgccgaacgcatcgcgcgacgatgcgttcgatgtaagcggcacggatggggccgatggagcagctcaaattggggctggggctgatcagcattaacggaaattgagaatgtggaagtgacaataaatacactcttctatgaatggatgcattcttttggaacatttgttagtttttttggatgataaaaattattcaaataaatcaaataaaattgtggtaatatttctgaatggttaaaaatatgaaaattttttatgttgggcttaattgaaaattttaaatactagcggggtcagcgccttcggcgcatctcccgctaggcagtacgattgtgttatagaattatgaatgataaaatcgactggctcggccgcttcgcgccctcgcatcatttttttggcttttctccaatctctgggactcaacccaccagcaattcaatctctgggactcaattctccggcattccaatctctgggactcaaatctgcggcattc

SEQ ID NO: 9184 - DNA, 904 bp, Heterodera glycines
ccccacaattttctgcgccaatccaccatcatttaatcactgggactcaacccaccaacattccaatcaacgggactcaatccaccagcatttcaatcagtgggactcaattcttctgcatttcaatcactgggactctattctcctgcgtttcaatcactgggactctattctcctgcgtttcaatcaaaaggactcaatccaccgcattcaatcactggaactcaacccaccaacattccaatcactgagactcaatccaccaacattccaatcagtgggactcaacccaccaacattccaatcaacaggactcaaccctccagcattcaatcactgggactcaacccaccaacattccaatcaacaggactcaaccctccagcatttcaatcagtggaactcaatccaccaacattccaatcaacgggactcaatccaccagcatttcaatcagtgggactcaatccaccaacattccaatcaacgggactcaatccaccaacatttcaatcgccgggactcaaccctccagcattcaatcactgggactcaacccaccaacattccaatcaacaggactcaaccctccagcattcaatcactgggactcaacccaccagcattccaatcgccgggacccaactcacagcattccaatcactacgactcaacccacagcatttcaatcgccaggactcaagcaaccatcgttccaatcgccgggactcaacccaccagcattccaatcactgggactcaacccaccagcattccaatcactgggactcaacccaccaacattccaatcaacaggactcaaccctccagcattcaatcactgggactcaacccaccagcattacaagcactgggactcaatccatcatcgttccaatcgccg

SEQ ID NO: 9185 - DNA, 1351 bp, Heterodera glycines
cgaaaacactttgggctccacgcagagcatgaaaaatgtcttcggtccgcggaaggggatgcctgttcaactccagcgcatcgtttagtcccgtagaaaagtcaatgcaaatccgcacattaccacttttcttacgaactgccaaaacgggagctgcccagcgcgaaaaatcaatgggcttcagcactcccgagtccaaaagtcggtccaattcttcgtcgactgctgcttgaactccatgcggcacaggtcgcgcacggcagagcactggcttcacattttgcttcaaatgcagcgtggccttcgtcttcacacaatgtccgaggccaggttgaaacaccttcgggaaggaagccttgatttgcccctccaatttgaccggatcatttgttggttgcacactgttgacaatgagcgactgctgctccaaagtcgtggcaattggctgttgggtggcacgctcgaaagggatgatccaatccaatcccatgatgctcggcgcttcggtgtctgccactgaaagttcaagccgcattgtgactcctctgaacagaacgtcacacttgaaacttcccaacaacttcaatttgtggcccgaaaaggaacccataatttaccaactttttccaacctcggttcacccaaactttgccaaaccggaagctgtatgatcgacaaatgtgaacacgaatgggctgcaagtttgatctggtggccattgacttgtaatgaaatccatatccattctttggtcgcaccattcacactgaaagtcgaaaccacgacgtgtgattgaacacgtggatgagctgaattggggcaaatatttctcgtgtgcccttgctttcgacatccaaaacatttgacgtccacaggaaatgaacagtctcgcaccgcgtgtgcttgaccacaccgcttacacttttgactaactggtgcctgagaatgttgatatttacctgtaaatgttttggtagcatttgaatttcccgaatttggttgcttaggacgaaaattgttgggtttggaatgctttttgaagacccatccccaagtttttgtggtcgggttgaaattgcatggacttggcctggatttgcgagcgcagcggacgagtttttgagcgacagtatggcgcggcactcctcgagaagcttttccagcttaatgtcctgaggcggcgttgcggctcttgccttttccaactgccggaggcactcctaccgcaagtccttatgtgcgtctgtcaacctgaaatgaagatcatgcacttgacttcctctttcgacagagtcatttcggctcgctcgcaacgggcgttgacaatcgcgccaaagtccagcacgttttg

SEQ ID NO: 9186 - DNA, 2417 bp, Heterodera glycines
gtttttgttgtgcgtccaaaatagcttttagctcctctttgtcgtcattttaccagatcagacagaagatgaatgatagatgagacaaagataaagttttaaaagcttgccactagcaaaatttggcaaaaacgaatccacacatagcttttctcagtcaaaatactgagaaactcttcgggctacgacagatggtgaataacttgtttgttatgggttatgtgaggggccgtcagagtcgcttttttggtgaattcacggttaagcgcaaaaatgcacgggcgtcgccagttgttgtgttttgctaacacacaaacaagataaatttattaaatgaataaacaataaaattagaatcacaaaataataataaaataacgacggagtcaaattagagagtccggaaataaacaccgaattgcaaaataacacaaatgcaaagaatgagtcgatgggagaggacccatcaacaaataactaatcaataaaagtattcgtgtcgaaacttaataatattaaatatcaacacatccaacatatgaaaaaaaaactattttttaaatttaaataatatattgaaaagccgaaaaaagatcaatttttcgtcttaaattaatacacgaagtaattttgttaaataatgcattaattcctttatagatattttaaaatttaatttataatccacaataattttcattcagagaatgaaaataatattttgatttaataaacattaaatttatctaaaaattttaatataaattataaagcctttgtttttaatatatataagctaaattcagttttcaaaccatcattttggtcatacatagctatgaaaaattaaatttgataaaaaatggagaagatggaactctggaacaagagaataacaaaaaagaatttaaaagtacgtaataaataatagtaagtttgaaaaaataaaataaaaccttcaaacaaaattaaactaaaaaaccaaaaataaaatcaattagttttttcaacaaaaagataaaagtagatacaaactaccacccaaattaattattacattgtatcatttattacggtgtaattgtagaaaatatgataaataaattttaaaacaaaatctaaatgaaataaattgaacatgagaaagttcattaattaaaatacttcttctataagttcattgcgataaacaataattcattgaaaatttaacctgagcataacaaggcagattgaacaagctaagagattttgccaagagaaaataaaatattcggccgtttacctaaatatatataatagttgaaaaatttagtcagaatttattaaaaaatctccctattataaataaagcaaataagcatagaagaagctataggattcaattgaattaaaaataaaatttataataataaaattacaaaaaaaagaaaatattttaataaaacaaaaaagtaaatttaataattgcatgatttaagcatattttctacataaacaatataattcgcccaaaagaaattatgtaaatttatttttttttaaagaatttacattaacaatttaatgcttatattttatggtcattgtcaacatttttttttcaatttatcaattaaaattatcttctgtgatatttgacctcgtttttaatttaaataattaatttgtggcattttgtctatttaattttgttccccttctaaatttttttgttttctcagtgcttttctcatattatattttggcttcaaaatgatggtaattttattctcatcgctctccccgacttttgatttttattgaattaaatttgttctgttttgtgctgtggactttaatttgtgttggagatacacttttggttttaattgtttgagtgcaattcttttttgttaattttggttgacgacgaacggggacgagaagtgaattcggaggagaagagaagagcccgaaaaagccccgcatttgtgttctcccccattttcttcaaatattttcgacgtggcgctcctgcttttctgggtaagctcagcgacgggatttgattcgattttcggttttcaacaaaaagggagcaaaagtgggaagtaaattgggattgagcgcattttgaggaaaattagtgattcacagggtgaacactaaacaatttgattgctgtcattcgaaagatagatccacaggttgggctatcagattttgaatttgttatcggatcaactcgccgtttttcttcacactcgccatttttgttttgttccgcagtacggacaaagcacaactcaacgattttgtttcaacagcgacactctcagtaaggggttgcaacaaaactgcatcaaaagcgacactctcagaaaggggttgcgccacacagattgtggttattgaaattcagtggataaaggaaa

SEQ ID NO: 9187 - DNA, 2431 bp, Heterodera glycines
  unsure (1)..(2431): unsure at all n locations
tcgagagcttgaactgtaccgtnngttatattctctgtcatatanaatctcataanagtnntctcaacagtactgtaaggaaaaatataataaactcacccggatctgattcgaaaataatcaatgtgatattgacctcgtttttaatttaaataattaatttgtggcattttgtctatttaattttgttccacttctaaattttttttgttttctcagtgttttctcatattatattttggcttcaaaatgatggtaatttattctcatcgctctccgactttcgaatttttattgaattaaatttgttctgttttgtgctgtggactttaatttgtgttggagatacacttttggttttaattgtttgagtgcaattcttttttgttaattttggttgacgacgaacggggacgagaagtgaattcggaggagaagagaagagcccgcaaaagccctgcatttgtgttctccctcattttcttcgaatattttcgacgtggcgctcctgcttttctgggtaagctcagcgacgggatttgattcgattttcggttttcaacaaaaagggagcaaaagtgggaagtaaattgggattgagcgcattttgaggaaaattagtgattcacagggtgaacactaaacaatttgattgctgtcattcgaaagatagatccacaggttgggctatcagattttgaatttgttatcggatcaactcgccgtttttcttcacactcgccatttttgttttgttccgcagtacggacaaagcacaactcaacgattttgtttcaacagcgacactctcagtaaggggttgcaacaaaactgcatcaaaagcgacactctcagaaaggggttgcgccacacagattgtggttatttgaaattcagtggataaaggaaaaaattgttgaaaaatgataattcgttcaccgcgtagaaatccatttccaaggcgtttggctggagaaaatccagagcaacggaggaatgagaacaatttagaaaacgaagcaaatgcattcgtttttccagaacagaacgaaggaaacaatccgcaaaacagccgaaacaaccagcattcacgacaaatgatgggagaggaagaaattcaccgcgcacttttggacgtgaatggtcagcagaacgagcagaaccaacagctcaacgcagacgaggagcaccgccttttggatcaaagtaatttgaatgtgctggcaaatttgggtggaaatttcgacgcaaatttgggaaacaatcggcaaactgaagttgctgcaaatatggcgcagcgtcaaaacaattttgtgacgtccacgcccaacattagtcccggtcaccaggcgcgacaaaattttaattttgttaacaaccgcgttaacaggcgcgttgtagataggcctagggatgcactcggacgttttattcgtattgaaaataacaatgagcaagaaatgccaaattttttgcaaaatccaccgcggaacccgcaaattccgccagtaaatcagcagcagggtaacaatttgggaaatttcggaatcccaaacaaccccaatctcatgcaaccgttacaattcggtatgaacggcatgtatgcgccagtcgcttggcctcaacaaccgatgatggcttatccaccaccaaattttcaaatgttttgtccgccaaattttgttccacaaatgccggttcaaaattttgtgccatttatgaataatttggcaccaaatgcgtttcaaccacaaattcctcaaaacgcaattcaaccaatgagagctcagccaacaaatgttgtgcaacaacagcaaaatccgccgctgacaaatcaggcgatagcacaacacaaccctcagcaggaggtgatccggcaaccaacagggttaagtggcattgaatatgctatgatcctggacaggctgcccgacattaaaggaaacgagggaagtgattcgatccgcaactttttcaaaaaattttcacaatatacgagtgaatggccaaacaaaaagcgaatcgaatcattagaagccaaattgagtggccgagccgaacgtgcctacaatgctgctttagcgacagagccgttcgcgtacgaaaacatcaaacgaaacattttgcagcagttggaagaaacggattgtagggagatgagtgcttttgacgacctcatgaacggtgtgtacagaaaatcgggggaaaacttagacgatttggcaaatcggatttcgggtttggtgcgtagagcgtacccgggattaacccaaaatttgtccgatgattattccatcaaacatctgatccgcagcttaaacaaccccgagctcgctctaagtttggagttgcatcgccgatccggcatgagcttcgacgagtttgtggctttggcttcacgagccgagacaacacaaagggcagcgaaaag

SEQ ID NO: 9188 - DNA, 944 bp, Heterodera glycines
  unsure (1)..(944): unsure at all n locations
attgatcagcaattgacaattgctaatcaatcatcctactagataatcagtgcttgatcagnttgtattctttctctattatttgttgatgtccgttcaattcagtgtgatcggagtcgtccaaatggtcaacaaacgcagcggagtggcattcactcaaatcgacgaagaagcctttgaaacattcgctatttattgtggtctcgcgttgcaccacgccaaactgtacgagaagatcaaacggtcggaacaggctagttttcgtctgcttaatttattttccatttgtccggttttacttttgtcccttttggcatttccttttggcttttccttctggcatttccttttggcatttccttttggcttttcctttttcatttgtcccttttggcatttccttttggcttttcctttttcatttgtcctttttggcatttccttttggctttttccttttgtcccttttgccttttccttttccattggtttcttttggcattttctttctgaattttcccatttgttttttcaattcagaaatatcgcgttgccctggaggtgttggcttaccacagcgtgtgtaaccgtgacgagttgaacaagctgaagaaggtgaagctgcgcgacaaaatccccgagttggacctgtaatgaatcaatgcccccccttcccaaatgcgtttggtttgttcagtttcgagttcaacggaaaccgtttgtccgagttggagaagccgttgtacgccgtttacatgttcagaactctgttcgacggagtgatgtaatccctcccaatccttctcctttcccccccccttctcttttcattttgtaattcatagctattcattttcgtcagttcgtacgatgctgatgatctgatncagattatgctacccgtgcgcaaaaactaccgcaaagtcccttaccataattggacc

SEQ ID NO: 9189 - DNA, 2999 bp, Heterodera glycines
ttgaataaatcccaaattaataggaaattcatgcccatttccaaattaggacgggcacaacgttctaaaatcgctgagctcgtccgattacaaaagagctttgagcacaattcggcactgcattttggccaccgatttggcacttttcttcccgaacaaaggccaactcagtgccatcgtcaaagaaggcattttcagttgggaagacgacaaacacaggcaaaagagaaatgctttaaaggtgcagaagagtttgtttggttttcaggtgcctcgtccaggccattctgatgacggcttgcgatttgatagcaacagcaaagccatggcaagtgcaaacggagacggtcaaagtgatcttcgaagagttttacgagcaagtcggtgaagggagtcaaacacagccaaatgatggcaatttgttggaaagggcgacgccgagcgactgaacgggcgcgaacccatcccaatgatggaccggaacagggcacatgaactgccgcagatgcaggtgaaacgcggggggggggtgaagcggcaccggccaaccgcgcactgttcaggtgggcttcatgaggggcatttgcatcccgtgctacgaagtgttggccgatgtaatacccgaggcggaaaagctaagggagcgctcgaagtgatcggaatcactgatagtggccgaacaatcgaccgatgttggcacgtttaggtacaatgccaccaaatgggaggagatggccgaggaacagaagcgcattcgggaagcggcgatgaagaaggaagaaaccgcactgagcaatggggactgatcagcaacagaataactgattttacgaagggggtccgcttgacatgtaaatcgacgagctttttctttttttttgctttccaaacaacttttttcggcactctttttccaaagaaccttttgggtccgatggtggcgataggcgccgccggggaaatctttgaaaatttgagagtgtaatttgtttaacagattttcaccaaaaaatgataaatttttgcgattttgagcaaaattttgaaggaaaattggggaccatatgtgccgataggagccgccgggatttttaagaatttttatgaatttgcttagagaaaattatgggaaattaatctcagagataaataacaccaaatgaacattgaattgattgatcgggggatggattggggaaaaatggcacacaaaaagaaaagccattccaaaatgagagcatttgtgatggaatttgcatttgataagtcactcaatttaatttgtatgtttaaaaagtagaccatttactgctgctgtggtgtgactgacaattcaatcatttcggcttttgatcaaattcaaaagggtggtctggcgatccgaccgttcatccgtcacttccccctaatgaggctgttaaataatgtaaatgcaaaagttggacttgaaggaaggaagtgaagctgacggattaattaatatgcattaggcgaaagatgctataaacggacgttgtcgaatttatgtgaaaatgggaaactgcagctgatcgtgacggctaatgtgtccggtttttctgctccgtccaaaattgcaattagcaaattgccccaggcaaatgcccattaatttgccattagcatcgcatataaatttggttcggttgtcaaaaaataaattattttttcttttatattttaaccgaaaatcttttaattttttttttgtttgtttgtttgtttttcaataaaatgtgaatggatacgaaaaaaattttgaatttggcggccgctctttcggtattttccttcggagccgtgctaattggggttcctttgatgttcgccgacatggccaaactgcaaatagaacaaaagcatcagcacaaattctatatggacatggtaaatcattcctaatgaaatggtgacaacgattaaagcaatatttttttaaagacagtgaaaatgtggcatgacattttgcagcaaaatgaggcgacacacgacaataccggcattttgatgagacaacgaaggcaatgttagtagcaatcattgctcaacattgctaataatgcataagctaaatgctttaagccaaaccgacaaattcgccgcaatgtgcgcaagggccaaagggaatgcccggaattccgggagagccaggtaattaacaaagtgaagaaaaacaccaaattacttctaaggccaagatggtcttcccggggttcaggggcagccgggaaatgcggcggttggcgggggatcgggcggagggtacggcgaaggagcgtcgccatcgcaatgtgtcccctggtgggggaggggggtggaggtgccttttcaaaggactttccaatttagcccgtcaggccctcccggaccgccggggtacaaaggcaaacgcggacagcgaggggaaaagggcggcaaaggtaaaggacaaaaaagtcattcgtaattgcatcatttgaaggaacccccggggcacccggaagagacggacaaattggtgagtgaaacaattagaaattgagttgaatgtttggcaaattgaaggtgatgaggggcccgagggggagatcggattgccaggggacattggccaaatggggccgaagggcgcgccgggtgaggacggcgtcggatacgcaaaaggagcccagggaccaaaaggcgaattaggcgccccgggagccgctggggaggagggaccgccgggggaaagaggcgaagacgcgtcgccaggtgagtacggacggagacttcagagagaataagcgcgatgcaattcaggcccgccaggagagttgggcccccagggacggcccggggaaaagggcaaaaacggagagacgggggcaacggggatcgccggaccaccaggcaagtggaagtgccgatgggacggatcaccaggagaccatttgaaggcaaagacgcggaatactgtccatatccggaacggtcgaacggacagagcatcccggccaaga

SEQ ID NO: 9190 - DNA, 2124 bp, Heterodera glycines
tcaaattgtcacgaaaacaactcatacaataaaacaaaattaaaacgatgattgttttcacccatttacaaaaattttgtacaaaaaaagccgacattttttcccttattttgtgttttgactatatttctctgtgatcagtgatcagagtaagtgattccccgcccttttgacgacaaattttcttatcggtaaataaaggcaaataacaaaattgaagtgagcattaaaacaattcaatgggtgaaatttaaagctgtttattgttggttaaaggccaaaatcgaattcgtattgcacctcgacgaggaaacgctcctggatttgatcttaaacggctttaattaaacagagaaagcaccgatccgaccaataataaataccgaggctatacacaacgaattcgttgtaaataagcgaagtttcgtcgtccgcttcggtgtttttaattggttttccacagggcacttcaacatctccgtcacttaaatgccaattctgattccccataaatgattgttgtgttcgtctttggctcacatcgttttccttccgtttggatgcggcacataatgcccgactcccctcacgctgttctttcccttcggcaatttttgatgcattttcgagtcggcctctttcagttcgaccgcctccccaagggcgacggcggaaagcaaaagaaagccgggctttttcggatcagagagagaataattggccgatttactcgaaatgtcttcaatgggatgaaaagggaaaaagcaaaaagagcacctgcaaagtaaagcccctttccgaacataaagccggtcttaattagatttgcatgattaattggtaatttgcgcctctctctcaccgacggcgcctcggggggtgcgattcgcaatcccttggccaaaatgctgtaccaattggcgaggcgagacccttaaagggcggacaatgccttcgaaaacgtttcaatccctctttggtcagtaccgtgccaaagcaactttcggttgccaattctgcccttttgctcattttgcgtctttcgcgtttcccctttccctttgtcattatttgcgcttttccgtttttcttcggcaccctttcttttttccccgtcgtccgccgtccctttgacgctcaattcaaaaatatttcgcactttcatccgatatttgtcgtgcgttggcccgtgcgtcccttgcaaatactcctccacaatctttgggggttaattcttttagtttttgtgttaaattccatttcactttgtaattcgcatcatctttttccaggggaatcaaatcccatcgcaaacgcgcgtaatggcattccaaagggtcggcgccaatgtttgaaacggtaatttcgatgccttaaaagcgggtttggcctgaaaatgacatcttttgtaaaaactcgcccgttagcatttccaacagttcgttttcccgcttcaattcctccggcgatttaattggcggcggcgttcgcatcccaaaactgtgcggaatgcgcgtgtaataactgaaagagaggggcactaaataacccgggtaaacataacggcggaggatcaactgttaggcccattttggtttttttttggattttcgtggggtttcccccccccattttctttgcttttcctcactcattcattgcctccacaaagtctctgccgaaagtccctttttgcacgtggcgctcaatgcggcccaatgcttcgtacccaaaacggagctgctctttggtgattttgccttgacatatttccatgggctttttggattccattaaaattggaccgtccccaaaaagattgccgccaatccgccaattagggctgctctagaaacctcggtctcgagtctcggaattttgactctcgaggagctctagcgccaacaaccggacaaacctggggcagcccaaaaaagcaaatagggctgaaaaacatgttttttaacgcgtaggccccaaaagctaaaaatgctgggattatcatggcttcaatccctcattaatcggaatgaaaagcaaatttcaaaattattgtatgttttcggtgtttgagttggtccgtttgtgttccatggcgcccatttggggacccccctcctatcg

SEQ ID NO: 9191 - DNA, 903 bp, Heterodera glycines
ccccccccaattgcccacccaatggaatccgtttgaagtcgtattccaattgccgtgcgtcgctttccatggcttttaagtcgcaaattgtgtccaaaagagttctgaccctttcgtccattttttctaatgccttcgcttcggtttttgcaacttttcttctcacttttgcgtccctttcggcttttttttattttttattttgtttttctatttcctatttgctcactttccgtcgtcacttctcgcgagtggtcaattttgattaggtcgtatttgccggcgacttttttgaactttttaatgtccgttaggaaatcattttgcgtctgaaattaattgcatgtaaaaggaaaagagcaaaaggacggattcgcttactttgtcagtgaattttctgtgaaataattccaacgctccgtcaaagtccgtcccaaaaggcaccaaattcgtctgtccctgacaatgaaaagaatttcctttattatttcctccaaaaatcactttgaatccgacgcggccccaccgaaaccaaacccaaaatttgttggccgccgtttggttgcacagcaattggatcagatagaatttgttgttgttctgctgaatgttcgtttggctgagcattacgtcgtagcaacggcccttcccatcgacgaacactttggcattcccccgcaattcggcacattcggcgtccaccgtcgcctcctccgattgcattttgtttctcttcgaaatgcgtccatccaaattttccttttcactgtcctttggcttttcccgatttgttcctccattttctgtgtctttctctttctttcgccgttttgtttttgtcgttttctgctccatttcctacatctttttgtccatttttctgcattttccaattattttttt

SEQ ID NO: 9192 - DNA, 6491 bp, Heterodera glycines
  unsure (1)..(6491): unsure at all n locations
cagcgaccccaaaaaccctaaaaatcctaaattagactcattttgtttttataaattntgaaaaattttggacatttcgtggcttggacactttgtgggggtgccaaggaggaggaggagacaaattgccaagaaaattatatggcgaaacgttttaaaaaatttttgaatttgttaaatttttcttagaattacaaaaaaaacatttgatatgatgttatttgttcgttcttcattttacatacattttttatggaatcgtataaatttattttacttacagataattaaaatcatttaaaatggcaataaaattggaatttgccggagggcttgacgcaatttttaatgggaaacgcgagaccgaagctgaaaatgacaatatttcggtattattttttatctttgtgctttcataattctgcttcataattacataaattttaatttttaaaatttttctacgtgtgttaaataaaatttcaaattttattcattttgtcctttttcggactgttcgtcaattgttgcggtggctttcggacgggcccttgcggggcaatgatcggtcggaaatgctcatccaacgcgacaccgtcagaccgggcgttttggtgctgatcaacgacacggactgggaaattctgggcggagtatggcaaaaaataaaaacgaaagaaaattgtgcactcatttggtgtacatattttgtaaaaattcgggaatttagtttttttttttaaagtaatatttggccttattgcacagcgaaaatttgattttgttagggttcggacgaatgacgcgatttggcattcttttgactcaccattaaaaatggtcttttagtaaaaaaaaaaaattaagatggttaacccaattttcccaatattccttaccaaaaagggcaaaattttataaattttcatttgaatttaattgtttttgaaaatgcaatttttgccgtcttttttcagttggacgctcagctcaacggcggagacaaagtgacattcatttcgactttacacggcggataaaacagcaaaataattgaaaaataattcattcgttttttgtccatttttgcagaagcataaattataatttttaatcatttttcactattaaatttacatttcaatttttaaaaaatatttgtccattttatttgccttttttctcatttttattcataaaattccctagcaaatgaatgaatgccctgtccccgtgaaaagagtgcgtttcgatcatttcccaatttatgccgccgacgaccaccgacacaatcggcggcggccgtccccgcaatttcccttttttggcggcacatctaaaagaaatttgcacaggaagtgagaatggcatgaaggggatggcacatgcgggtgggtagtcgataattgtacggctattaagccattcattatcggacattgccaagggcaaacagtgacaagtgcaaacgcatttttaattgccatctcattttggttccgaaatcgaatgcactttcaaagatgttgaaacttttgaaagcaatttgggctgacccagtccaactaaattctatcgtgcattttgtgcccaaatgcgctgattgatgtgccaacttttgcaggatttgtgccgacctttggctggccattttccgctgtttgtccccggccgaactttggctgaaaattgcgctgctcagcggccgattcggtgctttggtgggcacccattttaagggccgaagagtgacaattggccacttcaacatccaacgcagcactttgtactcgctgcgcttctgtgcccaaattgtcaaagtgtacgccgacggagtcgcggaatattttccattgccgatcgacccgccgccgcgttacattgtcggcttccgggagatcaccattcggtgatcccaggcgaaaactaagggatttgcacaattagtccccatcaatgagaatgggagttggccattaattgaatcagtgggacggaacccggccgacggattaaatccgccatttaccgggggaactctttggaaattcccggcataatttctccatgccgttcattgtgctgtttgtaaaggtgcgtcgaccccgacgtgatggcctttctccgtctcattcggtctcttctctccccgggcgtttgcgtcagtttggggccgcttgacgaccaccagcgcagttggcaatttgtggtggagaagtcgctgctttggcctctgttggccccgtcaatcgtcagtttgggctgttacggtgccgaatgcctttccctgctgcgacggcacagttcgcccaccgttctgcgcgaactcactgcccttcgctctgtccgttcgggcgatttggtgcccggagggacggccgatgacagcgacggcacgactccctctgaccaagcgctgtccaaatggctgcacaccgtccgcccgggggacgacggacggcggccgaatttgctgcactgtcacaacttttgttgcatttcgaacattgacacaaaagtggaggaactcattgaagtgattgatgagcaattaatgaagcgcaaagtcagcaaacggcggaagaaaattgatcagagttggcaaaactgatcagagggcattttggttgaaaaggacagctttttgttttcgataattcattttctaatctctggtgagtgactgattaagtaatttctttcttccgccgagattgagactgatcattcccgccattatccaacctctcttttcgattttcccatgcgctttccctattcaattcaatgctaattattgccgccctttcgtaggcatttctccgtgccacttcgcccgttagttatgccatcgttcttcgtctgctaaaatatgccactgacattgagccatttgagacggaaaacgaaaggacgcgcgaacgaatggcattgagtcgacgaaatttgtccacgaattgcgacgaatggctgatcagacggggaccgattgacatggaagcgaaccgatgggcaaaatgggcggagcaaagtggcggagatggacttaatgtgatagtgatcgacatcagagaatgaggggaaggacagcaaaagaaggaatcggtcgaatgcccggggggggggaaactttgatgaatcgaacccggttttaatgactctgttttggtgccaacttttccactgctgaagaggggccttctctgtgattcaattgtctttgttttctttaatttctaattatttatgcatatacacaaatttaaggctttccatttgattttttcttaataaaaggaattactataaaaatttaaatttttcatcccagaaaaaccaaactaatcctaatttgaaacaaatacttttgaaaactttttcacctgtcccaaaagctcacaaattataaaaaaaatggctaacaccaaaaatatctcacgatcagagatcagtggtgaccgataaaaagcctttcttttcttaattctttgtcctttcgatttttttaaaattttattcagcaaattaacatatttggacaactgaaggcgaacgatgcaataaaaatatgattttcgattggtggttaatgtatgtatatgtatgtgttgtgtgggtctacaaattagcaaataacaaaatttatttgctcaacagattggaattgataacaaaaaaggaagatggaaacggtaataaaaaaaaagcatttgcgaatacggtagggaaaatacggtagtaacagaacagaatttacagcacattaatttgattcattcctttcttgcttttgtgttgacagtttctgaatgtgaggcgatggattcgaatttcaatttttttaaaataaaattttccatttatttttagtcgaaattcatcgtttttctaacaaaattgtactacctatgtatgttcttatgggaaaataagaaataaacattgggtaaattaagggtaatgtgatataattaattattggtcgtacgttggttgtatactgtatggtatatggtatatttgaagcattactgtgcgtattttggggagctaaatctgttggagattggaagaggtcattttcatcataaaaaaggtggaaaaaattatcggcagaaaggcaatggcatcggacagagaaaaagttccatttttgaggatgtatttaaaaaaacaagtttgaattaaatgtgatgccattcctttaccgttttttaattaaatgcttgtctttgtcggggagggaaatcatttgattgataaaacaaatatttaaatatggtatttatatgagtatgtacacctctttctaattaagctatagaattttgatgattgtgtcgaaaataaggctcatcagaggtgcaatgttttcggaggtggtagacaaaaattttttatatgtttttaacaaaacggcagttgatggaggatggaaatgtgtaaggatggagggaagggatttggaggatacaacgatggtgataatgatagtgatgaagccacaaaaaagcattttcatttgtggtgagtgttttttgcgtggatgagttttggcaacttttgagaatattggatgtgtagaagaaaacaaatgagaaaaatcagtcaatttcatggaaaacccttacaaaatttaaattttgggaatttgcccaatttgtttgttataatggtacaaatgataatgactttgcccgagagaagtgcaaaattcagaggatttatcaacaacaaaaacaatggagaagaaaattcgggcatttccattccttgacaacacaaaacgaaacattacaaaaaacaattgggcgttgggctcccatcaaaaggtaaataatgataataaaaataataatataatatacattcgactgtaataataatatatcaaactgtaacaatatatcaaagactgtcaattttgtcttttccaaatagccgctctctctgtccctccgctctccccatttcacacacactctcgccccttttccctccctgctcctttctcactgatcatcagtaaatgggcggttcggtgggcggtgccaacgacatccaatggtggttgtgcgacgcactcgacgtcatcgtgcaggacccgttgctgctgctgccgttgtttttggcgccgttgttgctgctcccactcggactcacagcaggcgacggcgtgggcgtcgatgcgtcaatgccggaggcaacggacgaagtgccgttgccattgttcatggactgctggtgggtggtcatcggactggagttggtggtcaccttttggaagtacttctccaacttcgctgaaaagtatgaaataagaacactttattatgcacaaatggacataaaaaagataaaaagaccgtactgataatgtgcttcccgtagttgaaacggcgcagtgccggaatgtgtcctttgatggcaaacatcatcttcttgcgatgggtcgagtccgcgacgtccagcattttttgcacgacgtaattggcgaaagggtccttcatcatctccaagaggggtggttggaagaaccgttgctgaaacggagaaaggccaaattaggcattcaaaacagacaaatgacaattgagaaatagagaggaaaactcactccgcacaaacttcgtcgatcagcgcattctttgggtctgtcgtcccgcaaatgagacacttttcgatgacattggaggcgaatttgtgctgtgcatatttcaggatgtctccatgcaaagcgcgcacaatgcgctcccgatcgtcaaacagtccgtgctcaatcacgtgttggatcacgtaattgccgtacttgagaaagggggaaagtgcgacgattgcaacctttttaccaattcgataacttcccccctttcattatgattgatcaaatgtctttttggattgatcatttaaagtccctccacgcttttctcacctgatcggtgaccaaagtgagcacattctcatgcagttgttccagcacaggccgtttttgtccctccgtgcagtgttcaagcacacgttggatgacacgacagccgtacggatggacggagagggaagtgacctgacgaaaaacgaacagattgcaaaagaaaactggccaacggcaaactcaccgagtccgtaaaaccgttgaccatcgtgtcgatgataaactgcagctggtgcggctgaacacgctcgattatctgaaaatggcatttattttttcatacaaaagtggacaatgcatttaaaatgggagcagttcattcccctttttttgggggggggggggactgctccattttgaaagaaccatttaccttttgcacaacatgattcccattctgatctttgatacaccgaaccacttgaggcgacagttcgttgataatctgcaaattgtaacacaaaatcacttcttagttctaccatcagattaaataattatttgattatattgtttaattgcctcccatttgtgacgttttgtccaccgnattcca

SEQ ID NO: 9193 - DNA, 1486 bp, Heterodera glycines
  unsure (1)..(1486): unsure at all n locations
tgcgtatccatggtccacatgcacaggtttttcgtcgctttttcattcaaaattttcgatccaagagtaagcacaattaactcatagttcaatatataactgactgagaaattcaggacattgctgccgcatgtgtttttctggcaggcaaaagtgaggagtgtccacggaaacttgagcacgttgtcgaagcatggttcaaacttaaaaatatgaaggcagaagtccaaccaccattcacagaaacagttaatggatgcgcaattaatttgttttcatttttaattgcttctcaggttcggagagacggcgcagaattaatcgtctttctcgaaagtgttctgcttcagacgataggttttgatctccaggttgagcttcctcatccacttgtccttcatcacatgaattgttacgcgggtggtaggtttttggatttcgtttttctgttttcactcgtcgccgagacactaattccatcgatatttccgttacataaaatattaccaccatttattgagtaaaacatattaatgtatatattttaatctttttgttcagataactcggcgatttcacgctgtgcctattggttcgcatcggagatgatccggttgaaaagcatccgcatttttgtttcaccacctccttcgtaggttaaccaccttcccggtgcggtacagcattcagactattgcttgcctctctatatttttggtctcgctctggtcagatttagaggttttcccattcccgttttctaaaaatgcgtggaaatgccttttttcagattcccgactctaatggtgttccgtggtttaaaagcattgaaccggaaatgacaatggatctgctgaacagttaatagcattcagattaaagcgataataacgggccgctctttgagcactcgccgatgagttcacgctgctttaccacgagtgtgggagcagcgaatgtcgcaaggcggtggatttgcttcagcggttaaaccaatcctccacagctacgtccagcacttctttcatggtccatcagcttcccccgccccctccgccgccaaatttgagtgccgtaaagacaaaccaagcgcaacaacagcagaaaacccctgacaaagtgattaacaacgatcaacaaaggcaacggaacaaaaggccggcacttgcgaggacggggcaaagcgaagagccatcgccagcgaagagaatcccaacagatgctggtcagtcggtctaatggttttataataatacagaaaaagtgtcctatgatttacgccccccgcacccgaaaatttatgggaaaaaagtatttaactgaatattttcgattttccttattctctncaagattaacttcaaaatcgcaatattggctttttggataaaaaccttaccaccnattnncagannattacnggtttanaaaagaaaacaattcttattgaaatatataaacaaaaaaatacagtttttatattttt

SEQ ID NO: 9194 - DNA, 3974 bp, Heterodera glycines
aatcaaatgcaaaagaaatgcactcattccatattccctcgttccatttcctcctcctttgcccaaggcaaagtgccgttagcccatcattgtcagcttcctcctctggcgagggaattcggcggcctttcgcccgctctttcgctctgccaccccccccccccccaagtgcccgtcctcttcaatttctttcccctgcgacttttggctgtgtgccgccgtttctggcggatgttttcctttgcggtcactttttcattccccactaagtcattcattcagtcgctgtgtgggaatgagttttttccttggcccctcatttgcttttcactgcttttaatacacaaaatcgacctcaacccgccgttccttttttggtccttacattttcattttcctccctaacaaataagacagacgaaaaaatccctccggcggcgttttgaatgccacggaaaaatctgccgtttatttatttcttcgatatctcaatttaattttgcttcatttctgctgaaaacaaagaaagggtcgacgtcactttctctttgctttgcctcgtaatttcttttgcccttttccattcccaaattatgctgattatgtcactgctaagcctttgtcaattagtgcgttactcttgtgagtttttttagccaaaaggataaaattaaaggcgaaaattgagggaaaaagaaaagaaaaaaacggggaaattattttaataaaaaatgaatgaatttgaataaaatgctgaaaaatttaatgaagaaaataaaaataagtaaaggcattttagcgaccgattcgaagctgaccgaccttttccattcactgtttcatgaatacaacaaaggtaaaaaatgaatgaatattaaaaaaagaaatgtaataattggcaaagaaaagaatagtgccattgggtacaactgctgatcaagaaataaacggacacataaaaatatatttcgaagcataaattcggttttgaacaaagagtcgaaattcaaactttttcacttttgaattttcagtctaaatgattttttttaaatgtgttaaaaataaaaattattttatttatttatattaaattaaattaaaaatcaaaagttgtttgactccggagttcagggttcgatatgagtcgaaatgaaaaatcaaaatgatattcgaattgggtgttcgtaattagtgaaaatcgatgtccgtgatcagctcccttaataagcccttatgaaaggatatataaagatttggaattaataattatttatcatttaaatcagtgcaataatttctattctctttaaaaatagaaaaaataataggatatatactagtaaaagaatttggaatgtattaagtatttaaattaattaattattatgaattaaattcagtgcaataattcttattctctttaaaaataaaaaaataataaaataatttttgtttttgtttttatttttgtatttttatttttattgtaattcaagaattattacattgatatttgatcataaaaaattttcatttaaatttttaaacgattaaaatcttttttgttggtttcgatttattgcatgacattcttttacattcagaaattcgtcctgttattgaacataatcgaccagtgaacacaaatatatccttttcactaatccaagttgttgacgtggtaattcactcaaaaaatattttaaaatgcttttgaggttttttctgataaatcaaaggaaattcgctgacgaataaatgaaaattatttttcaataaaattttaatcttatataaataaataatttactaatccaaaaaaggacgagcggaatcagctgctcacttccctggcatggattcacttccgctggaacgattggaggatcggtcggtctttatcgttaataaccctccattttcgccacactctctccgtttagcgtgggacccgcggatgaacggagggatcgccaaaatgaaagtgcccgtcgaagttgtcatttctgttgtcgactgaattagcattctcctccattttcagatgatttggaagccggatatcattctgtacaacaacgccgcctcggaatatttgaacgaaatggtaattaattaattgatgggtgactcaccgatcacttaattaattggtcccgcaattctccccaattcagacgacggcgggtgtcacttacgacggaaacattgtaaagacaaaagaggcaaataaaatggtcaatttttaattttacagagtctttccatagccggcattttcaaaagcagttgcgaactcggtaaaaaggacaatctgttcaaaatttgtgcccaattcccacttcgttttgaagatgtccgtttttaccctttcgatttccaaaattgtctgatgaaattcgcttcatgggtaaatctgataattgttataacttttggcaattgtttttctttttttaagtcttatgatggcaccaaaattgacattttttctgagtccaccggtgacacttctaattatatggtctccacggaatggactctgcgcgaagtgcgggccacaaagaattcggtcatttattcgtgctgccctgaaccgtattatggcacctcttttttgtgccattctccgccattcccccaaaggtatccgttcatcgacgtttaccttctcctggaacggaaaccgttgttcttcgtcatcttctcctgccttccgtgtgtgctcatttccgtgttggtgctgctcggcttttatatgccatccgattcgggcgagaaagtcactctcggtgagttttgttggcgttgtgcccactgatcactttttggttgcagggatcacttcgcttctgtccacaaccgttttcctcatgttggtttctgagcatctgcccccaactgcggatgccctccctctaattggtattggtcactttttcgtcatttttcccttaaataataaatcgtttaaggcatttattacggtgtcactatttttatcgtatcccttcaaacggcatttaccgtctttacagtatgcccatttgagtgtcgttttgtctggtggcttttcctcagcttccccacccccctttcccatcagttgaatatccatcacattggcactaatgggccaccggtgccacgcattctgcaaaagcttttgttcggccgcgtctcgcggcttttattgctcaatttggagaagcaataccactcgataaatgaacacgtcaattacttcattggcaaacagaagaaagcggaacagagggagaagaaaggcgagaaaaacggagagaaatgggaaaatggagagggaaaaacaattttaaatggctcagagtttaaagttaataaaatatggacattctttagcttctccgtctccacgggtgagaagggcccattcggcaaattttttcgacgcaaatggcgcagacggcggcgtttttgtcgattccaatgtccattttccaaattcgatctaattttttcatttattattttcctttctaaggttcaatttgttgcggatggctccaactctttgctgaaagcgaaaaagaagcgcgtttccttcaccgatgacttcaacttttattgccaccagcagaagaacggtgcgttaccgtccgcctcggccactaccgtatcacttccgacccatcgctacggcagacgcattctgtcgctcatttcccccgttattccttcacataaacaccacccgaactgtgccaaaatgcgagtggccaccgtgtcgaacattggcaaaaaacgacatcggcataaggaccaaagcagtagcaacatgggaacaatgtctcctcattcatcggcccaccgaagtcggagtccctccgccctctcaacgacgggggaggaagacgtaaagcaaaagggagaagaaaacacggtattctaaagagaattcatcaaagcgattgtgaggcgtcatgaaatga

SEQ ID NO: 9195 - DNA, 1401 bp, Heterodera glycines
  unsure (1)..(1401): unsure at all n locations
atttcgacgattggccaaaaggataagaaataaaaggggaaagccttaagggaatgaacttagactggtggagaagaacagaaggaacgcggagaaaatcggtgagttgaggcaaagaaaaagcgcgtgggggagggaaacgcaacggggggggggcggtggtcagggaaggggtcatgcgttcgggaaggagccgccgaggaaaactttttgattttgtaaaattgttaaggaattttcataaaggaggggtcggcaagtgaccgtggaatttccaaatgaaacttggtgggtgggtagcagggatgttgatcgtttcgtatttcgtgttcgtattttcgtgtttttggggcttttcgtgttcgtgtttcgtattttgtattttggcacgaanacacgttaagcactggtaagaatgggggtctgagtaaaaaattagagatggaaatttatgaatagggagaaatttttaagaaaaattaacttatttatttcttttaaagtgcagtttcatatccttatttggtctagtgaataaactttgtgattttcattatttttcgctcgcttgggttcaattccctaacgagacaaaacttttttatatttactttatattatttcaatttaaatttaattaataaaaattccaaatttatctcactcaaacttttccggcggcgcnctatcggcacctccggacccccccccccaaatgttcctaaaaagtttcttaaaatacagcgccaaaaaaataaagtatgtaagattgttattaaaaacctagaaaattctcaaaaaatttttagtaccgaatcttttggaattttaaaataataggcagttttaacgaaaattgttgaatttattaaaagaaattccagaaactttggcttggctcaaattcgcaaaattttttaatttttttggacaaaatttgttagcaggttggactctaattttgtaaaattttcacggcggcgccttttgcaccgccggaacacctccccaaaagaattttgagaaaatcatgcggcaaaaaaaaaagaaaatttgttagcagactacagtttagttggctatttctaaatttaagaaatagataaaataaaatctgaaaataaattattttgatttatcaagttttgataatgtttttaaatttttgaattttttcagtaaaaaaaaatttagtattttcgtatttcgcatttcgcatttcgtattttattttagtttcgtatttttcgtatttcgcatttcgtattttatttttcgattcgcaacatccctggtgggtagatcaccactaggttctattgtgaaattttaactatttttgccaaatgagcatgagtgccaagttataacgtacctaacttttttaataaacaatcaaat

SEQ ID NO: 9196 - DNA, 212 bp, Heterodera glycines
tatctcgtcacagaagttcataaggaaaaaatggttaaaatttctcgatagaatctaggggagatatacccaccgaccagcctctccccctccctcgtgcttgtgttcggcattttgggcggcggtgccgaaatacgccgtcgggaattttaaaaaattggaatgaaaatctgtacttagaaagaaagcattcccatgccaaactcctttca

SEQ ID NO: 9197 - DNA, 1411 bp, Heterodera glycines
aacaaaaaaaacaacaataatcagggaaagtgatgaaccttggtgcactcgtggaagaggtcataaagcagtcgcagctgttatttgttcccgatgttcaggttcttgaaatttgtttccctaaaaattgcattcggaaatggtttagttcatcaaaaagaacatcgaatcgctgattgacaaatactacctacaacgaacagaccaaaacgacgaatacgaatacatttcttaagtgcaatattgaaagtctaacaagatatttccattatgattgtcctcccttttaacttgtccagccggagattagtccatttcctctaagccaaacaattgctaatgctcaaaatattcgatgatgaagagaaagaaaacccactatttgtttttacttttttaatttgattaaattggttaagggtagaaaattcaaatgtgtactctgtggtgctgtattattttaaaaattagtcgaagcaaacaaatcattaagagccatggtttttcttagatgcacatttgcatgaattattattctatagccaaaattttagaatagttggcgaagtgtcgtcgtgccgggccgtatttttccttgatacgggtttttatcccgtattgatgtcaagcccataacccttaccctagccgtattttcttcaaggccccgaactggaatggaaattatttcctgtggggattcccagtcccatgaccaatacttaaacacactgtccgaaaaaacgagatgtgtaccaataaatagagagtgccagagaaaaacattatctttttttctatgattttttgtctccttttggcgtactatctaatatttttattattaggaaaaacaacatttacttctctccatataactttttttctatccatgtaatttccaccaaattttgcatatcgatagagaaaaaaattttgcatcgaatgttctataaggttttaataattttccatcttattttttattaaaacttattttagattttttgacatttttaattgtttaatggctaaaagaaatttgccacacaagctcaattgcaaaagagcaaggcaaaaaagggagagcaagagagaggagcgacgaacaaaaatggcaaaggcgacggaagccgatgggccaagaaaagtgagttttttcactaattttaattcaaaaatcattttttaaatttcatacatcaaaagccaaaaaacattgtttttcttccccattttgttaaaatattgttacttttaatatttttaatcaaataaacctttcaaacacaaattatcaactaataattatgtttgattagatttgatcagttgggaataaaaagatttttgaatttggcgccttcgtttcaaaactcttttttttataatgataggcatttttattcaa

SEQ ID NO: 9198 - DNA, 2199 bp, Heterodera glycines
tgtttaaattctaattttgtaggtttattgaagccaataacaggggaaaataggcaaataacgctcataggacttccacttaacgtgattacgaaaccaaaaacgctgatgaaatgaatcgccggacgaaacgggtcagttgcgtctggccagttgcgtctggccaattgcgtctggccagttgcgtctggggccagttgcgtcttggccagttgcgtctggccaatttcgtctggccaattgcgtctggccggttgcgtcttagtacttatggggccggttgcgtctcaaacatttggtttggaaaaataattttttttgatttatccgaaggcgcaaatattaataattttttttcttaaaactcatacgtatgaaaaagttacaagcattttttgagaaataaaaaaaaatacggggttaactaattcggagtgaaattgtgcggggtggaaacatagtgcacccatatcagaaaattgtttttgcatttttatacatttcatttgttttaaatcttttaatatagcccgaaaatggaaaacaatcaaataataacgaaacgaaacaacaaaaaactcgaacatgaaggatgcctctatgtcttccatatgttcaatgctgaccgtgacgtaaaattttggcgctgtgaacatcagcgcgatgaattcaaatgccgaggacgaatccacacaacgctaaatgacgtcgtgctgaagaccgttggagaacacacgtgcaaccacagcgcggcaaatgtggtcacacaaaaaatcgtctctggcataaagcggcgtgccgttgagacgatggaaccaccagcggcaatcagggcgcacactcttcagcaaattgccacgccagtaatggcgaaaattccgacaaagaatgccacaaaaaaagtgaaaaatcgaatttttttttttttactttttcacatttttgtttttaagctggtgaagcgagacagcggtgtgttttaaggggagcttttcacatattttttaaatttaagaattctgatttttggccggctttctttcggaaattgggcttccgaaatgaagtacatttatttatttatttataaagaaaagaaaaagtccacaaaagggataaatccacttactttgtggacatatacatacattaatcgtccaaaagtatcggattatacaagcacaaataaaataaaatcgccaagaaaaatataaaatgaggtcaaagtcaaagagatcacaataaccaaatcacttataaaaaaaaattttttttttaaatattctgtagccattttttaagtttttccggtcttattgtcttaatgaacttttaagttttgttttaaattgatttaaagaatttgtttttattagttctttatctagttgattccacaattttgttaccctcccagcaaagggaatgaattttttgcccagtttgtattttgtgttaaatctataaaaggggatgttaaagcgtgctgatggattaaaaatagaaaatagtttcagatctgttcggccataaacaattttacgtcattttggcgcggtacttttttgccaattttgtttttcaatcgtttttctcctaatttcagtcgtggaaaatgggtgtttccggttcttcacaacgccctccgcgcaaaacatccacagagctcaatcaacttttgtctcttccacttggtgcgcaacatgaaatctcgcctaacagacgaacaaactcgcgtaagaaaaataaaaatttattgattttgaaatctcaaatttagcgtttcacaaccgacgctgcctttgcacaagctgtcaaaatgatcacttcgctggcgtttgtgctgcttgaggacattacaccggcgctggcagcgctcgaagatcatcttccggatgagcttgagggcgttctcgattggttgtttgagtttaattttttttttcaatttcattagtcattttaaaggtttgtaatcaactatgttgggcgacttcgcaacaacggcacacgcactcgctccgccgcataaagcaaagcgttaccgtgaagcagacagacgaattttgaggatcctggagcgctacaatcaagaaaaagagcggccgcaaatcgaaaatgatcaccaatattgccaaaaccaaattaatccgaatttgattaatgaaatgcttaggggaattccagcaaattaccaaa

SEQ ID NO: 9199 - DNA, 675 bp, Heterodera glycines
tctagagcatttgtggccctattcatcccataatttccttccgcaaatgtccatttgcgccaaaatggccaatggtttaagccaacgaatggccaaagggccacggctaattgcgaatgtgccaatgcctttctctgctgaggatgaatcagtgtgttctgtgtggctctctttcgtcctctgctaattggcctaattgggaggcgaagagaaaatgaaacacttaacgaaagggcaaatgaaatgaaattaaagagggggcctttgtaatttgctaattttgttttgaatgttttgggtatttggcgcgaaaactaaagatgtttccgcaacattcaaaagaattgcctttttttgtccctccgtccgttttcctttttcataaaaatttccatcccaaaacgatgaatatgaatggacggacggaccattcttccgaaaagcgaatgaatggaaagggacggacagaccaaagaatgaaaacggagggacagacgcaaagcaaaggaaaagcgacgaaaattcaaagggaaacgccgctgccgccctttgcccgtctcaataaaagggcgattaaatcggaggaaatttgggcgggggagggagaaggcgcgaaaatggacgaattggggggggggaggacaataatggacgatttaagcggggggggggggg

SEQ ID NO: 9200 - DNA, 1278 bp, Heterodera glycines
  unsure (1)..(1278): unsure at all n locations
ggatttatcatagactttgcgccaaatttctcccttttntaatcatttttattttgccagacatttaccacgagtgctatttgccgtgcggaagtttgtccagcttcggcggatattacagtcgatttgacgaacagcagcagcgaatgggcacggcactgagcggacattcctcggccagaaaagggacgacgaatctgcgatttctaagctgatcagaaactgggaaatgcttattgatcgggccgacatgcgataggtaaatggccatcatttgctgggatttggcgactcaatcggggaggatcttaggtctgatcatctcataataagtgatacgtaactgatcatctccatggtgtatctgatcacttccttatcagtgtaccactggttaattgctgatcgtaacatcgatagatcatatcctgttcagttggtacttctttcctgatcagtgttgatcaatcactctttacctctgatttccttaccatttttgatctccaatggaagtgatcagatcagtgttcctgccatggtaatccttctgctgctgtctgtcctttgctggtcattccttggtctgaatcggtctgtcccgtccggtgaaaatgtgtgctaattaatggccaatcaaagcagctgttgagcaaatttgctcaaacattcattcatttataatttcttcgatctcacagaatttattataaatttcccattttattttccttcaaaattcgccttttccatcgatcgctttcatggcattttttattcgaactttttttgtttaaattgttcaaatttctattttgtgcaagaaaatgaattttttatcacatggcaaaattttggccgaaaaacaaacaaaaaaagtgacaaagagatttttggacggattttcccggcttttcctctcatgcgccgacggagcacagcttccaaaatgccttcagctgatggaccctttccgaggcggagacaacggcagagcaaacggcttggatggcgggcacagtgtgcgcctgaggggcatttgaatttggaccaaatttagcagtgggaagagcaatttcgcgatcagaaaatccgaaaatgattgattttcatacaaatacgcgactgaatctttcaaaatgcttggatgatcagagagcagaaatttcaatgaaatatcaaaccaaaaaccttgctggtaccgattgattgattatcgattggcgactntgattagctatntattgcttatcgnatattcactcattcgcccctctg

SEQ ID NO: 9201 - DNA, 3904 bp, Heterodera glycines
cacaaaaaatcgtgattatcgcatgaaggggctaaaattgtagctagagcaggttttgtgcggaggcacgaaattaaaagaattgagttcgaggggcaggatattgtaggggtaggggtacgtacccctgtatgcccccccccccttgggactgtcccttcttacggccagcctcgtctgcacatcattgcccgccgcctcgctgagcaccgactgcaggtcgtcctcctccatcaccatgtccccgtccaagtcgaccaccttttgcttctcgcccatcggcggcgattgccttttgtccggcgaatggcgtcgaatttcgtcaccactgcttcttcctcctccccctccacccgtccgttcttctgccgtcaaaattgaactggtcgagctggtcgactccccgccgtccatcacatcgtttgccaatgctccaccattttgtggatgccattgttgttgttcgacaaacattctgccaccctaaagtcacaaatcatcgttgatcatttcggctttcactgatcactctgtcttccacctttgcctgccctccgtgccgatccgtcaatgagccattcattggcacagttgcccaatttctgaagctgtcttcgttgttgttattttgttcatcttcgatggactcggatgaataatagttgagcagagaagagcttggggaggagggtcgttgttgggggaacggcgccggagggggcggcggaggatgcattttggcatggaaagggacggtgccggacgacgggggcagaaacacggaagtggcaccgccgcggggcaagtcacgccacacggacagcgaatacacccattggaccaacttgtagcagtctttgggcagctgaaaaaggcataaattgaccatgaccgctgctttgggccatttgctggttgcttgcctggggcaacatggcaacgaattggtccaacgcgtcttggcccgcgtaagtgccagccgaccgggacaaagtggacagggaccaacccgtggagtccaaagagtggcgaactctgcaaaaatgagggaaacccgtaaattaattagaaaattaattaattaatttgattagtcaatttgcgttaatttagcacaacaccttttcagcatggccaacgtcgttttgacgggacgggcgagctgacggagttggttctgttggcgaacctctctcacgtccagagagatgcgtcccaacgactcgaccaattcgcccaatgcgaattcgacggtgtaactgaaaacgaatgccaaatggaaaaaaggggaaaagacccgaggagtgttttaaataatcaaattgaaatggaaaggagatgatggcccaagctgacacaatgtcgcgaatggcggccaaattgtgccggagaatgtgcgactgtcgccacccgccgtgtccgaggccggcggcaacgaattggctcattttcagtgcgtttgtgtccacgactttggcacaatcggtcagctgagagcagaagaagcgctttcgcagctgtgcctttttggaaaagcacaaattggctaatgaataagaagcaattttaagcgaatggccggtggaattatccaaatttttttttttttgaaattcacttccgcttcaacagcggcggtgttcgcccttttgtccgtattcgccatttcgtcgccatcttcgctgtccgccatacttcccccgccgtcgtccattgcttcgtcgctgtcgctgtaatcgggcggtggtctgaaaaacatttgaaaaacattcatgcactctcacaaatttaaatctgtggtgcatttcattggagctgttaaaattattgaagattagggtcgttgagggaaattgaaattttcggttaaaaagcggcggaatttcacagttaattttgttggatgtcctctcgcagggcacccgaatgcctaacggatgcactgatcagaaagtgctttttgctcgatcatttctttgatcgtgcacatctaataaaacaatggccaaacccgtcacacggcgtgtaaaagtgttggacggtgttgtcgttgaaagtgaccgcccggcggactccgttgtgcgcctgcggcggctgctgggaggcggaaaaggcggaggacgacggactgttcgcccgcggggtccgattaatcgaatccatggactgactgaacgcgggctcgaccagcgaaggtaacaattgctgggaggaggtgagagagccgagggttggcgtagcggagccggaagaagagagggcggaaggaagaagcgacggatggcaggaggagaagagaagctgatcagcggaagagaggccgaacggatgatcagccgaaaagggaagcgacagccgacgctgagagtgggggggggaagggaccatttgccaatcggatgcagaaacaatgcgatgccgggccaggaaaatgtcgagactgtttcgccagagtcaaaaacaatccccgaatcgagtgctgcgagattctttgtatctctccttgcctttccatccccgaaacaatgcctcgccatttctttcggcttttccccgttttacttcgggcagcggagatggcaatgagttggcggagccagtcgggtgcagctgcacaggctcagccctggccaggaacactcgggtcctgatgaatggggagccgcctttgtggttcctctgctgctgttgctgcttcgccgtgccgtcgttgaatttcgtcgtttggtccgttttgtattgttgcgacacaaattcactcgggtcttaattaattggatgaatgacagaatgaataggaggggagagaagccatcgcttaaataggcatggaaaatgagcgatttgtgaggcaaatatattcaaattaatcttgccaaaatcagtgaccgatgaattcgttaacccccgtttttttctttctttttttattgacgattctttttgccaacttaatttttcattgttttattaaaatctaaggcttattaagcattataagctgttacccgtgaagcttttgaatggactgtttttttaaatatagaaaattaaaaatgcaacagaaaacccttggaaaaagggggggggggcgactgcccatgctgaaaagacaatacccaccgaactgctccaaacttcggattgcctcctccacggcatccacctcatattccactttcttcggcacttctttccattgtttttccgcgcgttcgccgccattggacggcacaaattctgtgagtcgcagcgacgaagtgaccgtcggcgactgcgaatttacggctggcgatgcgttgcgattgtctccacgactgccttttccagcaaccgactttggcgcccccgcggagacgcgtcgatggtccgccatcttcaccgcctcactttcctcctccgcttcgctgccactgctgtgccggaaacggacacaggagggcatcataagcaaagaggacgagccggacgaggaggaggaagagccgaccggagagacggtaccgccaacggcacccttttttgtgggtcgaaatcggagcaaactttgccggatggaggaaagacttggcgactttgaccgcgtttgggtggcagacgaagatgacgagcaggagacggagccggacagactgctgcggtcttcgaaatcgccagcgagcggcgagggagaggcggtcgccgttggcactgtgccattccccgccctttcgccgttggcatttttcctcccgttttggccctttcccactccattcgtctccactccgttgttgctcaaagcggcaattacgggctccgaatctctgcgaaacagctgttgctgatggtcactgggaaggactaaagttgtgtgcgtacgacgaagcggagggggcagcgaagaagcgacggcatgaccatg

SEQ ID NO: 9202 - DNA, 5333 bp, Heterodera glycines
agttatgacggatttttctcgaaaaatctgtaaatttggcagtttttacgaaacgaacgacccagcacggcttgttcactcactcaattccttcttccactcgtaaattttgttgcgatatgtgcccaattccttggcaattatttgctcaattttatagcgcttttccttttgccaattgttttgaaatctgtgctttcggatttcctcaaatgttttgagaatttcgagtttttggccctcgtcttttattttggtttgtttttctgctttttgatgccaatttcgcttttccatttgtaaattttgcctcgcgttactcccaatcccttcgcaatttcgtcatcaattttttgataatttattttttcacttttcattttcttttcgtatttttttcttttttcgtcaaatttttcgattatttttttcattttttcctcatctttttcactgtattttttcttctttttctgctgccctttttcttcaaattccctattccattggaaaatttttgcccggtaagtgcccaattccttggcaatttcgcattcttttttgttccgattttcttttttgtaatcactttccattttgaatgcatctctctttttgataaattgattgacaatcatcaatttgacttcgttttcctcattctcagaatcgctttccgactttgccgcctttttccccttgctaattggccaattagtgtcaatttgctcctccgttttccccttgctaattggccaattagtgtcaatttgctcctccgttttccccttgctaattggccaattagtgtcaatttgctactctttttgctcattaaaaaatgtttcaattttgattgttgcttcttgtttttcttccttctcactttgtttaaatggttcatcttttgttttctttaaacttttagttgaaaattctttaattttttcatcattttcattttgctcacattttacaatacttttcctgatcttttggccatcatttttttcataatttatttcttctaaattttttaggttggtaaaaaaagttttttgccaaatttcttcaaataaatctttatcatcactttcttctactccgaaaatttgtacaatattattcagataatgaatgcttagtaaaattttcatcgaaaatattagcaaaccatttttggctaaaattaaaatctctccagtaaaaaaatatcaaatatttattttttatataacatagaaaattggacataaccaaatctaacgaatttaaaaaatatatatgaaaacaggaaatctggttggaaatttacataaaaaacacctgttttgatttattgcgtaaaagtgtgaattatttaagtttggcattgtatcttatatgtcattttgagttccagtcccgcagcgggatccgcaaatttgaaatttccggtctctaatgaggatgcaattttcaggttctaaaaccgccaaaataggtaggctttaggtcccctaaaattccccaaaaaataggctctaaaaacgggaaaacaggcaccaaaaacctcaaatttagggggggggtgtaaaatgacaaaatttattcaagccaaatcagtattgagacaaataatttttaaaatcacaaattcctgtcaagaaaataaataaataaattttgtggatgagtttttgagaaaatttcaggccaccgggagctcaggaaaaaaataggcaaaaacgtaaaaattgcatccctaattataatttgtttgtgaacggtactttgctactaaatgttcatatatgaaaaaaaagttaaatgaacagacgcttagaatttaatagtgttttaaaattgttttattttattttttgtttgtgccaatatttatcggtcaatgcctctaatgttatgccaacattacaactgaagaaaaaccccactcaaaaacatttacttatatttttcttacgtcaaatttaatagacgagacaaaacatctcacaaacgaataataaaaatatgtagcgttactaattacatggacttaaaaaagcaagctgtgcgccaatgtcattcattgagtttctaatttttttgatatgaacgccgattgcgatttctgaagctttgggcatttcgaaagcgaacaaaatacctaaaattaccaaaattacgaaacaattcatttttgggtgtaattttcgcgtttttttaattcctaaaaaatggctgaaaatgggctaaaaacacagaatgatgaaatttggatctattagctatgttcatatagtttgtattacatattactattgctttaatctttgtttttttagtcagaaataaagtttttagaagaacgattaaatgatattgaaaaaaaatctgcatctataataagaaaaataggtgaaaatatctttaaaaaagaaatgatcgagatatatttatggcgaaaatccaaacataatatttttcattttttcatacttctcatgggccacgaaaatttggcaattccaagtcatttagggcggcagttcaggttttcaggtcaccttgaaggagttatctgatcactttggtgcgattgaatttttgatgaacatcaaaattacctaacaaaagtttgaagttgccttattgccttataattttgttgcatactgtaaagaataattcaaatttacaatattatttatttcaatccaccatcaaattgtcatggaatctcacttaaaccctccataatgctattgattggcttaaaggcaaagcaataagaatatttctaataaattataatatctattaaggaaataaatgttttaagtgacaaaaaaaaaccctcaaaacattgcctaaaaattggaaaacgggtctttaaaagtttataatttacaaaatgtacataaaatatgtataataattagggatgatatttttagttttttacctattttttcaaatttaatttcaactattttggttgatcaattttttgaataaattttaacattttacacccctaaatttgaaagtttttaataactattttcccatttttagcaactattttgggttttttagaacctaaaaattaattattttggccgtttttagcaactataaatatcattcctaaaaataattatatattaatgttaacaccagttttttatcaatatataaagaaatcctttctataattatatattaattttaaacaacattttttataaatttatgacagaaattctttttattttttggctaaatatttatgtaattttttttaattaatttaattttgccttaagccctcacatcattggatcaatttgtccgcatgttttatattataatattatctaatttactttgtctgaatttcaatttaattttctgcacaaaagaaaatggaaacgatttgtttagcgaattatggaaaaatgattttgccgatgctcaacaaaaaatggggaaaagctttataaaaagcgaacaaagcattggaaatgaaaaggaaatgaccaaattttcattggatgttcaaatcaaagaggagataaaaaatgaagtgaaactcgagagattagtgaaagaaatcaaaaacgaacaatcggaacaaatggacgaaattgggggaaaaaagcgcaaaaaagatgaagaagaaacggaaacggaacaggacagcagcagcagcagcaggtcaaaattatttaagtgaatagggacgaaatttatgtaaaaaaaactaaaattcgtggaataatataaataaatatatttattaaaaaaaataatgaatatgtacaataaaatggcagaaaataacttaaattatacaatgcttacaagggaacctcgtgaactgtaactcggaaaacgtaaataaatttggtaattgtgaatttttaattttacgggacaatagcaaaaaaaaaaagagttatggcgcctcaaaaatgggagttttagtgccaaagatctgtcccattcacagctttattcactttttttttattaattcccctaacatttacaactgagtgatttttgcttattgtcattaaagaaaaatcaacatacatattttttcataaaaaaaagttctaaatgtttagtccttttataaattaattaaaatttattcagttttatgttggatttgaacctggacctcctaaagtgcgaatttaaccattatttttgttgttaattttctcgttttaagggtttctttttttaaattctcactatttataaaaatcaaaaattttgaaaatgctttttccataattttattttaataattcggaatttttcatgaatataatacatatagtgatgaaacagcagaagcagacgaatttgataatgacgaacagaaacgcaaattgatgattttaaaagaatatgacatacggagaaaagaatggaaattgaaaaatggaatcaaaaaagaaaaccgttacaaaattgaagcggaaattgccaatggattgggcacaaatcgggacaaaatttaccaatggaaaagggaaaatgtgccaacctacaggaagagaagtgatgaagcgaaacggaaaacaattgaagaatttgaaaaaatgaaaatcgaatccaaaaacaaatgggaaaaagagaaggcaaaagttggagggcaaatcgccaaggaaatggaaagaaaaattcaaaaatggaaaagagaaatgcaaaacggagaaatgaaattggaaatggccaaggaatttggaaaaaggaaaagagcgcttgagcagaagaaatacaacgaatttgagcaagaaattgcaaagaaattgggcacgaatcggtgcagcatttaccaatggaagagggagcttaagcttggcaatgtgcttcaaatgagcagtgagtggggggacccaaaaggggggtcagtccaagggaaaggccaagggatgtgccgagggttgggccaagggtttagtgaagggaatggcaaagggatgaaccaagggaatggcaagggatgtgccgagggagtggacaagggcgtggccaaggggatggcccagggcgtggcaaagggatgtgccaatggtttagcgaacggaatggcaaagggagtggccaaggggcggctgagtaatgagtgagcaatgccccggtgatgctagagagccaagattcgaacaggtctcgagtttggtcctgcgataatcactagggcttcctattttatgtaaatacatattttttttcctggattttccaacttctttttgtgtttgcgaacaaaagttaggactgggtggggcatatttttacatgttttggggtgttttagctgagat

SEQ ID NO: 9203 - DNA, 2363 bp, Heterodera glycines
  unsure (1)..(2363): unsure at all n locations
gagttaataaaatattcttttttcttgttatttttccctaaataaagaacaaaacatttttcagtagaatttctaatccatttatttttgatcttttttccaaagcctcaatcattgatttttcttctttcttctaatttgtgtaaatcagtgatttttagtctttccttatattttttgtacaaaaaaccacattttctaaatgcttttcttgtgaaaaatttttgaacccgttcaattttgtcaatgtctttttttaaatttgggttccacacttcggtagcgtattctaattgaggtcggacaaaagttttataagctgttgttagagtctttatttccctggtttttaagactcttaaaatctggaaaactctaagataagcgtttcgtacaattttgttaatatgtcctgaaaaatgcagtttcgagtcaattataatgcctaggtcacgaacattatccgattctgaaatcttttttgagttaattaaataatcttttttcatattatttttccctaaataaagaacaaaacatttcccagttgaaatttctaacccatttatttttgaccatttttccaaagcttcaattgctttatctaaatgatttgttttatcatcattttcatgggcataatataatttaacatcatcggcatacatttttatgccaactgatgatgcttcatttgcaataaaggacggcagatcatttataaaaattaaaaagagtaatggccctaagacacttccctggggcactcccgaaaatatgctgaaactttctgacaatacttcgccgattttaaccttaaaactccgattttttaaaaagttagttaaaaatttataaatttttccttcaattccaatctttttgattttttgaagtaataaatcaattggaactgaatcaaacgccttgacaaaatcaatatagataatgtcaatttgttgatccttttgtagagaattatatatatcgtccattgtttttaatatttgggttgtagtcgacctattttttaaaaacccaaattgttctttatcaaaaaatcttataccgttcagaaattctaaaattttgctacttaaaattcgttcaaaaactctacagacagtgctggttaatgacaccggcctgtaatttaatggatcagttttttcgccttttttgaaaattggtaccactaatgatgttcgccatatttccggaatttgaccggaatccaaagcaagtcgaaatatgtcagctaatatttttgtaattggctcagcacaattttttaataaaatgtaaggaatgttatccggtgaagtggaatttcgcctggggagctttcttaatatattccaaattatgccagcatttaattcaatatccgaaagtttagtcttattctgtgctgattgagtcagtgaaccattaacaactgaattttctaaaaaagatttttgaaatatttttgctaatatttcgaatttttgctcattactggaaaacatatttccagcactatcaattaacgtaggaatttcattaacttttgataatttatttctaataaatttgttaactgaattttgcccctgggaaataattttgactcttgttcatttcttaatttgtgcaattgttttcatttccctagaaataatttgtaatttaaaatgatttcacttttttcaggaaattttcttacaagcttatgtaaccgtaatttctctgaaaataaatctcttattttttgaggatacgattgttttattatcgattttagaggtctatttggtataaaagtaccatataacttcagtactttatttaagaattctttatatttttgatcagcggtgtacactgagtttattgataaatcaattcgattttcaagtatcgcctgacttaatttcgaaaaattaatatttttaaaatctcttctataaacactgggattattacgacggaatttttcttttattttaaatccggccattttatgatcggaagttgaaaaatgttccaatacaattaattcattaattaattctgattcactagtcattactaagtctaaaatcgtattttctctggtcggttctttaacatgctgtttcaattgtttttggttcataaactcaatcagcatatttgacataggatcattttacaattcggtggacgatatatatttataatttgaattggttttttaaaaagtaatttaatgtgtataatttcgcattggaattttgtcccaaagaaaagtgtctgataagggatcaatgtttttaataaaattgccgatcctccgcccttttttctngtcggtttgcataaacaattttggtattgac

SEQ ID NO: 9204 - DNA, 1479 bp, Heterodera glycines
ttttaagtaaaaaaatatatatatttaagtttaaattcttttggatgccgccctcccccgtgtccatttttcgttctttgttctcatttgatggtctccatcacttcttaatcgccttaatccagccaacatcacgggaatcggagctgattgaataatagtcggctggcaccaatttcaattgaaaattgtttttctatatttgtctggcccattttttgtatttttatgtcaaataaataattctttaatggatgaaacattttcattttaatgatttctccctctcatttgttgcccattagaaatggcaagaagccgattgatcaaaggcaatttcaaaaattttgtaccattttttggaaacgcaaattccaaggtcataagaagggagtgccgttttttagtaaacgaaaaatcccataaatactaaaagtaatgaaaatggcaaaaaaaaaatgatgaaaataatggaaaataatgagcaaaaaaaacgtttaaatacaaaaacattctctttgtttttttcaaaacagttattagaatttttgccaaaaaacccaagaaaatttcaaaattttttcttttagggacaattttgattttttttaaattgcagttttaacaaatttcacatccaaaatataactgtttcttatcaaaataaggctaaagaaaataagaattttaaataacttaaaaaaccgagcccaactcaacgaattttttcgagaatggagaagcaagccattccaacttaaactgtaaaacagtgatgtcattatttttttcggcgagttattgccagtcgcccccttctctctcactttctcaccctctttcaccctcgtatttcttaatacattttttccactctctctctctctctctatctctctcctctccctctctctctccactctctctccctttctctctctctctctctctcctttttgtcttccctcccctcccaccactctctcacttcacaacagtctatcatcccctctcatccttcctgctcttgttgtttaataactttaaatacaataataatcggggcccgagaatgggtgtgaaaattggaaaatcaatttgtcccctcccaaaattggtcgattcgacggctgaacgaacaacgaacgaatcggacggacggacagccaccgtcgatcgtcgatcgctcgcgcaaagaaaacaaatgagcggacgagaaggggagggggaggagtgggcaattattataaaaaaaaatttcttcgtcgcacaccgtccgcccccccccccccactatctcacagcaattgagcaattgcctattacctcctccgttccgttatccatcaattatcattaatcattcattagttcgttcgtcgtcatccatcggacggtgtgtttgtgataaaatgtcccccctctcgaccccccaccccaatttccccaccatttttgcgtcgtttcggtaacaaattg

SEQ ID NO: 9205 - DNA, 3505 bp, Heterodera glycines
ccccccgccccctgggactgtccctggggatgtcccggaaaatttcgaccgaaaaaaatgactgatttttgattcgagacttttctcgactccataaggtcccgtctcggctgaccatcattaaatctggtctgatcacaataagccccatataatctctctgtttttgcttgtattaagcattaataataattcatgtaaatttacacacgcaaatcatcaaaaaaaaagtgggccgattatacaacaacagaacccaatcagcagcaatctttgggaaaaatggccacttcaagtgaaaaaaagggtccgttatttatttatttaaatgtgtcatttgcgaaaaaaatgattaaatttgggcatttttaactaactaaaaatatttaaaattaaaataatttttatgaattcatttattttaaaattaaaaagtttttatgaattaattttataagtgttttgccatcccataaaaaggttagcgccccaaccctcgggaagagaaaagtcggggatctggtaggaaatttctcagcaaaatttgtcggggaacaacaccaccttcttcggggagtaaattgccaacaaatgggaaatttgtaacggcgtttaagcccaaataaaattgaagaaaatattttaaattaaaagtttgcgaactgcttgaaaaccgagaagacccaattatagcaaatttagtctttatttcaaggaaggctttgtccttaaataaattcttgaaattatcattcattggattttaaacaaaaaaaaatgcttcagactttggcagcgaaacgcggtgtgccgtctgtggtgaggagaatgccaagatgcattatggcgtgttggcctgcctgggatgcaaagtttggtgattagtctaattaatggaattgtgccatttgcgttttcccaaagtttcgtgctggggatatatatattttttaacatttttcttgctactgactgaacatatacttttgatcagaataagtgatcagaaatacccaaattggttggatggatcgagatcattagccggttctgattgattatttccgtttcttttttgagaattgagagaccaccgattccaaatgttcgtggtactactgatcaatcacatctactgattagaatgaatgcataaaatcaccttaatttgatcaggatcattcacattgattattgccccaaccattttttgtagggctttttccgacgtgcgctgaaaaaggtgaacgaatatgaatgcttgcgggacaacaactgtgtcatcgataaacgcgcgtgattctatttattataaatgaatgaaaaatctttaaaaattcgttttggataattttgatcatgctgatcagtgccattttcagaggagcgcaattcatgccgtttctgtcgcttacagaaatgcctggaggtcggcatggacccggcgggtaaaaattcgggagtggcacacacatatgtatttgcacctctaacaatagttggagttggcattttgggcataggcatttaaattttcgagggtgagttcccccccccccgcgaaaaattgaaaatttcaaacaatttccaaaaaaatcttagaaaatttttttaaaaatttcaagaatttaaacttttgtaaaaatttcagctattttgtcggaaaatttttgaaaaaacagtaattcatcttaatgctttgaaaaaatcgttaaaaatttttcgaaacttttttttattgaaatttataaaaaatttctaagatatttttgaaaaaattttctaagttttggttttttaaatttttctgcggaaaacgatacggagatgcggcgggggaagaactcgtcctgttttcgaaatgccattgctgtccctgcgttatttcatttttacataattttagcggtacgcccggacagagacttttcgggccaacagcagctgttgacgcgtcgcctgtcactttcggcgggtggcggcacaacaacagcaataacaccaacgacaagcagtagcagcaacacaaccaacaataataacaacaccagaaatgccactggggccggcggcacaaatcgacgggaaaagcgccgggtgcggcaaacaacagcattgggcaacaatggtggtgccggcggtaacaaagcggcgccgggggaagatggccgaaatgggcaacgaatgcccgtcgaaatgcgcactatgctaatgacggtgggtggagagggccaatcaaatcccgctaatccagcgggatcccgaaaaaacccagggatttggacggaatcctgacatcgggatccgtccagagccgtttttcaaaaatcatcaggattggtcggggatttcttcgtgattccgagttgggatctctccgacccaattgtctgtctctacttcgtttgtgcgcaaaactgacaattcccgagactcgggatggccgaggagtttcgaccaccattaaatggggttggcattccgtcccaccccctgaagaaataaaaaactaaacatttttaaggaaaatgaatgcataaatttctttaaaatatgcataaaattttccccagtggcgcctctcggcagcgcctctgacgacaaaattgccttaaattcttcaaaatttgaccccaaaatgaatgaatgtgtgggcaatgtttccccccccccctaaatgccaataacatcttcctgaatttcagctccagaacattgaggcaaaggtaagcaagcggaagtgagtggttgccccgagggcgtccaatcggttttatgggtccaatcaatgggccgggccatcactcagtttcttaggccataacttttttcttacttgatcaatgcccacatttaccaagccaagaatctatgccttggctaaataagaaaaaaatgatggcctaagaaactgaggaaatgggccataaagtgcaatggagccaattttgatcactcttgagaggcacagcacattttgccaaatttaaatttccaaatttttcgggtggtccgtggtgacactgtaaaggatgcgtccgaaatttatccacttcacatcaacaccatccgtgaggtgatcaatgatccggcaaagttgcgcggactaagaacaacggtgggacgggcattcaaatttaaattttaaattaaaaaagtgatcagattcgctatgagccctatcggatggcacgcaacgaggagttgtgcgtgattgtctaccggcgtctaatcgccgccatcgattgggttgaactgttggccgaacgaatgggcggtctgagcactgaggatcgaatagcattggtcaatcaatcaattattgagtatttctgatcacagtgatcagaaaaagtttgatttttgatcagcaatattttttgggcaggttaaagcctgttttggtccattgacactgttcaagtgttcagcacgcacagccagtgtgacagaaaatgaaaatataagtgggcgagggaattgatcactttactgatcagaggag

SEQ ID NO: 9206 - DNA, 1430 bp, Heterodera glycines
tcaaatgcttagacttagtcatagatcaatgaacttgggtgttttctttttgattgtttcaaaaaaacaaacagagtttgtgcactgatcgatttagataattgtaaaatatgggtgatcattgatcaaataccccgactgatcaaaattggccagaaatccgccattaatcaattctgtcttttttgtcctattttgcagatgctttgcctgtgcaactttgcctatgtgccgcgtgagatcagcaaagcttactccgatgcttagtccgtgaatttttatgacaaaaattcatcgtcccaatttagtcatttggacaatgggttggtcgaacggttgctaaacgatttggttggcccattcagacgcattcatcttacagaggaagaggtgacagacagcattaaagtgctgataaaatcagctgatcgagcattaatattgattgattagagtgtggcaaggagattcttggaaatcccgatcaattagagaacatgataatctagatcaatagtgatcaatcagttaacaaatgattaggagcatttggccaaaacgtaaatcaagtataattgtgaaaaattacattgattagggtataggcagcgaagatcaaacggaatcccgggaaaagcataaaaatatgatgccaaaaagaagcggagtgtgggacaaagtgagacaatggacatgtgagaacctgtaaggggatggcgcccatattagctcagtcggttagagcattgcacggcatggaaaggccgttggttcgagtcccaccggatgcattatctttatgttctgcaacagattacttagaaagttcttcaatgggaccctcatcaattgattttcttggcaaaattcagtgatcactttaaaaatattaaattggagattttaggtgatttgtttgtcggctatcattgtactaaatccgatggcacgagacctaagtgaacatgacagcagaactgtgctttcagctgaggaatagaatttgcgcatcgctgtatcacattgtgaaggtggaggaacactgtctcctagaaataaaaatttaaaaattttatcaccagacgcttttttgtcctcgctgatcccttaattcctttgaattaaaaattgataaatgaaaaaatgaaattttttggaataatagaaataaaaggaaaaatattaaatattttgtcaaataatatattaaaaaaaattttctcacgagatatataaattttggaaaattacgcaggagaaataagaatttattgatgtgtgaagagcgaataaaaaacagagcaggtcgtttttcaaacagaagttttccaaaaaaaattgtcagctattttttctaaatgttatgatgaaataaatattcgggcccacttgagagcaataactatttgtatcctgagaaaaattctcga

SEQ ID NO: 9207 - DNA, 2101 bp, Heterodera glycines
aaacaacaataattctcaaaaatattagcttttggaaataaattagtcttaattgccttgcggcgctcaatggctccgcttacatataagattttaaaaattttaatggttacaattccaagctaaaaatggaaattagaaagcaattacaaacactagaaagggtaataatttgccacgaaatttgtaactcacatgcgacaaatttcacccggtcgattactccgtcgatgggcctttgcgtgtctttgaattccacgtgttccatcatgaaagtccacacgttgtcacagaagcgataggctcgcaatttttccgcctcaaatggattaattatttcatccgattaacaaaatccctccatattctcctctatcaggaaaaccgaccttgaagctggttttgttcctcacccgctcggacaatgccttatttatgcacttgtcgaaggtggtcatcaccgtgccggccaattgctgcgaaatcattccatccgcaattagttcgtccaacgaacctttgaaagggaagacaaatgtttttggcaaagttaataaagcactgaaaatcgcactttgtaaagcggtgcccaaagtggtggaacggtacatttgataagtcattgtggccgaaaaagagaacactgttgagaaaatcaacaacagataaataaacaaactaaggagaaataaaaaattaaaacgaaaaacaaataaaacaaaacataaaatgggatgggattttccaataaaccgaaaaaatgcttaaaatttaaaaatttaacaaaaataatcgcgacaaaataattcgaggggacgccgtgttaactctccgcccgcgtcaattcattggccgtcagtcgaaatattcgaactgtgccattggcacacgcggaaaagagaaaaatgcgcccatcgccgtccttagccacacacaaatagtaaatttcctcctctgctccgagaagtaactaaaatttaccacataattcgtggttttcgttttgttcgaattgtctaccgccaaaggctcgccactttttgcgtcccaaattctaatggctccgtcgatacacgcggaaattagcgaaacggaacggtcagtgccaaaaagccaagcacaactcacaacggactcacctgaaagttgcattttcttagaaaaggatgctaatggattggtcacccacttaccgtcgtgttcacattcatgtctgctgctacacttttcccagtcgaaaatactgagatggcccgcggatgtgccaactgccagccaattcagtccgtcgggggcaaaacggacaaactcaacactttcgtcggttgatccattgtcgtcagttcgacccttgaacaataatatttacttaatgcgtcttacatttaatgttttttttcggtttttaattatttatcttattttatgataatcgtttccactttatgcgccttcttttcttacttttgcttggaatgtgtgcaaatgtcgtgcgtttttttgtgttgtgtttatcagtgccgtaaatccatttttacagccaatcgctgccaaattggcgccaaagttcgcatcgattgccccgctgctgggcccaggcaaagaaatttcaacggaattcgcttcttttaagtcccaaattcgcgcaacagaattttcataggctgccaataaaaatttggcatcggaaagtaaaagtgcggccaaacaaggggaagacgaattggtggtgaaaatctaaaaagggtttcatgtgaggtgatttaacgtaagttatggcacagaatcactttcgattgatggacggcaaaaacattttgactttccctttggtcgatcagccacatccaaagggatccgtcgttacatcccgcaaaaagaatgccctcgacagtcgagtgccaaaacagccagccaatttgctcagggtcagagccttggccttcctcgtcctccccgttgtcgtcgtctctccgtgaaggttcgacgaagcaatcgtcgatctgtcaaagtttgccatttgtaatagtaaaggatgaatgggcttactgaaagtgacgccggttgtgtggcttcatcgccccgccccttttgtgcaaat

SEQ ID NO: 9208 - DNA, 1527 bp, Heterodera glycines
  unsure (1)..(1527): unsure at all n locations
aagagttgctctgtgcggatggaaagggccctcttttggagggcgaagaacgcattttcccatgcgccggcgaatgtccgggagggttcgactgcgaattttcccctcgggatggaaaagggcggaatttgctgtccgaatttgtccgaactttaccggttatcctcgaaggacccttcttcaggcttttctcgttttttcagattgtacaaagaaaaaagtgaggagcttgaggaggaaggggctgagagagaggagggagacgaaggacaaaagacacccaaaagggggacgaagccgcgcaaagagggaaagaaaaggacgaagccaaaggaaatgggcggcgtggatgccatggcattgttggaaaagcactacggggagggcattgcggtgagtgcgagtcaacgggccaaaggccaactcggactgattgtgcttcggtgtcagaggcttcgtcccaccgcttttccccccgccgcccaatcgccgccgcctccgtcccccgaggcgaccaatcttttggtcagttcacgaacagttgaaattcgtcgaagtcagcccaagcaacgtcatcagcagaaaacccagcaaggttttaatgttgaaatgacagctaaaaaagaaaagcgacaattggcacagattttgtgctccgtccgcggaacgcgcaatacgcggcaaaagcattgccaacacaaaacaaagcacggaacacgaacatcagcggcgaggagtacagctgcagaagacaaaagttggaactgttctgtgaagaccggcgacggcaaactcagtttgtgttgcgatggtacgccaaaggtacggacggagtgccaaaagggcagtcaaagccgacggattggcattttatttcagacagagtttgtgtctcctatccgtggggatattgcgcaggtcagtgaagaaagcgacgaaggacaaagccacttaaggcaaaccagttgcctctgatccgaccattcgaactcgggaagaatgcgaaatgttatgctcggcggaccgattggacaaaggcaacaaaaaattacacttttgggaggagagaaaacgaagcgatgggagtgggacagagaaaaacaatgccgaaggcagcgaaaatggggtgagaagggcacgggggcggtgaagggtgtacaattaggtacctttgacaaatgccattgtcagagatgaccttgacaaatgccattgtcacgcaatacctttggcaaatgccacattgtcagagatgcccttggcaaattccattgtcacgcaatacctttggcaaatgccacattgtcagagatgcccttggcaaattccattgtcacggaatacctttggcaaatgtcattgtcacggaatacctttggcaaatgccattgtcacggaatacctttggcaaatgccattgtcagagatgcccttggcaaatgccattgtcacgcaatacctttggcaaatgccacattgtcagagatgcccttggcaaattccattgtcancgaatacctttggcaa

SEQ ID NO: 9209 - DNA, 2606 bp, Heterodera glycines
  unsure (1)..(2606): unsure at all n locations
tttgtgttgcgatggtacgccaaagggtacggacggagtgccaaaaggggcagtcaaagccgacggattggcatttattncagacagagtttgtgtctcctatccgtggggatattgcgcaggtcagtgaagaaagcgacgaaggacaaagccacttaaggcaaaccagttgcctctgatccgaccattcgaactcgggaagaatgcgaaatgttatgctcggcggaccgattggacaaaggcaacaaaaaattacacttttgggaggagagaaaacgaagcgatgggagtgggacagagaaaaacaatgccgaaggcagcgaaaatggggtgagaagggcacggggggcggtgaagggtgtacaattaggtacctttgacaaatgccattgtcagagatgaccttgacaaatgccattgtcacggaatacctttggcaaatgacattgtcagagatgcccttggcaaatgccattgtcacggaatacctttggcaaatgccattgtcacggaatacctttggcaaaggccattgtcagagatgaccttgacaaatgccattgtcacggaatacctttggcaaatgacattgtcagagatgcccttggcaaaagccattgtcacggaatacctttggcaaatgccattgtcacggaatacctttggcaaatgccattgtcagagatgcccttggcaagtgccattgtcacggaatacctttggcaaatgccacattgtcagaaatgcccttggcaaatgccattgtcacggaatacctttgccgttggctcacttctccgcttttaaggagtcccatttggatttgactaaagccgatgaaacactcgaagctgtccccagtggattggcagaaggaaaatctggggaaagcttccgaggcgaaggcgaagaaatgcctttcgcaatttcgtcgggtgcgcaaaacgcggaggaatcggcgcgcgaaacgaatccaacggcgtcgtccgccgaattcagcgactttctcctcaatgaccagcgacgacaccgtttgacttcctattcattctctgataccaaaatttgttttgttttcctaagctaaaaagcgctgtttgaaagtgtctccgtttcgatcgatgtgtcccgacggaatgccatcccaagtaaattttgagggcgccaattccgaccatcgttcactccctttggcgtcagttcactttacgttggcatttccgtgacggcgtctgtttcgcctatccctacggatattgccatgtttgtgggcggggggggggagggcggtcagatcaattgggaccgattattggctgatcagggcgaatcggtgatgacggaggatccgatcaaaacggagaaggattgcctgaaaatatgtaccacgagaggacagaagcaaaagacggacgaggagggggaggagagagaagaggacgggaaaagggagagagaggaggaggggaagagagagagggaagcggagggaatgagagagagggaagagccgattttgggaagacagcggaagtaaacggaaaagaaacgaccgacggaagaaagcgaaggacagaaggccaaactcattttcggctggccaatggaatgggtgttctgctgctgctgttgtcctcttctgtcgctgctttttcttattatttttccccttttttaatttaatttttattttccaaataaaaaatatttaaaatgcgaaaaacaaataggcaaatttgggctgaatcagtttgagatcactcgtacatacaataaaatttaaattaaaactcgcgaattgatgacggtggtctgagaagttgtgagcacgcagaaagtttgggacggtgaatggccggcggcggatgcgaatcgcggatcatccaccgatagattggggttgatctgcaggagcaagcgatttgtcattagatatttattttgggatttccttattttcttcctttcctcttaattttcttcatctctttctcgcccctttcactctttctacactttccttccttctctctaatcactcccttctctcttttttctctctgattactttcctctctgtctctctctctcagtctcagatcatttcccctcttctctctctctctctctttctctctaattgcttctctcttttttctctctgattactttcatttcttcttcttctgatcactcccttctctcagatcacctaccctctcctttctctccatttggattattatttgtctctctgtcactttcttttcctctcctcttttttctctcttttcccctcttctctctcttttcttctctctctctctctctgctcttctctctctctctctgatcactttctttcccatctctaattattatattccaactcgcctccttcttctcatttcgctcatttgtactgctgttccccctttgttcccgattccttccgatgcgaaatttggcaccatttgaatgggctgatgatgggcagaagtaatgcatctgttggaggaagaaaagtacgttgtaatggcggtggatgaaaagggaccgtttaaagccaacaattggcgaaaggagcgaacagaacgttggcgata

SEQ ID NO: 9210 - DNA, 5862 bp, Heterodera glycines
ttgtaaaatttttcaaaaaaattatccctaaatttaatatttttttcttaataaaaattttttggtttaaaaatttgttcatattcgaaaaaaaactttaaaacatttaataatttcatttacaattgaaatatttaaagttttaacgtgtttcgctacctaaaaagcgttaataaaaaattttatttgcctatttttgtgcctatttaatgcctattttgcgatttttttctgcctttttaggtgcctatttcgcgattttttgtgcctaaaaatcgcatccctactaatcaataattatctctaactctaacaaaaatattttttcaattaatttgccataattttatatttacaaattcttatttttcttcagtgatcggtattatttttttggagttatgttttttattcactttatcatttaaatttattaaaatattttatttaactttattcaatctaaatttgaatttgtttaataaattctcgatctgtattttgattttgtttaatttttttcgcgcagtacggatgagcgagacggaccacgaaacgtcggaggaggaacggagcggtaatctgtgccgactcgtccaaactcaaagccacgattttggttgtttatttgtcggatctggctatattaaattttgatctgtagaaaaactattatcgtgtagcttttttggtttttattattttttcattttaaaatgttattttaatgtttttcacaattaattaccaattgaattttttacattaaaaattttttaaggctgcacaacatgatgaagcatatttataaataaaaatagtaatttattgcaagataattagaataaatgtgctgtttttaaatgttaatataatcagttatttatatatttaaatagaatagcaaatattaaatgtaaattatttattatttaaatatttatattttggctcaaagtttccagcaaatatttttatgagtttgtttttaatggcatgtcattttaattatgaatttttgttcttataatcaaatagtagttagtatttcattatgtagacatacttatttaaactaaatcatgcgacatttgcggagcagataaaaaatgaattatttgagaataatggtttatttgaaaattcaaaccccagttggccgaggtccggcttttctggtctcggctgagaagccatatttgctttattttaatttacgtaagaaagttgaactgtttagtaattattcaatgattttttttgaacaatgttagtatttgtcttataaaatggtaacattaaattttgggcatctaatataattatcttattcatttgtagtaattacggtgctaggtcgatccacaaaaaaactcagtgtgggcgatccacaaaaaatctcagtgtgggcgatccacaaaaaactcagtgatcgataaaattaaataaataaatttaattattcaattcacaaaacacggtgccgtccggttaatactaatgtacggcgggacgcaagtcattttcaaattttttaaatttttcaatttttgacatcacttctcgccaattttctccatttgtagtagacatctttatttttgtcttataactcttttagctcttttaatttttatcaattttcaatttcgaaattttttatgtgtaattaaattaaattaaagaaaatttgtttatctacataatataaaataatggacctatcttttatttctttttcttgttttaatctcattatcatggctcttttgtttgcatccaaataccgtatttgctctaattatagcccatgggggattatttttcaacctcctcagaatacaggggataattagagactgcgtgattaatagagactgtgggattatttttcgactgatttgtttagtgaaaaattttttgaattttttcgaacatgtcgccaaaaattcagcccggcaaaaaataattatttataatgcatttttgttacagaatttctgtattttacatgaaaaatttgaaaaattccatatatttagcaatggagtctttttgctgtgtttgtaaagcaatttatggaggaagccacagctgttccgtctgcaaattgccgtgccatacattctgtggcgattctggtgggttgaaaacgaaggcttcggcggaaaggtcgtgtgtcacaactgcgtaaacgaggaaggaaatgcaccgatagcagaatactcagaaaatgatgaatacgaactgaaaacaaagagaatgaaggcacgccggcaaaagacaagaagcgcaacaggaacaacgactcagtgaaaaaactggaggctgtcgagtgtgcgcgaaagaactccatacgtgcagcagcaacgaagtcaaagtggacaggaaacagatcaatgactggatgacacatgaagacaaactgagaaaacagatgtacttaatattttaacatttttttgaccaaaatttagcatgacaccaaatggggggaagcgcatgagacttgagggagcgggtcgaccagttcaacatccggaaatcgacattgcattggctgaatagatcgccgagaaacgaaaaaataaacagcttgtgtcaaggaatatcattcgccgaagggcggcttcactgttcatagacattgacatcaaggtgagaaaactgctacctatactactagtcagaaaccgccgtccaactatgcagaagctgtggcaaaattcatcaattttgttgaacaaagacgaaaggcgaaaaacaattttcccggcggcatctttgcgatggacgagacggccgtttggttcgattgcccggacaaccgatgcatagacatgaaaggcgcaaaagatgtaataagtttttgaaaactatttagagctatttcctcaaattaggtgacagtggtggccaccggccatgaaaaaatgcgagtgacagtgtgcctaacagcccgcagcagacataagctcaagccctatgtgttggtaaacagaaagcgaccggtgccgcaaattatcaaccaatttgctggaaaattggtgatcaatttcgatggctctgtgtggatgaacgatgacacaacggaggactacctgcacaaataatcggggcaaagctgttcgttggcgaacgcctcttgatttgggatgcgtttggcagccacaagagcgagaaaacgacgaaggtggtgaaaggattgggagtggaaacggtttttgtccctggcggttgcatcaaattcatccaggtaccaaagcatccttctcaatgaaattcacttttcttccctaggctcccgatgtctttcacatggtacttgactggatccaccgatcgtggcaggaaatctccaaagaagtgatcatcaaatcatttgagggtcagttaaaaaatgaatacaggaaaaatgcttatatatttaagtctgtgggctgacaacgccattggacggaactgaagacgaaaaaattgcttgtttcaagccggaaggagcaattggaccaatagggatcaaatttttgcgcgagtttagaggaaatcaaacaatgagagatggaggaaatgttcaggaggaagccgcctatctgatgatgatgtagagctggatggagtgggagatgacgatgaattgctcatttgttagaatttttactagtgttttttgaaaataaatggtgttgataaaaattccatttatcccccgggggataaattgagcagggggattatttttcaaagccctcagaaaggggggggggataattggagccagcgggattaatggaaacggagggataaaaagagaaaacacggtaagtagttttttttctccgtactagtttcgatatattaagcataaataacacatttttcacttggtttgaggcttttattgggttgatgaaaaattgaccctttaagcacttcaacattaaacaatttttatttcacaaaaaacaaatgttcaatcaatgatgtactcaccattttgatcaatgatcctcccccatcgttcgggcaacatttcaatcccctttttataaaactgatcatttttcgatccaaaaaagtcatccaatgcattttcgacctcgttttgatcagcaaattctttccctctcaagaagtgctccatagatcgaaacagatagtagtcacacgggctgatgtctgggctgtatggtggatgaggaagaaccgcccatcgaagtttttcaattttttgttgcgttgagaacgcaacatgtgggcgtgcattgtcatgaaggagtacgccgccgcggaattttgcagaaaatggaggacgacgaatttggtcatgaacccgctgcagttgttgctggtagatgtcggcgttgatggtttgcccagccggaacaagttcatagcggaccaaccctgatgaacaccaccagatgcacagcaataccttcggtgcatgttgaagacgcctgggggtcggctcgcccaattcgtttggcttcagccattgttttatgccgttttgttgttgagataaacccacttctcatcacacgtgatcagctgggaaagctgcattccagcactcaaacgggcgagaagttcagtgcaggtgaccactcgctgatgcttttgttgttgggtcagtgcatggggaacttcggcaccctttttgttgatgaagccgagctgatggaggtaattgagcactgttgtctgatggaccccgaactctgctgcaagttggcgcgaactagaacacggatgctgctgaacgtgctgctccaagtcgtccgaatcgagagcaggtggtcgtccggagcggggttcatcttcgagctgctcattgccttcacgaaattttgtgaaccatcgcttaactgtagaaagagagagtgcatcattgccctcactttcacaaatatttcgaagagcttgggttggggtagaattttttcggaattcgaaaagtaacagttgtcttaggcgaattttgtccattttttgaaaatcgttcgattttgcaaaagtaatggctatacaacaaatgcaaatggcaaaaagatggccaaccgtccgctgattaatccaattgcttgcctccctttttcaatctctttagaattaaatatcattttttgcataatttgttttttcagagggtcagaactttttcaaacccaatatatcgaaacaggtgcgcagaaaaaaaagcaatgcctcaaaatgcgagctctatattttatatatatcattatgtaaatatcagactttctgagtatatttcttactatttttaggtggtatattttatattgaaatgataaagtgaattaataaattatttcttgtccacaatctggtgtgcgtactactctgggcagtctgtattcagttttattgcgtaaaaataatttcatgtaaatcaaaaataaaatagttttgcatcacacattcatttttattttcgaatacattttttgtttattttattttgatggtggaaataccaatcgttttttcaatgctccaaccgtgatattatagtttttaattttttttttagtttcgactgctaaataaatgttttctttttattttaaatcgaatgcatttttatagttgtatttgaagttttcattaatttttaagaaattattatgcgttttaagaagagttgcgattgaaatttccaaaaaatattatttttcttgtttttaaaaaagcccggtaaaaaataatttacgggagcggaagttcaaatttttccgggagcgggaatcccgtaaaactcccgctcccgtaaaaaatcccgttcaccgaaaaaagcgggagtcgggagtgggactcccgctcccgccgggctctagt

SEQ ID NO: 9211 - DNA, 5994 bp, Heterodera glycines
gttaacaatttacattaaaaattacaaaatttttcccggcggcgcatatcggcaccgccggacccttccttccccacagtttctcaaattctctttggataaagcgcgccgcaaaaaaagggtgtaactttcccaaaaaaaaaatccaaaataatgtaaaattacttaaaatattttgatctttttaaaaaatatagaaataaactaaaaacagtttgttttacatggttaaaaatttaaaaatttagcctattaaatattttttaaaaaatttattatatttttttttgaaaaattccgagttccgacatttttggggtcggaattccgacttccgaaaatttttggggcatcggaattccgacttccgaaaatttttagtgcctctgaactccatccctgggacaaaccatataagagccgaaacatatcctcaatcccgcaataaaagattaattaagccgtttctgaatcaaaatgctaaatttgaactttcgactttttattcaaatttgggccgggattcggaatgttttcttaggtcggctccgtcgttttgttttccctccttttccttttcaccattttttcttctatccccccccccccccccctcccgatgaaattcgccggcaatggcaaatgccatggcgccgacgacggtcacgtcactgtgccggcgttgcgcggcgaaaatgagcacattgcggctagcattgaactgtgaactctgggcatttcttctttgttgtttttaggattgtgaaattataaaataaaatgacaacggcacttttgtgggatttttacatggaaaagcgggaggccctcgccagcattcagcagtttgactacgacaccaacaaattgggcatacggctcggccttgtgtcgacgagcgatgtcgcaatggacgaagacagtgacggggacgatggccggccgacggagagggtaagggagacgaatggtgccattctatggcatcgtttcctcattgtcagaccccctcccccgcctactttcactaattaccaaagttttgagttttatatgaggagttgctacaatctgccgatgatactaataataattgttgcccaacccccattttacagaaaaaaacggaattttaaaagtcgagaaaatacgatcagttgttactaatggacaaaccccaaaatataaccatgtttaattattgtaattcatcttcatctaacaataagttattgtcagtgcgtcactaaacgggggtcaaaaggcgtcgtcccttccattgatttcccaatttgattttacattcatttattggctcccccttctgaagggtgccttcgctcggattcgcgcgacggcacagcgatggaagcgacgcatttgcacacgccggggccgcgagcagctgaaggcacagctcaaacggctgaaggacagacggcccaaagacaaaaggtgcgcgacgcgatgaattggcattacgaccgggaaataatgggacagtaattcgaaattttcttttggaattttaatttcaaatttcagggcaccctaacaacagaatatgcgaatatttatgggcatggaattcctttttccaacttttttcaggcctctgaataaaattaccttgaaaattcagcatttttcaaaaatctttgcttttgttttgtgtcatacttttgtcattgcatttgcttccttttcagaatgcgcacttttctcttccttttcggcttgttcatgcttatgcaagtgctcggcactctgtactattttatcattgcgctcaaatatcccaactttgccaaatcgtaagcatttttcagttttggtaaatgatttttactgaaaaatcggaaattttgatgttttttcagagaatacgcaataaattattaaaaatttgaaattttttaaatttctcttttaaattcatttttttgctcttttggcagcaccggcacttacgtcggtatcgttgtccattcgattctctttttgctcatcgctttccgtccgttgcgtttccttctgttcgttgcgctgcccaaactgatgacgggcaaactccggaacatcatcgtcctaatgatgctcatttggggcttccaagtgcgtaaagatgaaaatcttttgagacaatcgccgtcagacaaacttttttgtttttaaaaatgggaaagtttttgatagtggcatcgtttttatggcaaaaaaaggtggctgcgatttaatgcctttttaattactttttggatttcaattaatcattcacctacattcgtccgttgattaccccccccccccacaaagtatccggcacaaaatgccaccggaaacatcgaaacggtgatcgaaggcgtcgcgtgcgttgcgtttcacatcaaagaggcggcgcaagagatgaaagacttggcaaacacacatttgtacaaggaaccgttggaaaaaatgcgcgagtttttgcgcgaacagagcaaacccttcgacggcatccgacaaacactgcgccaaatggacgaatcgttgacaaagtgggttttgcactgtgttgggtggtcacaaaggaggtgcactcaaaaatggccaaaaaataatttaaaaaattacccacgccctgaacttgcgcggggaggtaccgtaccgcattgtaaaaatggtcgaatttggatggattttttaattttatattcgggatttcttcgttttttagaatgttagcatggcagcgtgcgctgacttctcgtatcaaagggctgatgaccaattgcacggacattgcacagcttcccttcagagcggtaaaattgtgccatttcataatttaaaaaatgctaaatttgtccaattttgacgccattacttttcatttaatttcccacttttctcagtgcgtcggttggctgtccgaacggcacacggattgtctgaaccgtttcctcgagttcctttgcatgcccatcgactgggccaagcatttgtgttacatcaccaaaatgttgcaattccattgcatatggccctccaaagtgaagggggcggtgaaggagggcgtcggttattttgtgaaaggcgccaaacaacgaatcaccgactacgcccgggagacgttcatgtacgacatgtgagttgttggcacggattggtcgattggttcggttcacctccaggacacctaaaaaattgtttcgattactttgcttcgtaatttcctattcatattctgaaattttcattcttttcttttcagtgactcaattatattttcaggtacaataaaacggtacgcgacagtaagcgatgttaatgtgacgagaaatgacagaatcatcggcgatattttaaaatgaataaaatatttcccctaaaaattgtcaggttgagcatgggaaattgacttttgaaactgctggacgattgtggtggaccacgagcaaaatttgacggggggtttcgccatggaaaaggaccgagtgcaaattgagctgaaggagcagatcaaaggcttcaacaagtgaacaaatgggatgaatgaccatgccaaatgagaagggcgggaagggaatctcgagggaaaaaggcgggattcccgaacgcgtatatacaaactcaattaaacgcgcaaaacaaacaccgttgcacttgagcatttgcaatttgaactaattttcacattattttttttttttcaaacactttaattctccgtttagcttaatggatgccatcgttttgctgctgaacattctgatgattttcttcgccatttggccatttctctccgtaaaacattccatctttttttaattctaaattgcctaattaatttcccaaggcttttctgtacattcgcgcgtttatgcgcagcgacaaggcggacaaccgtttcattggcaaggactttataaaaattgacgaggcacgtgcgctgaccaatcagcccaccgttttgccactgatgcaaaaggagcggaaacacgtttgttcatttgtctccgattctcctccccttttttaaattccccaaaattctttctcttccaaaataatgtaaattccccccccctcttttacagcccccccccccctcttttacagccccccccctcttttacagtaccttcgtatcacttccatgagaatgacccgtcgggagaacatttcgtggtggatccaaaacattttcctcggctacagtttggtgccggtggtggtattcgtcgccatcgatgtgttcatctaccgggtcatcaaacgggcgttcgtctttttccatggcaacaccaccgttttcccaacccccagcatttacaaagtgaaggtgatgatggccgagggggcgtattttgaagaattcaaataacaaaaaattgtaaagaggaaaaattattaataaataatttataaaagggacaaagttggatggaggaaatgccgcttctctgtgctgaatttttgtgcattgttggtgattaaaatgaaaatttgcagttttttaagcaaattttgcccaaaatgaccatttaaaaaaaattaagaatttctgggtttttcctttaaaacggttcacaattttttaggaaatgttgtgcgataaatatttccatttttttagtttcggtttctcacttttttcaggtgtccggtgatggttttctgaaccaattgttggccggaattttgcggacgttcgttcgttttaaataatttatttttttatcactttttaacaatgattttactattggtgtatttattgcatacagttttgaaccaattgcggattccgaccggcgcgatcggatgtggcgcacttgtttcaaggaaccatcgcgcccgaattatgagtaaaaataaattaattaaaaagtataaatcagatttcgatatatatttttagtataatttcccaatgtcccagccttttccccaacttttacgtccccttttaccaataggctgttccaaatctgcatcatcctctacctgttctgcattttgcttatcactgctggggttggtttttgtcttttttcgcaatttttaaaatccaaatgaattaatcgccacagatttatctgtcacgcgttcgccatttggtggccctgcactatttgcccgagcgtgcgcacccgcgagcaatgcatttgtacaacaaaatcatggccaaccgagaggacatgtgagtgctgacagtgaatggtgatgatgaaaatggcaaacaaacagtgtagcagtgcattaggaggacaaaaaagcgaaagcattgggcaaaaaacaactgaatgggcttttgtttggcatggacgttttaatttttacaaaagattttttggaaatgactccaaaaattcaaaattaaatcgctcactaaatttttatttagccgacccatttccgacccttgcccaattcctcttaaactcttcacttttaaaaatattttagacacaattaactccactcctacccaattttacttttttttgtcttaataaatttcaaaaaaacattgataaacagggattaactcttcaatttctttccttaaaactcccaaatttttcgtcaggatggaacggatggtacgcgtcaagaagaaggacgaagacattggggagcaggagagacagatgattctgaaggggctggcggtgctctccgaggagaaattgcgctgtcaccgctgctcacgcgtcgatttgagtgttgcggaggcatcgtacggaaggacggggcggggggggggaggcatttggggagggaatacatgaaaaggtgtccaaaatggttttgcaaaattaatataatttcgaatagtatccaagaatttttaatttggttgaaaaggtgaatacgaattcgtacggcgacgttttgtccttttcggccgacaaatgcgtcataaatatttaacgagattttttaatgtaatttggaagagttttgtaatttgccatatttttcttcatccagcaaaattcggctttg

SEQ ID NO: 9212 - DNA, 4507 bp, Heterodera glycines
  unsure (1)..(4507): unsure at all n locations
attaaatantggactaaaaaagcccgaaatatggactaaaaaggccaaaaatggccaaatatggaccaaaatatggataaaaaatgccaaaatatatgttgtaaaccccccaaaaaaggtgtgcatatttaatatttgcttaaataaacctaaaaagtacaataaacaaccaaaaaatggggtttaaaacttaaaaatgcatattttttattgttgttcgttgtatcaaaaacacctccaagtttgccaaatttcgaaaaaattctcattaaaaaaaagaaatgttcgcaaaaaaatgacgaaaatatttattgaaaatgccaaaatgacgacgaaaactcaaatttttcgtgttttgtggggtgtaatttttaaaaatttccaaaaagttgatctttaggggtgtatttttcgttttttttcatttttcttgtgaaaatttccaaaaaatggccaaaatatggactaaaaacccaaaaatggcgaaatatggatttattcccgaaaacccccaaaatatggatttatatggactaaaaaccttcaccaaatcaaaaaattttaatgcagaaatgctatttttaagcccctttcttcatagcatatgcgcagaaaaaatatgttaatccatataatttacaaccctacaaatgaggcttttttgcttgccgaatgaggcttttgaaaattttcatctgcgagccctggtttattcctatttaaatttattttcagcaatttacttcgtctgtcatgaacaaagtcagctttaaattcaccccttctcaggtttgttcttctcttaatccattcatttcggctctattgcagttttacacgaccagaaaaaaaggttgaaaaaattcacaaaagtttcaaaaattaagataaacaaaaagtgcaaaaacgaattttctatttgtttataatttttctgaaaccaaatgaatcttaaaattttttaaactgcaatagatctttcatttcttggtcgtaattcatcttcattatttttttaaattcattattctcttttataatgttttgatttgtaaaagtttaggtcaaaccttccgaccgatttggcagcaaaccgtcgaaagatcagctgaatgaatgtacacgaattgcggaagaaaataaccaatttttggatgatagggccgcgcttgtctttctcctggccttgtttattctccttcagatttgcttttctgtcgccaattattcgggtcttttcttgcttacttcatagcttttgcggagaaatccaataattatttatcgtatctttaatctttgataccaattgccgttttgagtgcgtccctttaactttggtcgttttaggccaccaaagtccgccaatgttcggtgattttgaagcacagcgacattggatggaagttactgtaaatttgtctccctccgaatggttttccatctttcattggtctgattttctaacatttcttaatttaggtatgtcaattcgactacaaatgatttaaattattgggggcttgactgtaagtgcaaaacacacattaaattgctaattttctttaaagaccctccgttgaccgcttaccattcttggctgcttggacaaatgtgaatttattttggtttgactcccaccgtctatcatttcatcattatatccaattgctttttgaagtgctctttttgtcgacccaaattgggtccgtcttggccattcgcgcggtttggaagagccccgtctcaaattgttcatgcgcctttccgtcatccttacaatggtcgctttgtttgcgcctgcgcttatacatttggtattgggtcaacaacgaacggaggaagccaaagggaacaaaaaaggcattgtcatggccaacccgacaaaggttgggtcggatttactaaaaaattaccgaatcggatggcctttgtttttgaaggtcctccgtttggtcggtgctcctctgctgttccccggccttttgttcgtggactgtgcccactttcagtacaatcactgctccctcggcctctttctgtgggcgctctcttttctcgagaagggccgtctccgcaccggtgcttttttctttgtgttggcccttaaccacaagcaaatggaactttaccacgctttgcccattgccgtttttctgttcgcccgttcattcgttcacacaaatcgaattcgttcattgttttcggcaattggacaaaggcaggacattcgatgaaattccctcattttctattcatatttgacttttttcagtgtctttaatttgtttcaattggctctggcggtgctgctcacttttctcattctttggtctccattcctttggcctgagccttcattggccctccaattgcttcgacggattttccctttccatcgtggccttttcgaggttttaattgtcttagtttctaataattattaaattgtccaaggataaggtggccaatttctggtgttgtgcttctgtgctggtcaaattcaaacaaatgttctccataaatgtcctcgtcaaggccaggcaaaatgctcatttctttttctttgcaattttcttgtgattttacctttttccgttcttttcagtgcctttttggtgtttttcgcttgcgttccttcgcttttttgccttttttatcggccaaactcttccaatttgcgcgtcgcattaactgtcaacgcattggccttttttctgttctccttccaagtgcacgagaagtccgtccttttggcggccatgtgagtgattcaaaaaatgagcaaaaggcaaaatgtatgcgatttgtctgtaatatttttcttcgcatgggcaaaagggttttactcttcttcatggaagtgggatttttgatgattggtgcccctggaaataaactgccaattaaaactcattctccaatagacctgcgcttcttttactgaacgacgaatcattgcaaaggccgacttctctctttttggtcgcctctttgttcaggtgattaactgcggacaaatctctcttggaaacatcaaatcccccgcctcccatccgtttccctttttcatttcattttccttttcagtcttttcccattgtgtctaaaggacggtgttgccgaggttcttccgctgtttttggcctactcttttctcctttggctccaattcttccgtttttccaatggccgacctttcccttcggtttgtccctcctttttttgtttccttattttcccatttaagctttacaactttctgttttgctttgttttggggccatccttcgcaatttgtgtctttcaacttttgctctctccgcccgtccgttttccccatttgttcccattgcttaacgcactgttcaactttggcatatttacagtcttttggctacatttaaattttgtgatagttcgccaaaatttggccgtgttcaccgagcagagaaatcgagaggcagtgaaaaggaacagtgcaaagcgcaaacaacaataaatgtgttgcgatggactcgcgtttttggatttctaaataacaacaacagtcgctccttttccgctttcattttggtctcaattttcatctgttatttcatttcttttcacctctataaatttctgttggaacatttgcgcgttcatttttatacacagttacaattaaaaacaaacaatgaattatacaaaattaaaatgaggactaataatacttgagtatacgtgcaggaaacagaattgtaatatcagtgaatcctcagaatcacaaaattcgaatgggcaaaatgaattgagagaattgcaaaaaaaaaaaattggaaaaatactaaaatgagagaagagattatacaagagggaagcattgaaattaaaaggatttggaaatgccttcagagtttgggttaaaattcggcagaaggactatcatttctcataacgctgtggaaatgaccgaagcgaggccgtggacgagcaaagtcgggggtaaagcatcagtcagcagtcgcagtttggacaagtactgctccgacttgttgctgtttgtcggaggtggaagtggcaagttcaggaagcacatggctgcgctgctactattgcgctgaatggtttcgttgaccgccctgacaaacttttcggagtaatcggtgatgtcccttaaatgagaggacacagaatagagcaaattatggaaaagccaagaggcggcgacttacgctgcgctgcttcccccagaggatttcgttggtttgtcgaggtgttgaaccacgtgatcccacgggaccatcaccgacttggctttgatgcgcaactgctcgagcatggccttcaactgcagctcctgatggtgcatgtccttaacgattagtgcagtttcaacgccattggttagttgtgagctttgtgtcgctcacctgcaaactgttgacgcaaatgtgcactcggaggatggcactgcgccatttgaagagcattgaaagaatacacgccaatggagcacgaacag

SEQ ID NO: 9213 - DNA, 1997 bp, Heterodera glycines
tccccggcgccgttggcattccgtcttcattcgttttgccatcatcgctctgtttgaacaaatgcgagggccaaacatcgatgaaacgacgctcagactgtctgaaatggaaatgaagaaattgcttacggtggtacaaaaggttaccttagtacaaattcacgctcaaaaggcccaaagtgacgggccacacacaaatttttatttagattaacaacatcgttcagtatttgcacgtattccacaccatccaatcgctgtttcgccttcagtgcgttttcagtgtacgaaattccattctgagtgaattacaacactttaaaaatggattttttctttacatcgttcgtgttaaaatattccaccacttccgcacgaccaatcttcgagaatttgaggtccttcaacagatgcgcttcggtcagtgccgtttccgatgagtccaattcgtgaaaagccaacaccaccgtattcggcttcatcgcgcccagcccactgagacggatcaactgaaaaacggagggattttttgaaaagaagacatcaagcaacgagaaaggcacctgctgaatgccattgcgcacattttctgccaaagtcagctcaacgaacgccttcagtttgagatagtccatcagagaaagccaataggggtaaacctttgggttttaattgtttttaaaatcgtttaaatttatttgtttcccacttgttgcagagggtccatcgttgtcccttcagcgtccatttgccctttttggacgtgtccgaccacataaagtccactcttcttcaagtcgttgacgaagtccatcaatgaacagcaagtggccggccgattgaccagcagaagaacttggggacgccaaaatctgaaaaattaaaacattattgcattttatttatttaatttcttattttcccatcattttttggtgtattattaaattggtgttcacttgacgtgctccttgcgcacatccaacagcagcaaatacttgcgcacttggtgataaatgagtgcctgcgaaatggagccccaagagccaatcggagccttgaaaattgagcgaattataataaaaaataaaagtttgattttgcctgataatgaaggatcataatcagcaacatcagaatgaccaccgcaacagcagacattgacgcatcaatgatcaacatcattacgaccttaacacaaaatactaatgagaaaaaggggagaaacgaacagtcgaaatggcacccaacgcacagctgtgccaagaaaaatatttgaaatttgggcggaaattcggtgccgaagtcagttcaagcgcgagctaaacaatgtcaacatttgtgcaagaaatggggaaggaaactgtaaaaatatggtaacgaatattgagagacggaaaaggcgtacaatgaaaatggagaaatgcgggaaaatttgctgagaaaaagttactgtggcaatgttgacgcccatgtaagagagcagaaagaggatggaagtgatttttgcgattcgattcatcgctccgatcatcaaaaccatctgaaaagaaaattgacaacaaatgcaaaaacaaacaaacaaaaaagcttaccacgacacaaatccacgagataatgacggaaatgatgggattccgtttggagcccacttcgatggtcgccggtctgagcaaagcgccgaaaagtttgtcctaattggaaaataaaagtatttttgacttcatccctccatttgtccaactttgaaaaaaacaatgctttattaattcaaattaatttttgaaattacaaaacaaaaattacctgtgcaaatcgagtgagtacgcgcgaggcgccgattaaattgctcatcgatgaaaagaaagtggcaacgaaaatgccgagcattatcaaggagggcacactgctgatatcgaccatggcctaaaaatgagaggaattttgtggcatttgctttttaactttcaatttaatcctcaaaagaaaagtttttt

SEQ ID NO: 9214 - DNA, 2094 bp, Heterodera glycines
  unsure (1)..(2094): unsure at all n locations
ggaatttaaaacaattagcatttaanntttttatttttctatacaacaatttaattgaattttataaatcatttcggagacatttgaaatggcgttgatgatgaggagaaaaaggaagaggaagaaggcgaaaacgatgacccaactgctgaggatgaagccgaagcgcaacagaacgggacgagaagttgcggcgacggatgggccggcgaaagcgccgcggggggcggaagaggcgaaggaaaatgtgtaaaaaaacaaaataaaattgaaattaatattgtaaaagtattttgaatatttttttagcacagcaattacaataccgattcttttgccgactttttagcatttttcctgccaaaacggcgaatgattttcactaattgccccaatttgctcactgtgtcgtcatcattttgctgctgctccctccttcttttggcttcacagacgacgaaattgagcacaaaaatttcacgtcatttcgctttttcttttctttgtaccgtttgttttggaaccaaattttgacctttaaagcgggaacaattcgaatttggcccgggattggctgaaaatcaatgaatgttcgctttgcctggtcggggcgaagtccgcaacgccgggccaatgcgtttcgatggtcgcgattgatgtgggtgttttctggagagaaggggtgggggggacggcatcaggacaaaattcggatggaattcattgcattttgcattatatgggtgggagaggaaccgcagctcaaaaaaaaagttatttatggcgaaaaaagtgccagaatgtggtcccccaccccaaatgcactaatgattgacatgaatctaactggaattgtggtgcgaaatttactatctagaatgttcggcggatttcatttgtaaatatttttaatatgtttcagtgatcaaattggttcattcgacagtatcagttttgaagcattttgaaattcaaaaatcaataaaagggaaaaaccaaaatcttatacggtatatgcttttaccgtaccttacttcagagttttccttagccccatttccccccacccctttccccacctttgtatctgcgttccaattgcgccacttgatcagcagtaaacaacactcgctttcggatgctttttgctccgtcttcggcaccgttttcctctacacttccctgctggtcggcattcatcccattgtcatgccgaaatgggaagtgttgttgcgcttggtgcagttgctggtgcgcttggtttggctgtgctggcgttagcgcaaattgtggcggagctaagaaaaaaaagcaaattgaatttaaacaatgaatatttaaatcgaaaattttaacattaaaacacatttaattgcattgcatccaaaaattcgaaccaatgaattcggcagaattttgcggttgaaagaaggtggccgtcggaccatggtactgaaacggcgccgaaaaagtggcggaagaaaagtcaaagggcgcgggaaaagaagtgaaatgaggcggaaatgccaaagaagggatttggacaaaagtgttattattattagtattattgatattgtgaacattggccggaggattagaagacatagtcaagcctctaaacataagttgggaagagaaacatggaaattttttttgttaaatttccgaattttttttcttgctttttgtcagtcgctaacgccataaagaaaaagaaaattttcctgaatttacctaataaaaagtagttctaaatcaaatttaaaatattttttaaatttcagttttcaaatttccagaggctctaccggcaacagcagactcactcatatattttgttttttaaagttacattcttgccgcgccaacttggttccaacaaaaggtgctgataattgataaatttttgagcattttaaacctcttgagaaaatttcactgaattttggcctggaataccgtgacgcaaatatgcatttcactttctctcgaaataatagatggcccagcacgttttttggtcccggcatttccataatcccttttttcgcaaagtcctcgatttaatgccacacaaattaaatattacag

SEQ ID NO: 9215 - DNA, 2631 bp, Heterodera glycines
  unsure (1)..(2631): unsure at all n locations
ggcaaagtgacaaatgttgccgcagggacaccgcccncggtacagtctcaccggcggacgggcacaaatttggcaaacagcggattttttatgcatttggtgccattagcagcagcagtgttgggccgattttaatgagtgaaatacctatttaatagtattaagacgttttttatcattaagaatttgggtgtttacaaaagtttagtctgctaaattggcatgtttgatcggcacggctcggcatgtctgctggagtccattttgagtttgagtgattgagtgtgccgtgccgtaagtgagcaaacaaaccataatttgcatatcttttccattttgcataaaatgaatattttatattaaaaaaataaattaggtacaattatattaatttttctgagtatttataaaattcaatggaattgtaggcatacattttaaatattttaattaaaacagactacttcatggttttatcattaattagcattttatagattctgagcacattaatcaacttttaatctgcgactgcgaccagaaaaaattattaatggaatttgcttttttttgaactgtaaattttggttttgccgaaagacgccaaaacgagaaaaaaattggaaaataagttgagactttttctttgttgtgacaaaaaaaaacagtttttagtatttcacgtataaccatttttttcaaaaatagagtaaaaatctacaattccgtatttaaaaatgtgttgaagttgcaacccataaagtaatttattttttcttttcttattgttcttcttaaaaactccaagaatttttatgtttatttcaattttgtattagattaaaaaattagaaaatagtcaaatattaattctacgattccgattcatttgtttaaattaatacaaacccctattttgatatgattcaaagaatttccattttttaaattggataatatatgaaaaagattacaatgatgcatgattaccacccaaagatttctgatcatccgctcatcagttcattactgatcactgatcgccttcttcgcaataattcatgaatgagtgagtaatcatgttttccgatcactttggtgctgacgagtgatcaatcaatcgcattttgtgcatccgctttttctctcctcgccccctgctcccgctccctaaattttttcggcacttttggttgactaattaattaactggcgaataatgcgttggtcagctgtttctgattttcgcggatcaccgacggacgagagcagcggagaagaatggaaatgctttagcaatatcatttgttagcgtttgcatcataataaataattgcgcttctgcaagcgattcgcgagaggaatcaacgggaaaagcgaagaaaacaaaactcgtcccatcggacgaacattggacagtgattataaaagtaattgagcataatcagtggcagaactttattatgggcaataataattaagaagatgaggctaattacggtccccattaaaaagcgcataagtgcattttaatttgataatttaatttaccattaaaaagtcattcttatttatgttcatcactctaaatttattatttccaatttttctttaattttacaaatcctttgtccattttaattgacattttaccgtcatattttacatcttcggcatctattatccttaacttatcgctgttttagcttctccaattcaatgtcattcgacacggaccaaaaattgccggttaaatcgccggccgaccagcgccgcgaggcaaatgccattcgcacattggcattcgtcggcgtttgtctgtccaccgtgtccacaatgatttgtgtggtgtccgttccgttggcttaccagcatttccagcagatgggcaccaacatgttgagcgaaattgacttctgcaagtcacgctcgggcaacatttggaacgaggcaattaaaagcgaaaattaaattggaggagaaaaaaacgctaaaattaaatatttgtttataataattaaagaaaattttcaaaaattgcttttattggcttaggttactcgtacccaagttctgtcgcaagtgtacggcaaaggcggcgcttttcgcgcagttcgccaagccgatggttacggtggcggaggaggaggtgccagcggcggaggagctgcctcttcacaacctcctgcagctggaggttacggcgcgggaggaggagctgcaggaggtgctgcgccacagggaggagctgcaggaggtactgcgccacagggagaagctgcaggaggtgctgcaccacatggaggagctgcagaaggcgctgcaccacagggaggagctgcaggaggcgctgcaccacagggaggagctgcaggaggcgctgccccccaaggaggtgctgctggaggtgctgcaccacagggaggagctggaggaagtgctgcgcctcagggtgcagctgcaggaggtactgcaccacagggaggagttgcaggaggcgcagcgcctcagggaggagctgcagggggagctgcaggaggcgctgccccacagggaggagctgcaggaggcgctgccccccaaggaggtgaagaggaggtgctgcaccacagggaggagctggaggaagtg

SEQ ID NO: 9216 - DNA, 1827 bp, Heterodera glycines
tgcagggagagctgcaggaggcgctgcgccgcaaggaggagctgcaggaggacctactggaagttacgctgcgtctggccccgttagctcttctgtttcgggaggtgcaggtgaacccacgagaacaagctgtgttcactttcattcggattgtatgttcaggaggtgcttgctgcggctgtggcgtgtctgcgcccggtcctcccggccctcctgggccgcccggactcgaaggccaccccggactgccagggaaccctggggaccggggccaagacggtaaggcagtcataaaatcaattaaatggtgccgaattcgttgcttcttttagctatatcgccaccaccgaaggcacaacaaaaagaagcgtgccaagagtgcgaacagccgcaggtgggaaattgttaattactctaatggctttttaattgccagaatggtcttcccggcccccctggtctgcctggtccccccggaaatgccggtgggcccgggcagccagcgcaagggggtggtgccggcgcaccgggaccgatcgggccgccaggacccgagggtcagcccggagcacccggaaacccgggagagcaagggcagcctggcaagctcgaagaatcgggtgggtttttcgagccaattaatgcgatttgtttttttatttaaggtcaaacgcagggtccgccggtcagttttcagggcatattgttaatctgtgggtattttggtcattcattcccgtgctggtcgtttcctaaaaatcgcaaagaagtgggaaaacaaaaaatgtcaacatatagattcataacttggttcaatttcaaccaaattaataatatttcatcgtatccaaggtgttctctacaagaaaattaatttagaattttttttttacaaaattgtaaaaaagttatggtcataatttttgagtcaaaattattttaccagaacttttttaaaactgatgaaattttttgaaattttaaacataaatagagaattcttttgaattatcgaatacatagaattcattttgacttaatttttaatgactttaaattttaaatgtttataattatatttgcataaccatgccaaaaaaacatagctgttcaatgctatataactttttttcaaaagcaattagattaaattttctttttagaatttcaaatactctatttaatctcttttctttaaaatttcaaaaaatttcattgagttttaaaaaagttcttgacaaaaatttccgacttaagattttattatatgttaaaaaattttgaaaattaacattctcatataaaacaactagagctattgaaagataccatgaatattaattttgttgaaattaaaccaagttatgaatttatatgttatacattttttgtttttctaccctttggcagtttttaggaaaaacctatcaacattcattcccattttaattgcttagggtccgtccggccctcctggccaacccggcggcaatggcaatcccggcccacccggccccaacggcgagcccgggccccaaggccccccgggcgacgaaggacccgcgggaacgccgggacagcccggaaacgcgggagagcaaggaaaattgggcgagggaggaaagtcgggggtgtgcgatcactgctcaacgccgaggacggcgccgggctattagagggaggaggaaaaggaaaaggcgaaggaaatgccaaaaaatgcaaattgtatttttaagattatttgaagaatttattattaataaatttctattgaatatgcacaaatgctgaatatctcggcaataatacctctgattaatgttttgc

SEQ ID NO: 9217 - DNA, 4096 bp, Heterodera glycines
tataacttttttctttgtcaaccaaatttaaccatctttacatcattcgaaagcccttcacgtgctctattttagccttacaaaaagcaaaaagattttctagcctaaaaaatgtattaaaaaaaacttccaaaattttggttttttgtaagttcatgttataacttttttggtaattgtctaatcgcgaaacaatagcttagaaatagcttctaaacatgttaagctttcgaataataccaagattgttagatttggttaacaacaaaaaaagttatagtccgaaaaattgggctggcgccaaaacgtcggcgccaaaacgaccccgaccctgccctcaccagcggtggcattcggttggagtcggtttgagagctaatcaccaatttttttttaacttgtccgctaaatcattttaaaatatacttgaatttttttactttttttttatctaattttatttatccttttgaaaatgcaaattgcctttctggcaaacaatttggttgaatgttagaagtaattttacatgttttctcaatattaattctttaaactttcaaaaaaaaacgattatttttagaaatttattttttgtttcgggtaggtaattcagttaccatttttctcaactcttttttttgttcattttgcacattttctataaattttttgcttatttaatttttgggttttcttcactaaaaaaccccattattctttgttacttattctcttcttatgctcattattttacttttatgaatattggatacttttttgtgctcttagaaaagcgactcttttcggcctttggcgtttcttttaattataattaattcttttttcttctaattataattaattctttttttaaattttatattttacctcctcgtccgcctatgcgagcaaatttaactattttttttttgttttccttttaatatttataaaataatttgggttccctcttccctcttcaaaatatgtgtgaaaatttatggaaatatgagctttacatatcctaattaagaatctcgaactccaggcatggtagactgcgcctttaaattattattagtaaaatataactcatttttctttaatatttatgtcaaaaaattccaaagctttgccctaatagagaaagaaagcccaattccgattcccgaaaagtttttaaagccgtgaaagtccaattgcttttcttttaaagatatttataaattttttgtattttttttacgttatgcattcataactcgaaactattaaaaactaacgaataaatgataaaaaaatattcaagaaaatttttttgatgaaaagaatttctgagaaaaataaaattttctaatgctcgcccgcatgcgcagtcgccaagccgacgcccatgtggcgctgcggcgattgtattcggttggagacggcttgagcgtgaaatcgtcaatttttttcacttctgcgattatccttttttaaagccacccccccccccccctgaaacccaaaaaggtaaaaaatttcaagaacaaagtgtatgtttttgaaaaaaagatctcaaaatggcaaaaaaaaatattatttgaggcgaaaaccggtctcaaaaaaaaatttttttttttcaaaaacctgggatcttaagatctcagcaaaaagaatcccccaaggatgtacttggcattcaaacagcaccttctatttggcattcataaagaaagcgtcggggatgccaacaggcgcagcagggagcctaattaaggggttggttggtcgtccccgagcctgctgccccggtcccgatccacgaactgatatatttttaatatatttctttctacaaaaataaattaaaattcgtgccaataaattttttcacaatagtttccccattcaatttataaaaatttcctctaataaaaaatcataacattttttgccgatttttgagtttttgaaattaaaattttcgtaaaaatgaaatcatgtgaaatcaaacaaaatctgctgtacataaattaaccattgctatgttatttccaaatggataagtaaataatacgctttgatggcggactaaaaacgcaaaatatttgcataaatttcatgaattttcgcataaaattaacttttctggaaaatgcgatgaaaaataatataatcgtatccacccacattcattcattcatttttggtaatctcagaaaatataatttgagaattgctgaggaattaaatttttttaatttatttttttctatatttttaactccattttgggcccaattctttgccagttcttttataccccaaaaaccgggctggcgcccagttggcgatttatatgcacatgtataacacaaaatgaattatcgtcaacgatttactcggtgggagacgacaatggggcgccggcccgataaattttcatttccgaaaaatttactataatttaatccatttttaactttttaaaaatcatcattgtgtgaaattcaattttttaagttcagagaaattgtttttttttcttaaataaaatatcaagtcccctccccctgacaatgagcaataataataataataataatgcataattgtgagattttttcggcacttcccattttgagtgcaaaccttcatgcaaaatgcaattaatttaaattttcaattgaacaaatgaatttttcccagtgaccttatccagttataaagaaattttttccggaaaattccaacacaaagaaagaaacaaataacataagcagccagcagtgggagaaatagtacaccaatctttgctttattcattggaaaagaaacgagcgcagggaaatagtgcataacagtgcgccccgctgtcactcattcctcgccccttttatatcccagcaaaaaatagagcatttatttttcgtcatatatattaaagacgagcagctgttgacgctgtgcgattgctcgctgacgccgtttcccgctgctcgcggttggtcctcgtggccggctgcgtttgttcgctcagcaatactgctggcgagcagcgacaatggcaacgcatttccccatatggggctgctaagccaaatttggcgacgcgtctatatagatagacgtggagccgaaatagtcgctatggccaataagcgccagcggcaaatttgtccttgtgtctttatagacataagtgcaaatgtgggcccatgacgacccttaagggctcatggtcccaaaaatgggcattggcctggcaatggccaagccctcatgtgcaatcgctaattgcgatcgccatgccccctgccagcggttgtattcggttggagtcggcttgagcgctaatcgccaatttttttttcaattcgtttcgttgttttaaaataaattagcagggctcgaattttctacctttttaggccagttttaaaagactatttttttgttcattttgcttttctatatgaatttttcgtgagtttttcaggtcacggggagctcaggaaaaaataggcttttgcctaaaaatgtgagccctactcattattatttgttccttattctcttacttatgctcattgttttactttatgaatattggttacttttctgtgctcatgaaaagcgactctttttgatctttggcgtttcttttaattttaattaattctttttttattttaattaaatggcaataaattttttacccgtaagagagaaagaatgtcatttgtaactaacttttttttaaatactctcaaaaattttttacctttgaaaagctactcttaagggtttattttgatttcctctttttttaaaatccaaaatttatttttaatttgcgcattcttttgtattttgagtcactaagtagtacttccgattttgctacccccccccccccctcgctcccctcaaaaattttaattttcgaattttcagttttgtcccaatcttaatttttcattttttaaaaaaatttgtaatccattttttaataaatgatttgccactagtaaaatattttccgcaataaaaaaactaagtgtaaaaacatataatcaggggcttttgttcatggagaaattgaaaa

SEQ ID NO: 9218 - DNA, 1740 bp, Heterodera glycines
tttttgattctgtttaaaaagtcttctaattaaaaaatattcattagcataagaattagtcaaaattaaaagtcattcattgggaaatcttttttttaaccagccaagtttcaaaaaaatatattgtcgaggagacattgggcgaccgcgggaaaatttttaaaatttaggtccagtttgttagagtttttccaaaaagataagttatttagcagtttttggatcatttaaaaaacttactaattgatagtcccggcggttatgctgctacattcgttttaaatccaacaagggagcattaaaggacaaaggaaaacaagaaggggagaaatagtacataaaccagtgatcgacaaagaaacgagagcaactggggaaatagtgcatggatttgcgcccctctgctacacattcctcgccccctttacaccccacccagaaatacaaacaattatttacccatcatatataataaaatacagttcactgtgtcgccgtgcgattgctcgccgacgccgtttcgcgccgcccgccatctgtcgtcgcggttacggtcacaagaccggcagcgcgagccatatgccacgcagcgccgctcagacagtgggcagaagtttgtccccatgtggtggtaccgccacggacacacgccttgtgagagggttctccacttggctttggcttggtgatggcctcgcccgcatgcgcagtcgctggacgataccatgtggcactgcggcgcttgcattcggttggagtcggcttgagcaaatcgccaatttttttcacttttgcggttaatccctttttaagcccccccccaccccccgaaacctaaaaaaggaagaaatggtcaatttttttgaaaatttttatccaattttcctcttaacaaattatattaaaatttccaaaaaaaatttcccggtggaattctatcagcacagctggacctctcctcccattatagcatatttttgaaaaataaataaattttggcgcaaaacagctacaaatttctgtaaatcacagtttctattttgggattttttgaaaaaagaagaaaaatgcattccctaaaaatcggtttttgaattcttttcatttccgaaaaatttcctaaaatgaatatttttaaatttataaggcaaaaaagctctttgaatttagcgccgcagcaaaaatatatatttttccctaattactttttcaattaatcgttttgaaattcgattaatgttaaagtgcagagaaatcgttttatgttcataaatagaatattgagcgcccctccagcaaaaataatgaataatttaaatttttttcggcactttcccaaatttgagtgccgtcatacaaaaaagtgaaatgtatttttaaattttcaattaaccaaataagtttttcccaaattgcctttcataaacaaattattcctttttcggtaagtttcaaattaccattttttctcaactcttttttcgttcattttgcacttttttatatgaatttagttgattaattttacgtttttcgccactaaaaactcattattctttgttacttatgaatattggatacttttttgtgctcttagaaaagcgactcttttcggcctttggcgtttcttttaattttaattaattcttttttcttctaattataattaattctttttttttaatttttatattaaacttcctcgtccgccaatgtgaacacaatttaatattatttttt

SEQ ID NO: 9219 - DNA, 2643 bp, Heterodera glycines
  unsure (1)..(2643): unsure at all n locations
tgggagggtgacaaattggtttggttttttttgtctgcgaagccctccgccatgtccgttgccggtgccgtcgtcgttgttttgtcgtgccgttgtttgggctaaaccaacaacgcattgaacagcgaacgtctcagcgcctcatcttggcgcagatcagaggtcgatttgactttgcgcaccgtttgaccgctgttttgctgtggtggaggcgtcggcaccatctgcttgggctgttgttgctgctggtcgtccatcaccatattttgatcactgaaaatcacatcaatgatgaaaaatgatgggtttttgccgtaatttgttttttcgaaaaaaagagagagaaaaaatgtcatcaattcaaatggaggagggngggggggggacgtaaaattttgaaatcagcattttgtaattttctcaaaatagcattagcatcaggcatcaattgtttatgtttttcatcccgtacaatggcactccacaactcttccgttcgtcgctgctcgtctccacttttggcggtgccggcggttgctgctgttgtcattgtttgggctgcaccatcaacgcatcgaacagctcacatctcagcgcttcatcagggcgcagatcaaaggtcgatttgactttgcgcaccgtttgtccgctgttttgctgtggagaaggcggtggcaccatccatctgctgtttgtgctggtcgttcacggcaattgggtcactgaaaagcaggtgaaaatctttgctgaaattactgttttcttgaaaaagtgagagaatgccacgaattcaaagtgaggagggccaaactctgaaattattggaacgaaaactttagaaaaaatttcgctaaaacgtcggttagggtttctgattagaatctgcagaaaacaatttgggactttctacaaatggcattatcatcacggcatcctctccccctcccccctccattggcaccaaaaactctaccgtttgttgttgttgctgctcgtctccactgttggcgctggcggttgttgcggtgttatcgaattggcggtcggtcgcttgtggcggttgctgtttgttgttgcttcggctgatgttgcaaaccgttgctgctgctgcttctgctggtgctgttgcgattcttcgtccgccgtttgttggtccgtctgtgttgcgatgtcttggcgcaggatgggcacgtgttgcgtcggttgttgttgttgcggctgttgctgctgctggtggtggttgctgttagcggcggcagcgaccggcggcgaacacaacttgggcagagaatggcggggaataaaaaagattgaaaataagaaatttgttgcaagtgatggaattcgtgaaaaattgtccttttatagactttcgtttcctcctccccacattaaaaaattgcctacatttgctaacatgccccgccccctttttcatgtttgtctccgttataaaaagcgcctaaaggctcacccaatttttgtgcattaacattcatttacatttctgctactatgtcctccgctgtccttcaaaatgccctccgtctgttgttcatcactctgctgatcatttttcatcactctgctgatcatttttcatcactctgctgatcatttttcatcactctgctgatcatttttcatcactctgctgatcatttttcatcactctgctgatcatttttcatcactctgctgatcatttttcatcactctgctgatcattttcaactgttgccatgggtaaacaaaaagcacagccctaacagtggatgttctattgcattttcacgacccggaaaaaatgatcaaaccttaaaaaatttacaggaccttaaaaattaatagaaccataaaaaatcatgatgacttaaaaacccaactttcttgatatcttccggtagacctatgagttcaacaccggggttttaacaagattaaaaaaaaattccaacaaacaaatgtgaaaaactgggtttttgaattttttttttctttttcagtacgccacgcataagcccaagaaaccaaccgatgagaagactcttcgacaaatgaaattgctggtctcagtctcaagctatggatcatcattggcgtctatgttttgctcgcgtgagttttccacggcttttcttttgccaatgccacccaccatcatcaatcacaatcattctatcgttttcccctctttttcagcttcgttgttgtgtgtgccattgttgtgatttgctgtctgtgccgtaaacgccgtgccggtcagcaggacaacgatgagctttcgacagcattgccaagcagttactacaaatcgcggcagggaccaacggattcgatggactggccgccaacctcaactgctgggcatggccatggtcgtggaggacgaggcggtggtggtgcgatcacggcggtgccgagcggaacaaaacaggaggaggagaccaaacaaaattgaaggcgtcgacagtgccgtcgggaggagaacattacacaacgtggtgatgcgcaatgaatgaacgcgaccgacggacggtgatggcattcgataataatggacgaagaatttcacatttaattgtctgtcgcgtgatatttgtgtccgccatttttgatgtgttcattcaatcatttcctgtg

SEQ ID NO: 9220 - DNA, 2636 bp, Heterodera glycines
  unsure (1)..(2636): unsure at all n locations
ctctctctctcttcctcttttatcaattctaaatctttagataaaatgattccaaccacaattctccatcgatttaacacgctgttgttgaacagaagcaccaccaagccgtacaaggacacttttgtgctgtggacaatcgctctgctgatttgggacattgaagagcagaaaatgctggccttactccaattgaacagcgtagccaaagtgcatggacttaacagcttttgggatcaaataaaatcgctgatcagcgaaaccctccgaaacccaaaatcggagcaaaatgcatgtgtactgatcaagctgagcgaactttttcttattccaaaaaaagcattgccaaatattgcgagaatggcgtctaaatggcgcaaagagtgcgaagagaaaactgagcgcgagactgcgctgcggcgctttgttggcagcgcaaacggcgtactgtacaagaattgggtgagtatcgtattccaagtgtgcgaaaagacgaaagttggcgcgaccgtggcacttatgcaaaagcctggggccaaaacgcgcctcaaaaaagtgatgggcnancgaacaccggcggaagaactcttgacggaaaacaatttggcacacatttacgaaaatgacggtaagtcatccgttaatttgagaattgttttcaattggcattagtcttccctattttaaaattaaaaaataaaatgttcattttttggttctctgaatgccttccgatagattccttgggatatggcacaaatattcaaaaaaattttagtgttttttgacaatgaccgccttttggagcactacacttttggcatggaaaaagacgttcctctgatcgaacgcaaaagtcacaaattgggcgccgatgtcgtcgtttttatgcgatggtttgaacgtaaaagcgaacgccacattggcacggaaaagctccaactgatcataaaatatatggacaatcaaatttatgatccgatttttgatcaggacgaacaacagttggacaaattgggaacattcctcaaaacattatttatcgacgcgaaaacatttgcggaaaaaattgagggcaaaaacagtggagaagagaaacaaaaagtgcagaaaaacattttcaaaaaatggaaattaatggtggaaaatgccgataaaaatgagcaaggaaatggtgacgataaaaacggagaaatgaaagaatggatttgtgaattgcacgccaatgaatttttaaatttgatggaaaatgaggaaaagcaccgaagcttaaaaaacagtaattgaatttaattttttttttaatgttcaaatttgcaatgcgacaaaatcataatgtaaaaaaaactcagtaatgctaagtgaatttataaatgaataaattaaacattttacttattagcggtagaaaaactaaaaagttttgacatttctcagaaaatacagtaattcacagaatttgcaattttgaaattttttaaataaatatgattttgatatgcaacagggctggccgtgatcatggatcacgggaatcacgggggttttggggtgcagtgatcacggatcacggatcacgtgaatcacggcgtttttggggtgccgtgatcacggttcacggatttttttggaagccccgtgatcacggctcacggatttccgtgattggaaattcaatcatggccagccctgatatgcaacaacgtctcctgcaaaatcctgcgcggaacttttcctgtccggcctcttaacaatccgaatttttcgaaattttccaaaaaaaaagacaaaagcgcttaaattttccattttcaagctctcaacttacccaatcctggtcttgcatccgtggaataaaaatgaatatttttctattttcagttctaattcggcatggacctaaaaaggttcgcgaaaatttgctcgattttgttaatgaaaatgttgcaacgaatattttaaacaaattgaacacttttgaaatggtaaaaggaaataaaccgaaattaattttaaaattgcgccaaaatggaggagaattgaacaagcaaaaggaagaaaaggaaaaagaggaaacagagaatgatcaaaaaaaggaagaacaggaaaaagtagcggatgatgagcaaagggagggaaaaagggaggaaaattgggaaaatgcgaataaattccattggagaataattggagatgaggatgatgaatttacactggaaaaggaaggcattgagcaaaagcaaaaagtaagtgggcctgggtttttgaaattgttttaaaaagtaattaaagatataaaaaattctgttaaactttaattgaccataactattctttttttatccattaagctattttaagctgacctcatagcaaatagagaaaaggatttaaaaataattttattttttatggtctgtaaagtgcattagtacccaaaagtggccccgccggaaaagttttgaatttggcagcaaaaatagaaataaaaatgaattttgaaaagactttactaaatacttagataatttaaaataaatttggtgtgaaatttcgtaccaggtattttcgacagtgattgatttcgacagtactttttaattagttttatacaaatttattgtacatacatatga

SEQ ID NO: 9221 - DNA, 1493 bp, Heterodera glycines
ggtaattaataatattggtttctcaattaattctctaaatgtttgattttaaattttctatttcctccaaataaatgcctttttttataaatattgatcaaatataagtttatatattaaatataattatatttattatttattaaaatttcgtatttgagaaattttatagaatgggtattggtttattacaattttttatattattgattgttgttctcactaatttggcctttttgtcatttaagcatttgctgtttaatattttgcaagtatgctatataatattatttattttgccctgttctcgtccgtgctgagtcgttccacaaaaaagctcagtgattgataaaataaaataaattttaaaatattaattattgaacggcaagtgtaattctgatttaaattctattagatgtgttataaaaaagaatttataatatttattacatagctaaaaaaggaaaattcgcaaattaattgaagacaattgataaggtgctaattttcattgcatttcatgtaaagatttcataatttcattcccgaaacagtgaattaattgataacataagaatggatagtaaaattttgagtatttaagctaatttttattaatctataaatcacaaatttaaacaaataatcactctcacaatcgctgcaatgcatccaatcaaaaaatttaacaattttttaacgaaatatttttaatgggtaagattttttcaagtactgatatagcctaaacagcattagataagtgataaaaagtgattgtgtctgataatttgatttagtaaattttgaaaaaatcttcaattattaaacaacagaatttatttcaaataaacaagaaaaactgtttttcttaattttaattctgtttcggctataagaactcactttgaatacgcgtttggggccgtaaaagtcgggcattttccacttggtttgaagtttctccattgacttttattatgcctttttttgccttttttgagaaattattaataaaattggacaatttaacggccttcataaatcttcttgaccaggtgaccgtcattgatttaattttgtgaatttgtttttattcgtttgattaaaccagggatgggatcgcccaatgtcggtttccaaggacgggtatgccgatttgcaaggacatagtggggaaaattcatgaaatccaaggacatttaaaatttttattttatgcaatgaaaaatggttaaaatttattcaaatggcttgtatttttcaccggaatgaattttttccaatttttttgttttcactacggtgggtcgggaccgggtctgggcgagaattaccggtcacggtttttcccaaaattcccggtcctgtaccactctagttttcactgatcattttcctaatttgcgactcctttttttctgctttaaaaacgctttttttgcggagcgctttttccaaaaatgttgtggaacagggggggggggggg

SEQ ID NO: 9222 - DNA, 2060 bp, Heterodera glycines
aatttactacggacgacttggtacatgaatgggctatcgtcaggcatttccaaatttgagagttgctggcacactcgttccaatgtctccagaaaatgctggagtgatcggacatcgtcatccactggccgtagattcatcaactctgattggagcgcttcggcaattttccatggatcaccgaaaagtcgtttgagagcagcaacggcatgggcataattctctccgccacgataggaggttacggcacgagctgcttttcctcgtaggcatccatgcaagtaattgaacttgtcaaccggttcgagtggtaggcggtcaacagcactctcgaaactctgccaaaatgcgggccactcaagagggtctccatcaaagttcggaagacttagttgaggaagcctagctgcaaaggctggcagcgcgccaaactgattcagggctggaggtggtgggacatttacgactccttgtgcattagcggctatgactggctgaaattgctggttggccgcaggcaacggaatatgtgcatttgcaactgctcctggcagttgtcctcccccggccaaatgtgcttatgcggcgacgggcggaccattgagctcgtcttcaatatgcaccagcattgtgggacagagggggggggggaggtccggcggcgccgataggcgccgctgggaaaaatttgtaatttttaatgcgatttgtttacaggtttttgtccaaaaatgaccaaaatttgcgattttgggctaattttttaagaaaaaagtgactttatgcaataaaatttcaaaaaattctcaatcatgagaaaaaaattacattttattcacgaaagattcctaataccatattaataatcttatataataaagttgagtgtttgtgctatgtatgtatgtaacattgtttgaatgtggcgttttgtatttgctgtgaggagagattgaaaagaaaaagagatgaaaagaaatagttttgaaaaagaagaaggtaaaagaaatagtataggaaaagaaaaaagcaaaagaaatagttaaagcaaaaagatttctcttggaatgccggagatttgagtcccagagattgaaatgctggtgggttgagttccagagattggaatgtcattgaaagttggtgggttgagtcccaatgtttagaatgccggagatttgagtccattgtttggaatgccggagatttgagtcccagagattggagaaaaagcccagtctattttatcattcttaattctataacacaatcgtactgcctacggaacgggccaactccgtctgagccaactttgagtcaatataactcttgaagttattgaccgaatcaaacaatcttgatatcattcgaaagctcttcacaggctctattagcctactaaaaattacagaaaatttcgaactataaaaaaagatagaaataaaaaactttgaaaattctgccttttttgcggttttcaactgacaacttttttgagagctgactaatcactgagaaatagcttataaatatcttctaaacatctagggctttcgaatgataccatgattgtgaagtttggccaccaaagaaaaaagttatagctttttgaacattgctgagacggagttggccagacggagttgacccctaccgtactgcctagcggaggatgcgccgaaggcgcttctgatcactgccgatcaccctgatggagtgatccttggagccaattccatgaaaaaattcataattttttaatccgagcccaaattatcattataatttttatttttcatgttttttaatgttgactttctatcactttacttttacttttaaattttagtttaggtacgtttttagttgcaattaacattgattcattataaatatttagttttttacattacatattagaattgttcttagcttataaattatattcattatattttttgtgttgtgtcatgaatgctctttgaacgaaatgccaataataatgtaataatcaataaaaagcaaatgtataaaatataaaataaactccattcattcat

SEQ ID NO: 9223 - DNA, 1437 bp, Heterodera glycines
  unsure (1)..(1437): unsure at all n locations
attaattttttgtttttgtaatggatccttttcttctttatctatttattatgtatatgtttaaaaaacttggaataaaatttaatttccgttgtaatataattcctggttgaataccatttttgcttcaaaaaagcattaaaagattaaaaaatacaggatgctagatcaaacaaaaaagagttttcacaaatcctttatctttacaatttccaaacaactaatgaattataaatttttgcagctgattatttaacataaataattgatttagcctttttaaaaaataaagttttgctgaattttattactgtttttgtttgaatttttactaataaagttactgttttttttttgttttttatgttttttatgttgtttcttttgtttggttacattcacaaatattagaaaggtttaataaaaaaagactttttttttgttattgttctgctatttttttaaatttgaattttgactcatttattaacacattttcaatcaaaaatgcttaaacaatggctaatagcgcaaaacattttcttattttaaatttgttcatgtaaactgtgatttttaatttttttttattataattgcaaataaaaaataataatttacattatatttacgtttatttttaattttgtcaattatattgattttcaacatatcctaaaaaatattccaattattttttaatttaatttaaagttagattttaagatattaattttatgatattttaaatttctacaaaaaaaaattattttatataaaattgttgttcttaaatagttaattaattataataatgtcaagtcgatctgattatctctttcgtcctatttatgtttattaaattttctattatcatgccatatttaatattttgcattttttaaattctttttcagtattataaactgtaagattaaaagaatagctgctttttcgataaaataaataaaaattgtttctttcttattttatcatcgtttgcaatatttaaattttttttcttgaagtaaactgtttttaagtaggactattgacttcctctccaattacaattttatggtttcgctaatatatgtatttaattttgtcttatgatatttaaaaaaacaaaattctattcttagatttattttctttgatggtttgttgtactctcttataatggaatgccaattaaattagaaattgtaattgctaaatttaaagagaatttattacaatagtccagtttcatgtttcacgttttacggttcgaatatgttggttgctactataaatatgcttaaataatttaattgtattttaagcggataattgaaaaacctattaaattatttgttttgaatatttttatttatttgatcagatatttgttgctttaagttggtattttcggttccgaantaaaacccatgg

SEQ ID NO: 9224 - DNA, 1419 bp, Heterodera glycines
  unsure (1)..(1419): unsure at all n locations
ttttttaaaaaaatattaaaatttgaaaaaaatgttaccaaaaaggggaccaaaacaaaattagtaccaaagatgaaaaagaagggacagagaaaattagggggaaaattcctcataaaaagacaaattgccgataaattttagccaactgataaagcacgcacccatcgtttgtttcccctttcctggcattccgtttacctgccgtttcctccgcctcctcccccacacttttgccgttttgtgtcgccacaaccgccgccgccactgctgcgcaactgacacgcgaagtgtgccgtctcataatgggttggaaccgtcccttgcccattgttttcttcgccactccgccatggcaccactcggacaacgcctggtgtacggcttcctgacgaatttctgtccgagggaagggacaaacgaaatttaagaaagaattggaaaaaggtttttaaaaaacaaacaaaccagaatggtatctgagctggtctcgtgcccctcggcgatgccttttcctctcaattgtgccaacatttcgtgggttcgctggaaaaaataggaaattaaattgaacacgcaaaatggggcaaggaaatgcatgctgttgtaaaacgatgtagaaaagaagaaaagtaccaaattaccataaaaatgagggttcacaaaaccacattttaagttagaaaaaattatttgaaaattgaatgggggggcaaaaaccgaacattggaaaataaagtatttgtattttgaaactcagaatttggctttgttttagcaaatatgccttggctttcgtaattgcgaccattaaaaatttaaccttcgctcgccgatgattgtgccattcgattgttttgctgtcgctccaaaattggcttaagcaaaagttgtcttcgcttttcgtagcccttttctgtgagatcgccttcaaagggaaggaaatttaggaaaagataagcaaaaaataagaggaaaacaccttcagacagctccaaatccaattgggccaatttcacccgaatttcatcgggcaattggcacacatcgacctccttcgacgagggcatcaaagcacaaacagtggctgatgtttgtgatgtttctgctgagacttgctttcaaataatatgtatgaataaataaacaccttaaactgggattacctaatcgtattttgtatggttttattcttttattgggtgacgggagaaagcttgtcaaaatgttttttcacggcattgattttaaggcataattttaatttaaaacataagattcatatcaaattaaatttgaaccaggtaatggtattaacattttcggaaattggnttaattttttaatatactanaaatgcgtcacaatcacagcgaagcacaaaataanatggagaggagaaaaaaggcggcgagcgaa

SEQ ID NO: 9225 - DNA, 2113 bp, Heterodera glycines
cccccccccccctcctagcccaacaacaaccacttcaatcgatgatctgctgcactatagcggaaaagaagggaaatgagcggacggggaattgttggacggccatcgaaaggtcgcaattaacgcccgcctcccctccccccccccccccctccatttggattcagtcagtccctttcaaacacaacagcaccccctcctagctaaatccatttttcaattaagctcctctgagcggattaccgcccgagggggcagagggcagcagtcatatcggcttcttctttagtcgctgctgaccaacaactctatttgtgaagggaattggaaggggaaaatggacggaaatgtcccactgccgcctcctccaaccacacacattgatggagcccgccttcttaatgctcctttttctcccatcgcccgaagacacccccgccgccggtggggtcagcggagggcgggcgatggccctcccccactcattccacctcaatgagcttttggggggagggggccttactggcactattctttccctctgttttctttccatttttatgatgttttgtgcgtgcattggacgaaccaaaattaatagaggaagaaaaagttcactcgaattatacacatcataaaacaacggagatgaaagagagatgattcattgttttcaaagtaaaattgtgagagtgttcgagggataaaacaacaaatttgccactgcttcgttcactagaaaaaaaagaatttatggcaaaataactcctctcccctggcagggagtcacgacatattgaaaatttgtaatcactatctgattttggcatgatcatgcaaagttttttggtatgtaattcttttatttgccaactttcgggtgccattcgggggtggctctcccgttttctcgaatcctgcccatctctgaccagtgtcattccccgtttgggcctttctgtggacgttccaccccattttccgatttccgtcaccaaaaaactggaaacatgaaaattggaatggaaatttatcattccaacaattacccatttatgctaattgttagctttgtccgccattctccgacgacaatttcggcggggggggggaggataaagtgaccaataaaaattaacccattaaaaaaatattggatgatggaaacaattagtgagtcatcgatggaagcgaaagaaagaaactaaagcagcagaacaagtcagcctcgttgaacgtcaagaacacgcttttggaaaatcggaatttcaattcattttcttattgctgatttttctggctttttcaccgaatttccgtcagttttggccgttgtttccgtcgcgtatatttttagtctctgccaatgatgtattcgcctttggcactttagcggaattcagagttttttccactatgcaatttactccccgcccctcaaatttccccgttaatttactttccaaattctatgcacgatttagacatgaataaattcccaccgccaatgttcaacaaattattccattcctcaatcacatcattcccattttcactctgcttctcctttattttttgtcctcacttctctcaaaaatatcgaaatgttctcttttcggcttccttttatcctttcgttgtttttgttggtaatttttgcggaaaatgtgcatggaaatggcaccgcagctgaggtgatcaatcaacataactaattaatataattacctgcgtcttcttaaattatttcttcacagccggcttctccttcttccttatcgcaggaagatcttttggcatttcaaatgcttcggggcgccgcttctaacagcacagatggcaaaaacgatgtggcagcaaacgacgtggagggcctggcgaagacgatcatgcacattttggtcagctccgtcgatgcggtgggttttatccgaagaatgggagacaaaacaaaactgtggccattcaatggacaggtgatgcgctttttcggcgatatcatctcaaaggtcactcgctctcttgatgatcaagtgccgcacaaaataattttgacgaatgagacggaagaaaattggccacaatcgtgacggacggattcgtagaggctaat

SEQ ID NO: 9226 - DNA, 1942 bp, Heterodera glycines
caatcttttgtttttaaagtgccaactttagctacatatttctggtttttttaaatattttcatttccataccaatttgtgtgctttgtccccctcccccctcccctccatcggcacatccaatgatcagctgatcaatgctttgtccgctctgtttgggccgcttcgccctccgtcctctcacctgcggtcactttctctgctcccattgcattctctccgccccttttcgccaatgcattccaacggatgccgaagaattaacgcaatgcgttaactgccaccaaaagattggctttcggcatatcccaacgacgatggcattcgctcgaaattgtgcgtttgtttaggagttaattgaattcaccgtcaaaaattgtcagcaaaagtcggcacaaatggaaaaattggctcaattcatccgtcaacacctccgctttactctttaacatttgcacgacttggccgccccagaaacagaagtgatgctggggaacatcagcaacggaccacggcactcggaatgcgcactttgcgccgaagtcgaattttcccaacgatggaaaaaaggacaaatggcagcgcaacagtgaaacaattgtgcacggcgggaagtcggtgatccgaaggggcggggaagtgttacggtggtgacacatgggttacggtggggggggggcggtgttacggtaagggagtgcatttattggcgtggcatatttttttgtttgctaatttcaataaccaacagaaggcactgatcagtcagcaaccacagcagcagcacggcacacaaattgcacaattcgaagagtcggccctttctcagcgccaattcattcgctccaccaaaaaaattcggtagataaactttttgcccaatggcattgacatttttttgctgaattaagtggagcgatgacgagcgaggagagttcgacaagggcagggcgttctttgctgcgcttgtcggtcgctttgacgcggctttaaattcgctctccgccgccgctcagccgaagggcacaaatgaaagaaaaagtgtggatttgcttctaagcgcgaaagaagtgagtgataaacaaatggccaattgatgaaggcaattttataagagtctttgcaaaagcgaacgacgaatttggagggagcgaactcagccgacaaatggtcgcccatcgactgatcggtgccatcgccgcggttttgatcagagaaacaaagacagatcagctgatcgggagattgccgttgttagaacaatgcgcgagttggtggtttccatggaggtttcagttttgaaggattttgctaagaaaggcattgtttgatatggcacgaataaacctatttgataatgtagtaagggcgccaatttaggagtacaatcgacgcgagtgctgccaccaaatggacgggcaaagtgccaatgtttggaacagaaaggccggacttgccacgattcagatgctggcactttcagtgctattgatttccagcagtggcatctgcgaaaagcatttggttctcctgaagcggcacatttccctcgtgggcatgcgaatgaacggaagagaaaaagaacaaaaagcggaagaagtgctggacgcattgctaatgtgcagcggacaaatcaacgccattttggggcgaaggtgcgcgaagaccccatggaaacatttaagtcaatgctcgagagtctcgagttgagaaaaaaaccgcgggtccccctgtgtttttgtctgatttgtgattaacaatttttgtgatctcttttgaaatggaattttaccaccacagcagggaaatgcgttttccgtcgcatttgatcagcacaattgcccatgtccaattcgttctattcgaagcgatggatcaaatcacccaacagcaaattttggaacgtaaaaccgagaaacggaagaaggtggggactaatgaa

SEQ ID NO: 9227 - DNA, 1283 bp, Heterodera glycines
acccccggaaactgatttgagcagaaattttaaaaaatttaaatgaaaccccattcttcaggattgccataaattatttatctcaatactgattttttgtcgaaaagtccggcgcccgttccatttcagtgattttttccaaaatttttgacaattgatccgattgatcaacagtagcttaaaaattgaattgctttttaaatttaaatgtaagctttaaaaatagtaattttgttttcgttttattttcttctcctcgccttttgtctgttctttttgctgcttttccaaattttagcacccccagggaagtttggtctggtctatcaattgtccaacattgtaaaaataaaactgcaggctgaaaagtttttgcggaataaaatttcgattttaaattgcttttatttaaaaaattcaaaaaaccaaaacattgaagaagaaaagcataaaaagtattaagaagaaacaaattgatcaactttagtgtatttcttcctcagagacttttcaaatcgaatttgaaattgggcccaaaattcgcctcaatttggtcatcagaattgaataaagtaacgaatggatgaaaagaatcatcagcaaaagattgagcaacgaaaaattcagaggaatctgtgaaaaagttatgggatttcgataatttaaatacaaaaattaattaaataaaaattatatttaagattcttaaattaattatttatttaccaacccaaacgaagtccatttttagtgaaaaagatctgtcgagtggccgaattaacaccaattcctacggtatcgccaacaccgtaggaatatttgccatttcttccctttccttctccgttaatgcatatatcgccaccattataatatgcataagtgcccttgtggctaagaattgttccatcgaatttgttctgctgtttaacagcgaatccgaagatcaaataactgaaattaaaataaaggaataacaattaacaataattgaattttaatatttataataaatctaatattcaaataataaataattctcttaccatctcttatttccaattgaaatttcgtagtaaaaaatgtcgaacgaattattgttcagaaaaatcggatgtttagcaaagacggaacaccaatcttttaaagataaatacataaataagtaaaatagggaaaaataccaatatcatttcccttaaaatggacagttagacttttgtcgccaatgatttcgagtttctcatgacaagcattggcatcccaataattctgtcggaaat

SEQ ID NO: 9228 - DNA, 2867 bp, Heterodera glycines
atttcttttttaaattccccaacagctatcggatctcggtcatcgtcaccagcagaaaaagcctgagtgcgtttctcgcgaactgagggtccactgggagggattttccttcgagcaggattcgtgggaggacgaggcggccatccgcgcggtaagaaatcattaataatttaattattatataaataaataaaaacaaaataaattccagcaagcgccattgatatatgtggcgtgggaggcggcccacgacgccaccgtatacatgtctcagccccgcgaggggaagattgccatgtgcttatatgctggcactgtggggatggactttggatatgatgaggggcaatgacggaacacaccaaagggaataagagaaatggatggcatatgccacagaggcgaagaggaagaaatgactggataaccttggaaatgagagggataggattgatttgcgatgggatgaacagatggataagtttacgacgggattgggcggtagatagcaggtcaatgtacattatgcacgatatatgaaattttaaatgctgcggatacagcatttctctcctcctcgaaaaaaagcctcctggcttttgcctcatctcatcacttctgatcagcttctcgcgtccatcgttctgatcagccttcgggcgcccattgatgaacatcatcatccgctgccgttcagttgaacaagcttcccatttgcttcattcacttatgtcattttctcttgacacccatctcgggttatttcactttcacgttaatggcaaattttgcttttcctttcttcaaaacagtctccggttttttaatttttaatcttcatttcatagaagaaaatattcgcttacttcttacttttctttttatcaattttatctttgcatcaattttctcaaaatgtgctgctttaccttttcgaaggttttttattccaaaatattcactttttttttgaccctttacttttccttttttaattacatcatcctttcaattttaattaaagtgcttcaattacatcttttttctgccttttctctgattttcacacattcattccttttttttggcttctcccaaagcttattttctgcatttccattaaaatttcatcgaattatgcattgtcatttattcagtaaaaccaattttggcattaaaaacggttcaacatttaaccagttaggcatcacataatacaaacaataacaaaaaatcacacaatggctttatgccttcaaattcacaattcatttttggcactaagcccttggcacatagtcattttaagcacacagcgttacctgccattttcgcttgacactaggagcacacagcttcgactagtccatggcttacgctcatttcacccattaattggtctcttttctgggagcacacagcttcgaccagtctcgtggcacacagccacaacggcactcagcccagctaggagcacacagctgcgactagcttttatcttttcatgctcaaaacctttgcacttatcctttcgaaaacagccaaaatcacaaaaattaacatattatcacattaaaacacagcgcattgatcaatcaatgatcacaaaatatgccataaggtttttgtattaccgtactcagccatattagccacagaaaatttgccaaatttctttcgcaagacaatgcatttttgttggttcatttacgttttactgaaaaatagcaatttcccattgctttagtccttttttttttgttgccaaaacgtactttaatttactcttcctatctccaacaaggaattaaaatttaaccagattaaaactgcttttgggtctgcgtccctttttaagtctgcattgttcaaattagcctttaatggcctcagacactttttgtctggaatgctctggaattttaattctctctctctctgtttaacaaaaaaattttacacaccgggtcgtggcaccaaaaaggtgttgtgtccccgggtttaaggcttcaagccatttcaaattaccacttttaggagagaggaatttattataaggaaaagcattgacaaataattatgaattgaaaaccgggaatatgtttggctcaacaacaacctcagagcattttgggtgggtcagtgcaattggttatttgggaaaggattgccaaaggcaagaaatggcacagactgacccaccgcagacatctcgcagccccccgagggggaaattggatggacttatatactggcacaatggggatggactttggataggatgaggggtaatgacggaaaaacacaaaagggaataagagaaatggatggcatatgcaacagaggtgaataggaagaaatggcacgataacattggaaatgagagggataggattggcttgggatgggatgaacagatggataagtttacgacgggattgggtcgggagaaagtagggcaatgtacattatgcacaaaatatgaaattttaaatgctgcggatacagcaaataattaatataaaataaataaaaaatactaaaacatatgctttgttttaccccttacaaattaattcacctttctctgcttctgttctttctccaattcactgattttctccaaaagaatcttctgatcattttgcatttttaaaaattgttcaactaaaattaatttttaaaattaaaaaatggacgatttaactaaataaaacattcttaattcatataataaatttgttcttagcttaaaattcactcgcctttggtcgtgatttcttcgtgctgctctttttgctgcttttccaattcactgattttttccaaaaatttcttctgttcattttgcaattgtgagaatcctt

SEQ ID NO: 9229 - DNA, 1719 bp, Heterodera glycines
agagggagagagagagcgagagagagcgagagagagagaaagagagagagagagcgagagagagagagagaaagaaggaaagagagagaattaaagataatcatgggaagagaaatgagactgggaaggagaataaaaggagaggcctaaggtattcatggagttttgggataaaatttgttgggcaaaaatggttcacataacaaaccggggtcaagctaagaataagcacccagaaagggtataaatagaacccgaagatgaaaattttcaaaagcagaattttagaatcaaaagcctcattaaaagattttattccaattacaaaaaatcaaaaacaatgttatgttttgtttttcattgtatcttattgtaagttttattttgcaaggaaaaattgcattaattttgacccgggctaatgacttcactatttccaccattatttttggtcatgttatttcaaaacaaatttctcaaggatagatagggccggtggtcatttagacgccgccggggaaactttttcaaattaaggtgaattttgcaacagattttgaccataaatgacctttttaagtgttttctccaaaaaaaacatcacaaaagcctcatttttacgaattaataaaaaaattaatatttaatatttgtttttctaaaatttatacaaattattctagttttacgaaaatgattatttttcattgtttaaaaaccagggtcgaaaaatcaaaatataattcgtgtgaaccgaagcgaaaaaagtatgagtgcgggtgatcggaaggggcgggtcatttcagtacggaagagttattcgaatgattaattaattatttaaatttataattgaatattaatctaataataaataaggctgtcaaaaatatgtacagaaagtggtccaaatatgtacataaatgtgtatgaaaaatcccaaaatatgtacaaaaacccaaatatgtaaataaaattttttttaaatggttattttttgggaaaaaaatcctcgtaaagtatgaaataggcacaaaatgtcataaaaattacttaaatagtcttagaatcacttttaatattttaaaattccttttttggtatttttcgtggctattttttcactataaatattcaaaatttcttaaaatatgtaaaaaaatttgccgaaattttgaatttttttttgaatatttccaaaaattttcgtaaaaaatcctcaaaatatgtaaaaaaatgaaaatatgtaagaaaaaatacaaaatatgtaccaaatatttataaaatcttgaaatatgtaaaatatgtataaaaccccgcaatatgtaaaaatatgtaaataaaagtcccgatttttttcgcaaacacaaaaaagaaagtgttttcctactatttagagcattggagaagccaggaaaaaaatatgtatttacataaaattgacagccctaataataaaagtatatttggctctatttaagttaacacgaccacaaaaaaagacacgaccatagaataatttgacaaatttaaggcactgtaactttttcaagaagcatcctaattaaacattcttgatatcatttgatatccctaagtgtcctttaattgcctttaaaatttcagaaaatttgcttgagtttcaaaaaaattctggtcaaaaaggtttaccaaatcaatttttgaaatttacaagccacaacttttttgaaacacaac

SEQ ID NO: 9230 - DNA, 1159 bp, Heterodera glycines
  unsure (1)..(1159): unsure at all n locations
gtaaggtgtggctgcaatggggccaaattcagcggcgaanattggcgctaaatttttccattttntaaaaaaattttatgagaaatatntaattgtttagcaattaaaatgaaaaaaatttccaattattttaattactttcaagcccaggtattgctggtggtagaataatagtctcttcttcgtcaagtatgacttccttaatgagttattaaacgaaatatgttttttttctaattaaataatttgtcgaattttggggtgttaataattaataatatttgggtaataaataaataaataaattaattaccctcgcttttttgtcatatcgatacagctgttcacaaatctttttcaatgttttgttcggtgcattctcacaattctcatggccaaaggcaatgggaaaaattttcaccaaaatggaaaatgaaagaaaaatttttattttcaccatttttatacacctgaaattgcattaaatttgattatttaagtatattaattgaaacaacagttgatggaatatacagtgttgaaattacggtaccggcagtggattaacagaatcgccgaaattttcttttttttctttttaatgtgtaaaacagttgaatttttgtatttgggaccaactggcagtccccatgtgtgcttttttaaaaatttgtgcgctggtttaagatggccatttaattcagaaaatcttaaattttttgcggcgcctttcggcaccactgggcacttccttccccagaaaatctgagtttttaggccccaaggccatttgtgctgaatttgaaaaaaggaaaaacttcgtagctctggcataactggaaccttgcgcatattaatatagccgtggtgtcataataagggtatacagtagttggggcttccaaatacggtacaaattttgggaaaatcctttccaaacatgccaaaaaaataaattgcatacaatttcgggccttgaaagatgaggacggcaaaacgcgtgaatcactaaaacagaacaaaggcattgcgccaccacttaccatccatcatcaagcagaacaacccatttttaggaggtgaggggggggggggaagatgacgaacgaccgcttttcgacacaaacaaggtcaggacgaccaggacaggacaatagtt

SEQ ID NO: 9231 - DNA, 2703 bp, Heterodera glycines
  unsure (1)..(2703): unsure at all n locations
taaaaattggtacaattaaaaaaattatcaagaaagcaaagtttcatttaaaaatacgataaattttcaaaaaatgtgtgccttttattctcaaaaattgctggacaaaaaatgagagtgtgaacacacaaatcgaaataacacaaaatggtggtgtggtggggggggggggggaagcgcaaaaaaaaataaattagcgcatacaaacatatggccaattttggcgctaattcgaatttgcgtacgcttttcgctgctttttgttgggttggccatttttgtaatgttctgttgttgtgttgtgtttgttgtgtgatgatgtgatggtggaagaatttatttaggctgttcatttggctgctgctgttccagcggtacaacacaaaattagggaacaaaaaatgtgacaaaaattactgataatttttacaacaaaaaaattggaaattttttgggatggaaagggcgcacgcaaacagtacataataccataaaagtgcaattttaaatttaaagaatacgacaaaaccattccaaacaaaatttttctttataaaacgaataaagaaaggcaaagggagttaattttataattgtctttagttattaaatctaattatcgcatgttttaaagtgaaattaattttattttattattccaaggtaattaggtgttatggttactgctaattaatattttaattactttcagaaattataaaaatattttaaaccttgttcatgattcaattattggattaaattaattaagtcttaaattatttggatttatttcgagcacttttccacaaaaatgctaattaattatgcattttaataagggaaatgcattcacatttaattttatgcaacacatttaaatttatattaacaattaccaaccgaacaaaagtgaatattttgttgttttttctgtcaattaccattaattaattgatagggtaataggcaacaattggtagtcggtaattaacaccataattaggtaaattagtcattgtttgtttttcccgcgctttctcagcacattccgtcatcaccatttttctgtttgcttctcattgaaattggcgcagcaaaaatgccggtgccaatgcgatcagtgaaatggccaattcacttgggcatccgattgcgatgccaaagtttgcgtgatgctccgtgtgtccctcatgctgttgtgcggcggaggccttttatgtggcatagtttttgcaaaatgtttctaataaatgaaatttaaataaaaaactttgagttttttaaaactaaaattgtataattttatataaaagtcatttataagtgcactaaattcaatttatttatttattttttgattagcaaaggtagagctgtatgagggtttcggatgacggtattatggcaatattaagaaaagttactgcgtattgtgaaagatgatggctatttggggagctaagcttacgatttattaaaaagcctcataaaaagcaaatcatttattccatttcagtacaaagcttcttaaaaagaaaggtataataaagaatattaattgaaattttttttatttttataaataaattgaaattattaaaacgaattttttaaaaataattaaattgaatttaaatttattaatatttaaaaagaaattattattactctttgcagtttggcttttctctgcagctgttcacaatatttacgggcctaaaaaaatttaaaaataaatttatttgaatttattcttattttaccgtaggcgatggagcatcggcacattcgtcgtcctcagcaattgtgccaatgatcaaaattgccaatatgacgagcaaaaagaatttgtgaaccatcgaaaattaaatttaataaagtattaaagtttaattatttatttaaataaattttggttcctttgatcaatttaaatcaatttaaataaagccacaaatgttttaaaaagaagaaaacatacaaagcgaattaagtcatttaaattattcaaaagtaattttttaacattttgccgcacatctttttttgaagctcgtaaattttttgtaattttttttagttgaaagagaatttttgggatgaaggaatggaatcattattttaaaattttattcataaaacttaagtaaaacataaaaaaatagttgaaaatttattttattccacaaataaatatggttaattaaatacatagtaaaaagaaatacataatgttcatttcccttttatttatttaattttttacaaaaatttagggcacagaaattttttgcagaaaaataaattggggtgggagaacaaccgaacgaataaacgaatgaatgaaaggacggatgaatggtggtgaagcgatttttggcgcggaacggacactttttgatgcgatttgcacgcccattttatagcgccgcgttttttggggggtggcgcgggcgcaggccgacctttggtcacgggacaaccgccgaaggcggaaggngaaggcggaacagaacgacgaaaatggggaaccggataagaggaggaggaggaggaggatgaaaataaggaagagagaacgggagagaggaggagggagaagaaaagtggngaagatggagatgaaaaagtagagggagagagaaaaagagcaaaatggagagagagagagaggggaagagcaagagagagaagggggaa

SEQ ID NO: 9232 - DNA, 2138 bp, Heterodera glycines
  unsure (1)..(2138): unsure at all n locations
ctcccggatttttcgacagtaagacaaaaaataatagacttttcgacagtaaacataaaaacaaataattcttattaaaataaattatattgcttgtcgtttttctaaatttcttttaaattaacatactaatatgtattgctaaatcagaattactaaagatacgtttttacgtttttttacctaggaaaaattttagaaaaatacacccttaagaaccggtccttaaaattttcaaaaatacactcctaagaagaatgaaaaaattttcacaaaaattcatctccaaattttttatttatttcttggtaaagaattttagattttaaaaatgaaatatttcaatgctggtttggcttcattttgttgttttggagaaaattttacgcttttacaccattatatttgaaatttaattactctttactgtcgaaaagtcccctcctcaaatttataatatttctgtcgaaaagtccggcgcccttcctttttccctataaattaaaaaaatccaaaatattatttttaattaaaatttaaatatattttaaaatgaattaatacataacattgtttttctttataaattcattgattatacttaaactgtatttggtatttatttttggataaatgttttctcgtttttaacaataaattaaaaaaaatcaaaatattaatttaaattaaagttaaaattataatatatttttattgaaaataatatacacagagtttttaaataaaaagcattgttacatcccattgtttttctgttctaaattaattaattacttctttctgcttaaactgtttttggtatttatttttgtgccaaatgtcctcctttttccccaattgtgcttccctttgtatgggttggcttcatttgccccccccccncaattaattgtggtctttgccgtccaattttggcatttttgttttggtgccaacaaatctggcacaaaactctttcctaattaccatggaggtgcttcgcttcattcatcgcaaaaaccagaaagagttttgttttattttgtgtgtgggttgtgcgcgggtgggtgcccttttgcggaagcttaaatttggcacatcattacgccattttccccaattctaacatttttggaaaaaattttttttggcgccatggaataaaaaagattttacttagaatgtaacataagtttccgcacaattttgtctgcctaattcaaaaattcataactccgtaatagcaaactcattatcaataataatggcgtgtatttcgaatcattattattgctttgttgaaaaatttctttaaaaaacttgtgcggaaacttatgttacaccttaagtatttatgcagaaattttttgctttatgccgttaagtcatcctaatttttgaagcattttttgaaaaaatagaaggtttcaaaaaataaataaaagaaatttttgcaaatattttttgctaatttttcgttttaaaaacccaatattttattgtaaattaaaaatgtttaagtacaagttttctctgttatacgaagctctctctatgcgtgtccaaaagttaaaaattcttttttttatattaaaaaataattttttgtccatagtccctcgaaaatgggtgcaacatttgggaaaaattaaatccaaatttcaataaaaaaattatatttattgtacatttttccattgttccggtgcgaaattttctgccttatctcatattgttattaaataagaattttcattttttcctaaaaaattcttccatttttctaaaaattcttccattttttcgaaaattccccaaccccctcaccgatttttttcatttttctccgccttttcttcttccgttttgtgccacccatactttttgtttgctcaacaatcagccgcgccctcttcactctctgtgtgctgctgctgtctgtcggtgatcatccgacggaggcggcgaatgagtggcggcgggcgccaaattcttccgcatcggtcggacgcggcggacgggcggcggaggacacggcctgccaccgccaccgccggcgccacagcgccgcgcacactccccccgcggcgcctattgtatttgtgtatgttgtgtgtcctattcttttaaggccaaca

SEQ ID NO: 9233 - DNA, 2306 bp, Heterodera glycines
ttatggttcgggttaaagaattcagaattggtcaaaattggtgtcagattcgtgatcactgatcactgatcagatacctctaaaaatcaccagtcttatttttaagtagcgccggcaactgtcacaaattttccgagttacgctcatcgctggggactcaaatacaatttaaataaattcttttttgacaaatgaaacctcaaaaaaaaatttctcccaccctcttcctccctcttccttctctctctctctttctttctctctctctctccctctctctcaatctcgctctctcatttcctttctctccctctcttaatctctctcttttcatactctctaaagactttcactctctccccctctctctcaatctcgctctctcattccctttctctccctctcttaatctctctctttgcatactctctaaatactttcactctctctctttctctctccctctctctctcatttcctttctctccttctcatctctctcataatcttttcacactctctaaatactttcactctctctctctttctttctcgctcaaatttctctgtctctctctattttttctttcactctctttttatctcttttccttacctctctctttcctccccctcctttctatcaagctctctatcgttcactttccctctctctcttaatttctgtcaaatccctctctctctctctcacttcattcttcctttccctttctcttaatctctctctcatttcctttttctccctctctcctttcttcgttctctcgctttttaaccttcactcgcatttattttttaaacaaacataatgacaaaacaatgccaattcaatcaatgaaaaatgcaaaaggtctcgcttagtatatagttaagggatttccgattttcatcttacaaaatttagttttctttatttgaacaatggaggttgacgtgtcttcttcatctgactcggccacaaatgttttgttcagtttacgtgccgatcggagtctgttggacccgacttttgaccggtacattttgcgtacagaaaaactggcaatgttcaagcggagaatggacgacaaaagtacgacattaatttaaatttaatttgaaactcaaatttggcaatcttaggcagttttattgaaaatatccagaaatactcattttgaaattctctttttcggtttaacaattataaatttgtttataaatatcaaaatgttcattttcagttcgtttcaaattgccctccgacagccaatggggctaccaacaaattcgggcccacactttggcctcccatcttttcttcgaccatttcgcttcctccgttgaccagcaattatttttcgcatttctcgacgatctccgtctgatttcttttacatttgatcgaacagttcgttgttttgttttcccattttaattggtgcgtttgactcactttcgctctttcagtccaaccgttggtccgtccccgtccaagtcgcggacattggcacttcctccgtggcattgtccccctcatttgtctttgtgtccgaggacgacgcttcttcccagtcgttccccgagagtttacactttgtcgactcgcgcacggcgatcactgcgcgcggactgaacactttcagtgtgtgggatacgggcgagcgacgcccgaccgatgggacgacacaaaaatggagggtcagtgaatgtgtaaagaaatgctgcggtgaaatgtttgcagggacattttgaaaaaataaaacgatgagatattaaattattcaaaataaactaggtagtaaattaaaaaaatattttttttagtggggccgatgaacaatgccagggaattatttgatgggggggggggggcgggggaaatgagggtcaaatggtgcggtgccgaaatgcgccactttttggagaagtttttcttttttgtttggtgaaaaataaaagggtttgggcatcgacgggaggggaaaggggaggctataaaattcaatgcaaaaatatttaaacaaatgaaaaaattaaaagcaatttgtttgtttgttttgtttcaggaaatgtttcactacgaattgccgccactgcgccagttaaacgatgacggccaaaagagcggcgttggcgccgcggacggaggcacccgcgctggcacagtctccgtttatccgtcactgattttggacgcgcgtcgcgcaccgacgaaaggtggcaccgacgccgaaaggggcggcaattccgccattgacatactgttgttcaccgtcgaaccgaccgcagagaaaaaagacgaa

SEQ ID NO: 9234 - DNA, 1259 bp, Heterodera glycines
  unsure (1)..(1259): unsure at all n locations
ttgtgcatatgcacanagttaaagtaatgtgccatttcagactctccgcaatttgttgtgccgcgcattcgacaaatcctttgtaatgggaaggtggagtttgcctgtttcgacgcctccctcccgcgccgtttggtcgtttttggggtcggccgacagccccaatttgtgtgggacagtgcgaagtcttcgccgcctcttccgacactgttccccagcgaaacgatggaagttgttccccaacaaccggcggatgtggcggaggagcacaaaggtggtgccttccctttcaattgccaaaccgaatccgaaatctgatttgttttctacataaattgtctttcctgaaattggtatacgctcacaacggggcaaaaaacggataaaaaaccaataaaaacgtaaaattaccaattaaaaatttaccaattacctattttcacgcttttaacccgttggttgtatggtaaagtaagcacaaaaccggattcctgtgtctaaaaaaccgttttcaaatgtttgttttattttagccattggcggtgctgaggaaattgcggtgaacgatgtttgtttgttggccctttggcgttgtgttattcattgtcctccactccttcttaggttcagccctccgctgccggggacgcgcagcagcagttcaattccgagcagttggaggagtgcgatcggccgcccgacgctgaggacgacgtcagcgccttttgggtggacggcgactcgcacgaattggtcgcgatggtgggttcgagattggactttggttaagggttttagttaggatttgttttggttttttgagcgtctccgcttttttgagtaatttacgaaaaaaaactgactaattgagttttttaatagaataacttttcttcgttgtccaatgttttgctccctcccctttagacaattgtcaatgagttgcttttcacgcagaaaatttcgcctggagtagcgcctgtttttgccacaaggttttcttcattttaatttgattttaaaaaacctaaaattgtcacgggtaatatatcaattaaggctgaatacattcttcccccaataccaaagttaaaaaattgctctgaatcaacactttcccctccccccccaaaaaaaattccaagtcctggacactttcctgcccccctcccatttgataattcatttcgccatttgttcacttaaggtatgacgtggggagaattgtttggcagctcgacccaaacgtctcgccaagt

SEQ ID NO: 9235 - DNA, 1160 bp, Heterodera glycines
atttatatgctatttaaattgaaaaacattaatttcaagccttgggcatcggcgcaaaatttggcacacaatttgttattttcttcaggcaggtcaccaggacaaacgctttttgggctgttctcccgacgggcgctatgccgcactgatcaatcggaccaaccattgcttcctctactttcaaaattcggccatttcgagcggttcgttttcctctgcaaattgtcaaccaatttctggcacttttgaattgcatcgtctttcttaagagcacgaactgaagaatcgtcggacgggcaaacgagcggaacacatcgccaaacaattggtgctttcgatgtccgacttggacaaggagttcgacccgaacgattcgtccaacgaattcatcgcatttcatgcgacggcggaaaccctctttctgcttactcgctgcgcaatttatgccgtggaaatgccaaaatgattttgcgtcgttttggccgacactttgactcactccgatgcacaaattgcactgaatggcttttgccgtaatgaccaaataaaataaaccttaataatatatatttatgaattgcatttatttgtttccaccattacaaattgtgcccttttcaattatttcttttacaacaaatttaattgactcatttaaattcttttttaaacttttatttatttgtttttgttttcgacaaaagattcaattcctccgtaataatttattttcatgctgcaatattgccgtatcatttgattttcaattaagggttttccttatttttcggaatttcctcccattacgtgcccacttttatttgtccatttttgccgtgtcgcgtcaatgtctccggcactttctccggccaatggcttttcgccttgtttggccgccgctgctgcggaggggtcgggggaggaggaccgaatttcgaccagccgagtgggcaaattgccggcctccgaacgtgtctcacttggcttggcgctggtcgaggggcagcaggggtccgtccatttaattatgcatatatttcgatgagtattttaataaatacggcgagccgggagtgagggtactgtgtcaagagccttaggaatggatccgattttccaaattatgttccgaatatttttaaattttttgcagtaaatgg

SEQ ID NO: 9236 - DNA, 2261 bp, Heterodera glycines
  unsure (1)..(2261): unsure at all n locations
ttttcatcgccgcttcatacgtcccttcgtacaattggcggtgtgccaacataaaaaagtgaaaggcttccgcgccgcgccttcggcaaaaattctttggaatgaaacgcaaattcatcactgaccaggcggtgtcaatcattcgggcttcctccatgctcagagtctgatcctccgctaacattcccctcaaagcgatcgatgcctggcaagaggcgaatcggagtcggactttggggtttttcggatttcgaatgctttacccgcctctcggcttcgaatttctcccccccccccctagacatgcttttccttaattagcttttcccggtgcccttttttgtcccttccgcccttctcacatcgcttgccccctcctctctccgtttggccaatttctcccgattttgctcgtggtattcctccactaacaatgcccccatcacataaagcttcttcagcctttgaggtggcacctgcttctcgtgctccgccttggccacctgaattagcaatttctttgcttcttttcaagcagattctgatcaatttggattaattcgttattccgatttgggttatctgatcgtttataaccattcgatcagtcttaacacattctttgatcactctgtttcccctgatcactcccctttcccattgactgatcacttttcacctcgtagacaatttttgccgcttgaataaatttggcggcctttcggtagagttgtgccatggccaagtttttggttttgttgcccaccatttggaaggcgtattggctcagcaattgctcaacatttgccaagtgaaatttgtccgataattccgtcgctttgtcccatttgttcagttttatgcacatttcaaatgcttcactgattctgtcgcactgattaattgaatttctgtgctttgctttttctttgattttttcaccttcaaaaaacaattcaccgattgttcacaaaggccgtaattcgaaaatgtttccgccaattgcttaaattcaaaaaatattatcaattatcaacaatggatttgttttaaagctatggaatttcataataaagtgcgaactaatgcctcttaattagctgtttaatccctcactaattagtcctttaattgtcgcttttccctgactaaccaaaagaacttcatgtccttcaggcaattctctgcttagtatttccatgcgacaaaagtcatccaacatcaaataacacttcgccaactgagcataacttttcgacatttcataataatgggccgcgttttgcctttggagtcatttagcattacattattaagtaattaacgaattaattttctcaattttattcgtttattgttccaataattccccccccccccaattttccaccatttttgtctttcggcataaaagtcgcccacatggtgccatgtttgttgtgccaaaatgtcgtcgccaggtccactcgaagtttggatgagctgcgtaatgcgacaccaatcattcatcttcttcagcatgtcaatggccaagtccctgaaatcattcctttttccgtgccgtcccttcctatgccattccttttcccgtgccgtcccttcctatgccattccttttcccgtgccgtcccttcctatgccattccttttcccgtgccgtcccttcctatgccattccttttcccgtgccgtcccttcctatgccattccttttcccgtgccgtcccttcacctccgatcattttcaaaataaattttctccgccgtttccaaatcgcccaaaaatgcgcacacttccgcctttttcaacccgtccgaatgaatgttctgcagtctcttcaggaactgaatgcccccgtagtcttccaacttcacaaatgcgtgttccgccgtttgaaagtccaatcgtttcagtgccgcagtcgccaaaatgttcctaaattggcccatttaaagggccaaagcaaagcgaacgaaccaaagttttgggtgagtgttccgctcaatcaaaacaatcgcttcagagattttgtctgcaccgagcagatctttgacggatttgagcatctaattgaaatgcacttacttctaatcccgctncaatcttttgccttacaaatgaaacggacaaatccgaaccgtttttttgggatttttcccattttaaaaagattaacattgactgatcagntgatcagttcaatcacacggcttcctacatgcccttcccttcccagagacggtcgagggggggggggggg

SEQ ID NO: 9237 - DNA, 1730 bp, Heterodera glycines
gggcaaccgaccaaaagaaaagcgttcacctccatccctctgatcacaagcaaacgctgcttttccatgatggccaaagtgtcgtccttctcctgaataattaatcacttttcagaaagtgtctcaaatttctttgctcgctcactccgtcccattcgatcgcccaaacttctttccgttcaaatccgacaacgggtgaaaaagcattctgatcggacaaagtgaagaagcgcagtgtgttgtgctttccgactatggcaaggcgatttccgacgcaatttaatgccatcaatttgggcatttgaatgttcgaccgatgggcccaccgaagggaaagatcgggcagagaatagcgatggatcagtcccgactcccgcgcctggcaaaattgaggggggggggggatatagaacaagaaaaatgcttacgatcagaaagaagtctttggcggcagcaacagcacagatctgaagcgtttgccgcccattgtttggtccgtgccgccctttcccttttactctgtccgctgttatgccttcgtttgactttttctgcgactcttccccccggtgttcgtccacataatgcactctgtcgggaaggattagatcagtctgattgctgtctgatcaatctgtcacttgtcagtttgactctctgatccgattcggctgcgactgtcgccgcccgtcgcgacattttgccgtggcacggagtaatgccaaacaacgaaacagtcggccgaagcgatcagaaccttcgatgcgatcagttaaagaattcaaaggcgttgatcagcagagttttgccaaccatggtcccattgatcgccacaaagtccggctgaacattggtcgtgtgagtgtccaccggcgttccgatactgtcgcacagttgcattgagtactgtggacaaaacggttacagtaatctctccttactacggttaccattacatttttcaattaattaaataattttctcttttttaccgctcctcgcaattcttcggttcggaaaatggccacgcaataatcgccaaaagaacgaagggcacacaaattgtgcacaaatcgtttcgttttcacttccattttcgtttcataaaataccaaaaccttcgaacagagaataaattggcataaaatcccccaaaaatatgccaaatgaatgcctcgtgcagagacgcggccgatttataggcgaagacgagggtttggccacaaaaagtccactgataggtcaatttcatcaccaccttcatcaacaatcagtggccatcattgaaccccttcaaacaccgaccaaataaatattcgtgtcgatcagtgcgccgattcggtagcccgacgcttcccaagcgattccggagagatggccggcagccaagcgaatggtttggagtttctgatcaagcggaaacgatcaaaatggaaaaagtcagacggatcagcagaaggagaagaaaagggaccaccgattgattgtcggcacattcaatcgatttgattttcattgcccaatttgaaattgccaaattaaatcacttcgccataagctgagatgaagtgcattacgttccgttcgctctccggcaaatccatctgaaggcccgcgaccgcaaacatcgaaccgtccggggaccaatgggcggtgacaattaaagtggaggggagacggacgattctgacattctctggcaattgggaaagcccagtgagtaatgagag

SEQ ID NO: 9238 - DNA, 2377 bp, Heterodera glycines
  unsure (1)..(2377): unsure at all n locations
aggccgcgttggtacganccatttccatgggagacgatcacgtcgcgcttnaaggtcctctgagaagggaggatgaaaatgatcaatgacagtgatcagatggatgtaaatgatcaatgagattgattaaacggatgaaaaataatggtcaaatgtactgactcagtgccgtttccatttcgacattttccacacaaagcatttgtattttcatgcaaaaattgccgttctgatcgtacgcgtgcacttctccgtcggtgaaccctttcatgaactgatctgttggtttggcattttcccagtgccaatttaccgatcagaagtaaagtgtcgtcggaattccactgccaaatgagagcagaaattagcccaaccgccgtttcagccctaccgccaatttgaccagcgacgctccgatgtccttattccaaagtctgttcccgtccaccgagcccaaaataatttgtccttaatcggaagagatgaaaatgagttcattcctctgattaccatcttcgtaagcgattgcaatgcgcgacccgtcgttggaccatttcaacgaggcaacggtggacctttgacggttgttgatcatctcctcgaaccacgactcatccgcactaaacacgaaaacatcagtagccgaagggactgacaaagattgatcaattcgcaaggtcgattggccgataaatcgattgcttgatcaaccctttggtcgattggtcgactaatctttgattgatttgtcggttagcggaccgattggacattgcttttccgccctttcacttgcccgtggctcatccaaacgatgatcagtccggcatcgtcgcttgacgccaatttttggtgaatttcattccaacacaaaaggcgaactgaaaccaattagggagatggataaatttaaaaaaagacaatgaccactggcggaatggccttcgagttgttgggaggacagccagggactgagggaggcggaggaagggccggcacttttgtctggaagggaaatgccgttaaaatgggacctcaagaattgcatttgacccccccccccccaaagtttgccctggtccaaattcagcagcatcactctcagggccccgtcactgccgcccaccgccacataaccccggttgagcatccacgcgatggttgtgaaggtggcggagccgggggtttggatttgaaactgaaatgggcgggggaaatgaaaaataaaaatggccaaaggacggcacttttctcgccgggaacacgtacatattgttctgcattctgtccgtttatttctaaaattgggaattgggtcagaaaatggcacaatttgagcattgactgtttcgtttgtgcctttttaattttttttctttgccatagcaacggaaaatgaaaatattttgggaagggacacaaaaaaataaaaattaaaattaaggaaaagcatttcaaattttaaggctttttgcgatcgctcgccgattcagtcgaacattttgaactgaagagaatttccattttggagaatcgaaaggggaagaacagaagaacaaagaacagattcagcagcaattaaatcagggttacccttgaaaatttcccgaaataagaacatcgctggtcaaaaataagattttagggtcaaaaataaggacattttttaaacacgcttccaaaactttaaatgcatttttattcaacaaaaccaagcattactcaccgccaactatttttctgcgcaactccggcttagaaatgagaaatttatacatttccgaaaatcaattttaatttttttaattttttgggtataggtgagggaagagtgtccggcggtgtcgataggcgccgcggggaaattttttgaaaatttaatgcaattttttaacaagttctgtccaaaaaatgaccaaaatttgcgatcttgggctaattttaagaaaaaaaaataggagttttggggggccggcggtgccgataggcgccgcagggggaaaattattttaatgaattttgttaggaattagccaaatttttcagaaatttcctcttttaaatgaaaataagacacttccccaaatcagaacatttcttagaaataataacagatacacccctgctctaatagacgctgccggaagagaaaaatttgaatattaactgaatcttgttaagattttgcatattaattcgcttcaaaaaacatttctttcaaaaattatcattaaaaactaaatttctccctaaatccaaaaaataagacgaaaataaggacaaagagcttaaataaggacaaatcttacaaataaggacatttaaaatttgtaagatttggaccctcaaaataaggacaaagggtaaccctgaacta

SEQ ID NO: 9239 - DNA, 2289 bp, Heterodera glycines
aaataagagaaaaaaacaaaaatttttgagaaaactcaaaagattgatttttttcgatttttaagtgtgtaagaaaaaatttttgaaaaaagtctcgggtttttttggtctcggtctcggggttttgggtctcggtctcgagtctcgggaaatttttggtctcgagcatcactaccaagcatacctcccccataaatattagtgatctgatcactttggtgcaattgacttttttgatcagcacaaaaagttataatagtatgagttttttcagattttttcatgccctctaaaataagttaaatgtcttcagttttgagtttttaatttcgttacgtcaaatttgggaccattttcagaaattcataaaaaaaattttcttttacactttccgatttttttgcgtgcttcttaatatttatggggaggtatgcttggcaaaaatttcatccacgggaaatagctggtggtaaaaaaattcttgtttataattttgttacagagcatatttgttttaaatacgttattcatttcattcgcccaaaagatttttttctgatcattaaacaatttatattttatatgtacatttgatgaaaatgagtattgtttgtttcaataaaatatgtaaatgtgctttgttatgaattcattcaaacaaattggtaatgaattgtaagaataattgagctgaataaaaggttcaaaatgatgtatagcaaagggcaagccgaaacaatacaaaaatacaaatgttgaaaaaattggaaataaatgaaaagaacaaatttagaaagaaggaatgtgaaattcgattttgaaagcaaaaacttggcaccaatcataagaagcccttgggccattcactccccaatttttcccatttgaatgccgtcctcgtcaatcttttcttctcggttttcctgccgttcttcactctttggtctgcgtttttgataatgatgacgacggtgatatccctttaagataatgttagtgtaagaataatcaaaaaatgttgggctttaaagtgacccactcatacgacccaccggttttggttgctgatgccctttttcgcctcctccattctcttccgccgggcagtccaatgaaacgggtcgcaaaagcactcgaaaatgccgacgtgcacgacgttcactcggcgataaatgggacggagtttcaatgattgtaacgcttttgcaacgccgcgggggcaaaccgacgccgacagtgccattgtcctccgaagttggtgaattggaataatgggcagaactgccgataaacgcgggcacagtgtgagcagcactagtggttgtggtagtcgtgccatactcaacggcagcggctatcgaattgcgcaattctgaagaaatgaaagtgattaaagggagggacaggggagagagaaatagggagtcgaaagaccatccgaccacacaatcggacttgaacgagagtccacccacttttctcgaagtgtttgcgctgtctgtaatgtcggtaactttggcgccatttctccgccacttcggcagtcattgtcggcgcggtggcgcccaatgcgcgacgtcccaagagaaattcgtgcaaattatagcaaacgcggtactgaaatgggagaataacattgcttgttttgtcttgaaatcggttctcaaactttacatgaatgccaataagctcaatgcctcgcagccaaagtgcgcggcctcggctcatcgattgggaggcaaacggcccactgacggaggcaacattttcgggcggttggcgacggtggagatgcaattttaaagcttctaaacatgtaattcgaatgataccaacagtgtttgatttggttgacaaagaaaaaaagttatagtccaaaaactgggctggcgccgaaacgaccgacgccgaaacggcctagtccctcccattttcattgtccattttatgtcagcgtgcgctatttctagtataaaaagacggggtttttcttcatgaaaacattttgtctaatttcaaatttttttttttttgtcatatatctgaaaataataaatttctttacagatgatttacattattccgtgcatcgctcttttggctgcatttattctcattgcccaatgctgcggttgcggcagtgagggagcaacggaaaaggatgaccagcaggctgcaccttctggaaatgctcgacttcaacgagcgaaggacatgatgctgctaccgcaactgaggattcggcgtggacgaatattggtgtgtgcgttcatctaatattttgttaaa

SEQ ID NO: 9240 - DNA, 1523 bp, Heterodera glycines
aacgcgggtccgtcgtttgtgccatcgccggtgacagcgacaattcactggggaaatggataaattaatcgtattaagaaagaagcagttaaagtgatattaaaatgcgaaacgcattctcaaacacattttaccaaccgttgtgtgttcaatttgctgtcaatgatccccttgaccaaagtatatttgtccgccggttgggccctggccaacacgcgcaaacgtggccaaatctgtgaaataattgtcaaaatgttcgttacttgtccacacccattttgaccatgtccagcttcctttgatcaattttgccacgtccgtcccgaattcggtcgttaaactccttcccctccaacaccaaaaagtcctcgtccggtcgaagaatgccacaccgaatggcgatggcgcgtgcagtgtttacattgtcaccagtgacctacagggagacgggcgggcatatgaatgaaagcaatcgcaaaagacacaaaccattcggacggtgatgccggcacggcgacacttttcaattgcgtctggcacttcgtctcttacaataagaaaggaaaagaaatcaataaaaatgaaacccgaacaaaaaagcgcaaaaagtactcacctgaccgggtcttggatgccacaaatggccaacccaacgacgccatccgaaatactctgttcatcgtcccaattgactgctgcttctgaatcgagtggtacctgaaaaaataggcaacaagaaatgagaccggcgattcccgaacctccgttgggccaacagttcgttccccagccaaaacgtagtctttgtacgcgatggttaacgtgcgcagtccgtcctccgccatccgttggatcacttcgtcaattattcgtttccttcgatgctccgtgaattcagtcggtgatccgttggcgtcgagaaaaaaagcgcatttgttcagcagaatttccgaggcacccttcacaaaaacacggaacccaacacggcgaccagccccatttttcaactcgacaacggtcatcatcattttgcgagaggagttgaaggtgtacaccttcagcaagcgaatactgtaaaacgggacatcgtccgttcccgactgactctgtaattgtcttcctccgtgtactctctccgaattttctcataatctcctccgatttgcctgacccagcccaaaagtgcacattccgttttgttgcccaattgttgaatccgttcgcccgcctttttcgtcgcaacaatcatcgaattgtacgcacaattaacggtgattgcctcacttagcaaagtgaccaattctaaaagacaaaagcattctgcattaaattgttgacgatcactccgtttgcctttgcgaaattctcccggttttggctgacttttctcctctccaaaatatcgctcgcacaaaaaggactggacaacctgtagattgaatatattctaattagattaaaatccgaacaaattggtctttggatcccattttccttacggtcatccgattcgttgtcaatgt

SEQ ID NO: 9241 - DNA, 1340 bp, Heterodera glycines
ttttctctctctctctcttctctttcctcttctctctctcctcttctctctctttctctctctctctttctctcactctcctcttctctctctcctcttctctctctttctctctctctcttactctctctccccttcttctcgctctgcttctttgcattttcttcttctctttttctctgctgttactttctacgttctcttttctcttttgtgcgtttaccgcgtgcgatttcctccgtttggtgtcccattgacaaacaaaaacataaaataagcggagggagcgccccctcttcatcatttcttttaacgagtcaggccatattaagctccgttcattgttcgattaattattgctatggcatccaattatgagtattttacctgcatttttttcctgaattatggaaggcctaaaatatacgaaagaaatgttgggtctagtgcactttatgagcccaatcaattaagcatacctgctggatttacatgttcgtacaaaccctatattttggttatcatttaataaatcataaaatctaaagaagctaaatgtataaaacctcagcgtttaggcaattagcaaaaaagatacgtatgattattttaatttgttgattatttcgtttgcaactttctttaaatgttagcattctcttcttttctagtattattgctagtgatgatattttttaagttttggctattttttcatgagctcccaccggcctaaaacgcatggaaataagttatttttgatggttgttaagctacttttcgagtgcctattttctaggtttttatttttagagcctaaaaattttgcctatttttaaatccctaattattatttttcataaaacttatttgaaaatgcatagaaattgccctgagaatttttcgtcgctgaaaaactttttttatttgttttatttatcaatgattgatttgccatttgtggtgattcatcaaaacataactctttctccccccccccccccccaacgtcctttgtgtccattgcaatcgatcgctttccgtttacgcacattttcctgccatccttatttttgatgaaattatggtaaatcgtcacatttatgctttttaagggttgggtcttacaaaatttacgaaaacaaccccaacgcaatttttaattactacggccagaattcttagtttcaaattttcccgcattaaaaaataaaaaattttaaatttttttgaccaaaacaaattaaaaaatttttctttaaatactggatctaaaatgaaaaaataaacccgaaaaatccgaattattttttttttttttgtttttaatccaaaaaaaa

SEQ ID NO: 9242 - DNA, 1040 bp, Heterodera glycines
tgaaaaaaaaatggcaaaaattggccgaatgctatgaatatttataaaatttatacttcgaccttgacctggacccaggcttgggtttttgtcctcagatccaggtcattttctgcaaattagttttttcttgactttgtttttgtccaagtcttgaaatccaggcaaggcatgaaaaaacccgaaaaaaccatgaaaattctgctaataaattacacttaaattttgtaaattttatccggcgacacctttctatacagccgaactcaactctacatattaaatatttttatgaaatgtataaaataaaactgatgagaaaacatgttgttaaatttaattttttaattttattttcaaggtcaaatttttattttataagttcaaaacgagtaaattgattaaaaaacatatttttatatgtctttaaaataaatttaattctaattgtataatttattttaacaactttaaaactccaggcaatgcctggatcgagccatgacaagcctggattttttgggattcgttatttgatcccttcccaaattcgctgcccttttcagttggccgttgtcgctgtgatgagtgctttcccgttcatgcatccgcccatgattgcatttgtgcggcacaatgtcggactttatttgttgggatagtgagttttggcactcaattaattgcccaattaattaattggctgaaatgtccaatttgttgctctgttcagcatcactttcttcgtcgtttacattgcattgatctgttgcgagggcgtccgtcgatcattcccggccaatatcattttgcttggcattttggtacgtttcgtcgtgattatctgacaagggaacacttcgaactgtgagtcggaaaaagcatatacgagtagagtcgatttgtattgtgaatttttaatttttgcgtgcattttgcccacttcaaaaattacagggccccaaaagtcggaattttaatgcctatggattcatttcaacatttttgcactttataacattttcacccctatgcaatga

SEQ ID NO: 9243 - DNA, 1853 bp, Heterodera glycines
ctaacagttcgaacgttcccttgtgagtgagtgctcccattttcctccgccgattcagactttgtccatcggcttcatgaccatgatgatcactgcgcagtacgccgtccattccgtgttcatggctttcgccatcacttccctttcgtgcttcggcgtggcacttttcgccacaatcaccaaaagggacctgaccaggccagtctttctcattcccaaattgggcccatctcatacatggcccattaaatatatttttgcatttaattaccgtaatcccatggcctacagtatgcttggcattgtgttcatcgccacaatgtgtttggcgttgttcggcttggttgtgatcattgtcggaatgttcaccaatgtgcgcattcttttcgttgtttacgccgcgattggggcatttctgttcatgatttggttggccattgacattcaggcaagcaaaatggggcagcagccgaaatttacgaacggagtgacaaaagcgaagccattcgttgaacgtcacaaaaattggcaattttaaattgcaaaaattttttgtcaaactgctcaaaattcgatagccctgcatttaaaaaattaaatttcaaaaagtgtccatgatttgtcttgttaaaatttaatgaatttttaggattttttctttctgtcgaaacgtccgcttggcggatttacaaaaagtatcaaattctctaacaatgttcttatcaaaatcgaggggatagccatgaaaattgtttattttataattttaagaaacaaaatattcaaaatcaatcatcctcctccccccatttgctttttcagatggttatgggcggtcgtacctacgaaatttccccggaagagcacatcttcgcgtcgattactttgtttcttgacatcattcaggtggctttctcatttaatccaaaatataatgtataaatgttttttcagattttctggtttcttcttgcaatttttggagatcggtaaaataaataaaacaaataaaattgaagaatatctgccaattataaattttatgtttatattttattcggtcctactcgatgagagaaatcgaaaaaagctaatttgtcagtataattttaaaagtccggtaaatgcttaattaattgcttctcaacccaataaaatgcggcaacgcagtaaattctcattattagcattaaaatacatttttttagaagtaaagtcgcatttaaaaagttttgaataatttgctcatttttaatgttgcatcccttagaatcaattttttataagcaaaattagaattggtaatattcttcaattttacctaaaatgattttaattaaaaaaagacaaattgtctcctctcagcagaaactgaccttggcatcgcgacatttgcaacacataaacaaatatttgttgatgcttttcagttttacattcttatccgatatttacgcaatttaattgtgatctgaaaatattaatcacttgaaaaatatatttgctttgaatgataaatttgtggaatttttcggcgtcataatttaaaatggattatttcgtatgatctagagcccggaaatttaaatttatggatcccgctgcaggattgagattgacgggattccgtgtgatcaatcttacaaaatcccgcatttaaatttgcgggattagtcccgcaaaacccctgcgtctgggatcaccaaacgcgcgggatccgtcccgcgtcggtctctggtataacgtccaattcgacatgtttttattgtcaatttacccttaaaaatatctaaatcatagccaatcttgggataaactatagtgaacggcctgtgaaaaaagggacaaatgat

SEQ ID NO: 9244 - DNA, 1543 bp, Heterodera glycines
cgtcagactgcttcctccacctttcatctagccacagtacttgctcagtgttcgcatgctcccttatgcgaaagttcgttggtaaaactttttttgttcatcctttatttctttggtactgaagtgtcacttttcactgggactcagtagtccaagtgttcagatggcatcggttcgacttaatttccgatttttagattaagctcgttaagagctttcaaatggtaccaaatttgtcgggattcgatcattaaaaaaagttagagtgccaaatctctaatttttcgagttttgattggcatttccgcaactcgggacatatttttccgtgcttatctccacgagacgaatcaattggtatatcatttgacccattttttcatgggcgttcactatagctcaccccaattttggtttaaacaaaagcttagattcattttcagctgggaaatcccacattttttttcaattttttacttttttcccaatgcttccaaattttgttcaagttttttggtttttacgcatgggccacaaaaagactagaagactcagcatgaatattattctttcattgttcagcttaaatcaaattcacacatattttcatcattaaaacgcaaagcgttatcagctgagccacgaaaagaatgttttaggttatcaaacgtcatataaaaaagtttaatttgcttggtgttcagtaaagttataaacagaaacatatattttaatttatattttttttactaattgaaaaacaaatgttttggtagaaattggagagaaggtaaacaaacaccaataagaaaaagtgttattcaaaggctcaaccagcggaattggaattgtttagcacccccataaaaattgcgttcgttttcatttgatttgtcattcattgcctttgcttcaaaatgaaaagcgttccaaactatcaaaattagtaacaaaaagcgaaagaaagagtaaacaaagggaaaaaattatatttttcaatttcatcgacagttctgaaaaactccaatcacaacattttaagttttcaatattattatattttcgcttttttaacccataaattttcaatttttatttaataattaacgcactcgttttgattattaaatttgtcaatttcctttaaaactcgtcctcccaattgcgtcaacgacggaaaggaacaattacacaatttattattatttacaccattctattgtataaaattgtgatgttccctattttggccgactgtttgatttgtaacgatttctgatcaatggaaaacaatgttatttttaatcattcacaaatttgtatttataatgatgaaaccgacaaaagtatcgctaattgagtgtcaattaagtgcagtctttttttttgattgattttggattttcctttttgttgataaaagaagaaattccttaattattaatttttttcacatttttcatattttaattgagtcttttttcctcgtatcgcttttaattgtttatttcttttcatttttttatttgtaaattttgctatt

SEQ ID NO: 9245 - DNA, 3572 bp, Heterodera glycines
tatccgcgtcatcaaaatgtaaagtaattatatgtaacttttacatctaattatccatacataaataaatttaacaaaaattacttttaaattgacgaaatttacttttttatgctacagtgaacaaatcggagatgtgaattctgagggttatcctcgttttttcattttcggaaaatctctaaaatatgcaaccttttaaggcaattttatgccatatttacaaaaaatataattttatgcctgtgaaaatattaagacctttaattaattaattatcgtttgaatgattttttagttttttcggtttagcaaaggctccggcgccattgggtcaacaaagtgctcctgtcggccattgaaattgtgtcccattgcggcacttgtgccaacaccactgctgacgaattgcgatcgatcagaatctgtgagaatttcaatttttactttttattaatttaaatttcgatggatttattttatttttccactaattaattaattacataataatgcgcaattttttcagctctttgctgccatgtgttgaagagactgcacgaaacaaaatacgtcataattcggtagagaattttgtgctctttctggcagcccaatccaaaaattccaaaaaattttcacagcccgcctaggaatttttttcaaaatttttccaatttcaagccatttttgactttcctgatcaccatgaaggagtgatctgatgaagtttgtgtaaaagacttttttgatcagtatcaaaagataagctagcatgaattatttcaggtttttaaatgaactttaaggtggtttttttcatgtttgagtcaagacctttttccatcactgtatttaacacaaagagacaccgtactgatgagtaggaccgcaacttttagtgaagcgccacgcatttcatagtttcgggaaataccaatgaggaaattcttaatgttttcgggattcacattgacatttgcataattgtgatcattttgggggagaatgttgttattgatatcgttatgacggtggacgagtcggagaatccgtgcgtcggcatctcacatcgccacaatttcttaagcccatctgcgctaaattggtcgaaaacatagagcgcgccgtctgttccaacttaactttgtttcgttttgttttaatttgttgctgctgctggtccatattgtaataatttaaaaagtcttaataaatttatcaaattcacttagttataaaatgaattaaaactcgaaagaaataagagtcaaacaaattttggtaaaatatagtgtgggtaatgcgtgggtaatgaatagggctgtgacttttagtgaccaaaaatctcgaaatagttaactaaaatagtgagcaaaaatgccaaaatagtgaaaaaatagtgtcaaaaagtccaaaatagtgacgaatagtgacataattttcagccaaaaaaagagcaaaaataatttttatccactagttgcagttttttgcacttgtcgcgaaatgacatagcaccgagacttctaggttcaagtgtttcatgttgatttttgctgattttttgattttggtgctttttgtgctgttttgtcattttgaggaattttctaaaatattttcatcgattttcaaaaatttattaacaaaaatacaataaatatgaaaaacactcccctgggaatcgacccgaaaaatttcagaaaaatacaccccccccccccctaagaaatggaaaattttatcaaaaattcatctccgaaatttattttattattttcttgacagaatttttgatttttaaaattatgtatctcattcccattttagcatctattttgtggtttttttagaatcagggggcaaacaaacgtttttttatgctgccttttttcaattttttgtgcctttaattgcttaattttatgcttttttccaattttttgtgctgattttgccttttttgtgcttttttcatgcttattttgggaaaatttggtgctgttttaatcggtgattttttgtgctgaaaattgagcactctactaatgagcaaaattcaagaaaaatttatcaaaagttgtaaaaaaaaaaaattcaaattttgcttggaaatagagaagattgaggagggctttcgaatcatatcaaaatgttttaatttggatgatttaacaaaatttgaggatttctttgtcaaaaaactacatgctggcctaatatgattgggtgttgtcccttttttactttcctaattttgcactgaataattgtcccaattaaatttttgttttatttataaatttttaattggttttaaaaactgaaaatccgtgccctaattattgtattttttcccgatgaatcactctttctttaatcagccattcattaaaaatcgtatattatgtattgtcgttcgtgcaatctcttcaacgcatggcagcaaagagctgaaaaagttgtgcaatattttaattagttcattaatttgtggaaatatggaacaaattttaattaactctttttaatttaattgaataaaaaataaatttacaaattctgaatgatcgcaattcgtcagcagtggtgttggcacaagtgccacaatgggacacaatttcaatggccgacaggagcttaatgggatgaaaattattacatcaacggggtgtactgtaaatctgtctgaagacaagatttttgtaattaaatgcaattttttaggtgtacaaattttaattgcttattgttaacattttgatgattccgaaagcggcggccgaaaagcaataaaaaatatttgttgctgatgcacaatgcgtagtcggacagaactgaaaaattttacattattattatttacattgttgatcaagtccaaaattttcgaattattgaaattaaattactaaaaatttaaatcaaaaaaaaattaaactttattttgtttaattgggtcggggtcactttggcgcgggacattttgacgccataaaatttaaagtattctaacttttttcttatccaaccaaatgaaataatcatgatattatcaataggtctaagtgttctctattagcctgcaaaatagaaaaatatatttgttttaacaaaagacatggcgtgcggcaccaaaatggccagaaaaagtcagtttttgaggttttggccatagctttcttgtatctcaactaaattttttgaaatttttgcaggctattagcgactatcaagcgctttaaaatcacatcaagattttttaatttgaatgaaaaataaaaatgttatagcgtttggcgccaaagtggccggttcccgtttaataactgtactgtcaaagcggattaacgagtaattaattgcgaaaaacaaaaaattttatggatcaaaaagcaaaaaatggtctttgggtcccacccgcccccctctccgagattattttaaaaaattggcatttttatgagtagggctcggatttataggttgctaaaaactgccaaaataattagtttttagtttctaaaaaaccccaaaatagttgctaaaaatggataaatagttgctaa

SEQ ID NO: 9246 - DNA, 1880 bp, Heterodera glycines
ttattggcaccagggctgcacaaaatttcgtgtcgttttcgtatacgaaaatttaattttaaagttttcgtgcagccctgattggcaccaccggctcaccttgttccccaaaaaatgtttggaaaaagcgtcgcaaaaaaagtgatgcgaaaagaagcaaaacaaacaacaacaaaaaaaaaagtcgtcgcccgggggaagccccccaggccgaaatcctggatatgtcctgcccaaccccattaaaataaaattaattaaatttttacattttcccagcaactgcaaatcatcaacagttatgtgtgcccaagtgcagcaaatggacacgctttcagctacaattataagcagctggttgatctgtgtaaatgcggagtgatttatttatacagtacccaaaatgagtccaacttagcatacggtatcctatcaaatttgtcaattgagagaaaattttattaaataaaaacaactacgtaatgatacgaacacctaaaatattttcgagcgctttaattacgtaattagggtcgtctgagttaagcggcaagccaatgagttcaggaaaaatgcgagaacaattggtccaacgtccaatgaagtaaagaaggtcttttatgaggggtaatttggaatttttttaattaattaaatttatttataattaattaaattttatttgaaaattaattaatttttatttcaaattaaaacccttatagaaaatctgtgcttcaaattgtttaattggaattacgttgctaagcagcaaattatcaggaattgttctgatcattttcactatgcttcgcacgagaaacgtacatttggcaatctgccaaaaatttaatgatttgacaaaaaaaaatcaaaaaataatcggccaatggaatttaaaatatttaaagaattttttaaaaattcgtgaaaaattaccctttaaaaactcaccaaatttttgatttgactaagccacgagcccatacgattgaacagaaaatggttaaacacttgggacacatggatttgagcccattttctgtcgaatggaattgcaccgataatttcaaaaagtaattccgtcggaatattttttcgcattttttgtccaagttttttttttggattcttttaggggagaaaatgccaagtgccaatgacctatctgacgatggcatcgtggcggcattcgctttgatctcaaaggcacgcctcacaaataaaaaaccaaatgccacaatggcttatcttactatttatcggcggcattcggtttggtctcaaagattgggctcaaaaaacctatttttttcattttgaaaaaggaatgcgcaaatatcccaaatcagtgaataattaggcctaatctgccgctcccctgcctatccactactaatgctctctctggtcaagccgttgattaaaataaaagttttaatttaaacaaaataaatataaatttttaaatcatattaaaatttattttatttttaaatgtttacatttttacaatgctaaaattaattaatgcggaataagctagtaatctgccggttttccacataattcttcaattaaattttgtaatttttattccctcatttttgttgcgcgtttgtcaaatttcttttcccagtttatccctaaaaaattatgcaaaaatgagggggaagacgatgcactgacaaatgaagttgctaaactattaaccacctaattacttttattcagtcaatgaggataatttctttattcaaatacgatttatatggatattgcataccgtatttgctctttttatataccatggtatattatttttcaaccttctcagaagggggtatataattggagactggcagactaatggagactgg

SEQ ID NO: 9247 - DNA, 6353 bp, Heterodera glycines
cccctttgttcgtagttttttgaaaaactgcgccgcaaaaaaatcaacttcggtttttcatgcttggaatttcacaaaatgcttacatatttctaacaaaaaattgctcaaattgatcattagggccgcaacttttagtgacgaaaaataccgaaatagttaactaaaatagtgagtaaaaatcccaaaatagtgaagaaacagtgacaaaaagtccgaaatagtgacgaatagtgacataattttcagccaaaaattaagcaaaaataatttttattcactggttgcagttgcaaaagagctacattttctttataaaattctcttagcaaatattgacattttttaaatcaaaaattttgtcaagaaaaaaattttgggggagaatttttgaaaaaattttccaattaggggtgtatttttttttaattttttaggtcgattcttaggggtgtattttttgttcttattgcatttttgttaaggaattttccaaaaaatgtcgaatagtgaaaaaatagtgacaaaaccccaaaatagtgatttttaactattttagtgacgaagtcgccaaaatagtgatttttaactattttagtgacgaagtcgccaaaatagtgatttcagtgaccgataatgacatcagaatcgaaaatttttaatgcagaaatgcgttttttgagctcctttcttcaaaacaattgagcaaaaaaaaaagttttttcactaaaagttgtggccctattgatcatggacaatcaaaaatataacatttgaatattttaaacgtattttgaataaatttcgtaaaaatgaggtttttttgcgtgccaaatgaggctttgaaaatttaatctggctaccctgattatgttcggttttctcaaaaaatttttcaatccttaggaatttcttacgaattattgactgcgtaccgctccccctccactctaattgaagtgactcttttaacccctaaagattaaaaaaatttccgtaaattatatttatttaagatttttactcattttttcatttatccaacaatgggttcaagcagttctagcaatgcgggctcgttctcatcagcatttgcgagtagttctggaagtgcgcgctcatcaagtcagggctcttcaaaactgttctgcagtgaagctttctgtgcctgtccccgttctcaccttcgtgccatcgaattcaagaaggtcgccgttgccgttgattcgggtaagagagtataagttttgtaatacaacaagtaactgtagaaatatacgaaaattaatggaatttcatgttgaatggtaaaattccttttctttctacagtaataactttattttggtccatatttggccatttttgagctttttagtccatatttcgggcttttttagtccatattttatgtccatatttgggatttttcagtccatatacttattgtataaccctagtaatgacttatccccacgcggctgttgaagtgctctacatatgcaatgactgtgaccatgaactgcgtgtcacgtacgatcttgtgttcaatttgcaccttctaaggggtcagtcaattaaaggaagagttgaagtcatttaaaagtggctcggtacaaagcagggatgggccaaatcgaaagataaaacgcgaaattacaaaaaaggcgaaattacgaaatgcgaatctcaaaatgttgttattttttgacaaaatctgttaacaaatagcattacaattacaaaaaattttcccggcgccgccggaccttttccaaaattttttttgaaaaaatcgcgccgcaaaaaaatggttttgaaaagcaaaaaaggtcgtcaatttacatggctggaccccttcgcaaaaattttggttgactccttcccctttttcatgtatgatcgcatgaaaaattagacctagaagccaaaaaccagggctgccaactgaaaattttcaaaataagaacttgtggtcaaaaatcatcattttgtacccattccaaatttaaaaaatgaaatttcactaaaaatccaaatttttcctcggtggcgcctactggcaccgcagccctctttcaaatattattcgataaaaaatttattcgtttccgtaggggagaaacgcgaaagatgcggtcactacagaatcagcaccagcaacttctttgctggtcataccttccgccgctactacatgtcttatgaggatattgggcgcatttttgacgggatgtcgaattattacaaccttgtgaccagaaactgtatccattgggctaatcagtttattgtgtgccttgaatattattgttagagtaagttggaagttttattcgctttttaatataataattgtcatgtgcttgttttatttttgaatattaaataagacttgaaaaattttaattgaaaaccttgggttagtcatttccctcatcaaaaacggaaccaccgaaattaaaaatagagagctatgaaagcccaacgaaaactctatttgagccaaaacattaaactcattggaatgaaatttttcatttcttataaaaagataatttaggcaaagcaatttacggaaggacggcgatgatgatgcttaattgttgaccaagctaacatcgaaaatgtatcaaacattgttgcaaattcttttgttttcttttatcctatatgtttaaaacaatttctcaaacaatttacaatttgtagcaattaatggcattcatttctgatttgaaatatttttctacgtttaggcgctaggaaaaaataaaaaatttttgtttaaatcatgcaaaataattttcaaatatgcactcgattaacaactatgatcttttaagcttttgggcaagattagcttctgaagtaaacataaattttcaagctgtcaacaaattctaaagaattttcataaaatttttgggccacgaaacatagattaggaaaaataataattggaagaatttctatattattaaatttacatgaaaaatttgaatcatatccattcttcattaccacaataaaaaatggaattatatttcgaatttaaaaaatttaaataaaactgacttttgtcttatgtttttccaggtttataaatggcgtgtttatagaatttaaaacataaaatttacaaaaagacattttttacaatggttctcccccgttcgataacaagctgtttttctcttcttcaatggtacaaatttgtgctgaatgttttcttggcgaacaatttttgagcaatctgaaaacattttagacaattaaaaatcttgtttattttttgatcacaaaaagtgattggggtcgctttgtctgttgccagcagatggcgcgttgtttgtgataagcacatttaaacttcggcatgatgttctccgggactcgctggtattggcgttggtttgttgctgagtcatcagaagtgccgtgactgcctaattttttttaaattttttaaatattctatggacacaaatgtcctcttatatgaattaatgcttaattccatttttattattctcatttcacagtcatccatttctcatttatcagcaaattttccataaaaaatgaataaaggagacgaaaaaataaagtgacaagccaaaaaactcccagatgatcaaagtatcattttgaaaagttgcaaataaaccaaattttaatgacctgggattttctgcgccgctccaaagacgcgcgaattgtctctttgaattgtgggttgaaaaagctgtagatcaatgggttccataccgctggtttcagattatattattattttcaatttgaattatcatttttacctgatgtcatcgcaacggaatgacatgcagcaaaaatcagagaataccattcgttctaaattctttttcaataaaaaattataataaaaagggaagggttttgatcgaacagatttggcatcatcggagttggcactgttttcgctgttaaaatcccgccaaaggttgatcaaattcattggcaaccaggccaacaccaagccagcaaccttgatcagaaggaaaaaaaggaatttttggtgaaaaaattatgttttcacttctcaaatcttttagaatctttatccgttttattccggtccctgttgggccgggattaatcgggaaagataagcaaagcattcgtgtgatttaaatagtgaatatttaatggacttttgaaattttttcaaaagtttgatcatatttttttacagtattttaccatagtgaccatcatccgatttgtcctgttcttctgacttttcattctgtctttgctttcctgcagcagcacaagttgccgttcctttctcttttgaatttggcgccgaatcagtcgacctttaaaaaataaaaaataaattaacaaataaatcatttaaatatttaaaaaccgatgttccaatagcacagcgaagagattacagtgggcaaaccgaactgaacaatcagcacaagcaaaccgtacagcttacgaatccgacttctccccgtttgttcttccgtgtctggcctatttaattttaaattccgttaaatttaataacaatttaacttaattaattttggcaatttttccccttaacttttttttttaccaattttcttcacaaaatgtgccgcaaaatggtggatattcttgcgttgatgagaaaagaccaaccggcaaggcacaagcgtaacccaatgtccaaacgccaataacaatgcaaattgcggtgcgaaattcaattttctgcaattttaaattatgattattaataaaaaaatatttataaattatattgcctgttttgtcgggtgtttgatgagaatgtaacggtcaacagcaattgcggtcagtgtgaagctggacacaaaaactgtgccgccctgactttttgaaaacattgagaatacaaatgtgtaaattatgattgccaataatttttttttgattaattttcactgcggcacctatcgatgtcctatcgatccggtcttatcgaatgaaaaatacaaattttttaaatccatgaaaaaatgttttaattatgccgaattagcagctcattaatggaggaggacggagatgattaaagcaaactttaaattatcatatttctgtctttttgaataattttcgcggaactgctaatttggtgaaagaaaattcattaaaaaaattaaatattaatgacttggaaaatgcccatcaatttgcaaaatggagaagggaaaacccaatcacgtgtaaagattgaaatggcggtgatcggcaatgaagtgaacgacatgagaatgtcggatgcggccaaactgcagatgaacaccgaacgcaccgatgacaattggaccgaaaatgaaaaagacatatttataattatatttggatttagagagtctattttccgttttacccaggctttttttaaatatcgaactcgaattcgaatatttcccttttattgaattgtaaaaattgggcaaagaaccaattgaaattttaaggcctaaaatattactaacaacccaaaactctaattataagggtgttcgttttatgtacaaaaatgccaatttgcataaaatatgcacgaaaaattaataatatatgccctagaaatatgaaaaggcccaaatatgcactaaaaactgccaaaaatgatttaagccaaaaaatgtaaaacttgtttaaaaatataaaaatgataaaatatcaaaacaattgctaaataattttttttaactttttttttggtaaaaaagtcggcataaaaaatattcttaaaaaatgcgaaatatgcatttattctcgaatccccaaattatgcataataaaactcgcctgttttaagctaaccacataaaggacggaagcattgcccaaaattgcggccaaccaaatgagaaagtacagggcggagaaggacaattgaatgggcaacaggtcgaccaactcgggaaaactggcctaaaataaatgaaacaaataacagttgcagctcttggcacttaaaagactcattgaagaaaaaattgaaataatttagatgtttttaattttaaagaaaaaaaaacgcgaaattttatcggacctttcagaaaactgtttaaagtattttgcctagcgatcgattaatctttttattttgaaaatccatttcaatttttctcaacctgaattggcaaacaaatgttctggcaaaggcactgtgggtgggagcgccacaaaaagttgggccacacatttggctcaaccaatttttgtggccattggtcaggaaacaaaagtggtggaggtgaaaatttattgctaattatgttttctttgttggtgtaattgtcggg

SEQ ID NO: 9248 - DNA, 1766 bp, Heterodera glycines
  unsure (1)..(1766): unsure at all n locations
attattatttaaatcccatcataaaagcaataataaattcccccttgaagtgatcattttgcttttggtcgcaatgtgccctattaggatcacatggtaactgcgaacatcgcttcaaattcagttacctctgtaagccaaccctcaccttaccccaaatttctgtgctgatttaagcaattgcaggctaaaatttcagcgaagaaaaacgggttaataatgaagaaaattacacaaattaaggacaaatagaattataatattttgctttacaaaaatattaaaaagttataagggaaaattcaaaattcgccttttgtccaccgtttcagtaaaggcatagattttgtttttgttctttcggagccaaaatttccaggcttttattaaccattgagcgtatttatttcttaagctcggatttggcaaaaaatattgcagtttatgccagggcttacactgtaataatttgttatggttcttttttgttttcacttttctcagatggattatggcaaatgcaaaagggaagtgataagcaaattggcacgagaagcgaaggcggcggggatggcacacctcggaaatgccatttattttcacaatttctatcgaaatcacggaaactcagccaaaataagtgttggaacaaaaataaatgtattcttaagacattataatttaattaaattttatttaaaaataattttcattgcgttaatttttagagggacaaattaaagaaaaggcaaatggcagaataaaatgcaacaattgagcagcagcgatggaacactttttgttgtaattttggccaattcttatcgccttttataataagcaaatgaaaagcgcttcgttctgaagcagctgtcggtcgcaagtcaaaaaaagaaaaattaattggcactttttgccttaatttatgagcatcaaaaaaacagaacatgcgaattaattgggagggagagaagaaattgatgtaattatcagcaaaataaaaatgggaattgacaaagagatgagatcaattggaaatgcactgttctaacataagaaactaatcaatttggagaagcatttcgggaattcaaaaccaattagcaggttatttaatgagcagtataaaccaattaaaaatgaattggtcggttcaaaatcgctgtcccaagtgctgaatggagtcgcggatggtcgcgtcctgcatgcacacctccaagaagcattccttttttattgggccggactgtcgagaagagccggtaaatttctgcaatttaatttttgaataaattgttttttaattttcaaaaatgccttgaacaaagtctgcgcgtgcttctccctctcctcgtcccgcagttttgacccgcggcgccgtcgcgggtccaacagatcatccgtgacgctcagcacgtacaccagccggtgccagctgatgaagccgctgtccagcgggtcgtagaagcggtacagccaaagcagcttctcctctaaagtgccacgcgaaagcaccgaaacattcttcaggaatttctgaaaaaaggcatttaaatgataaaaaaggccaaattagtaaaattaaattggaagaaggaacaaattaagaaatttaattcagatcaatttgactaattttaaaattttaatggtcacattacatcanatgtgattgccccggactgatccgtgtcaaatgtgttgaagatcagatcagcaaagcgttcagtgtcggcacggggggacaattgggtgaaaatggagcg

SEQ ID NO: 9249 - DNA, 4183 bp, Heterodera glycines
tttaattgcttttcgctttttcgttttcatttccaattcttttccaccggccaatgccttggccaagtcctccttgtcaatggcgtccggctgaagtgcttgccgtctttgcaggttgcgcatgccgtttatgctgcccaacggcgcctcgtcgtggcgtccgccggtggcgccgccggccgtgccgccccgcggcgtgggttgggaggagagaaacagtgcggcggtggcgacgggcgtttgctgcttgattagctgctggtggggggcgagaaatattacatggggtgggacacgtggcatatcaatttcacacgctcggagaagcgcttgttggggcggggggttaattgaggagagcgaacagctcaacaaacaatgaaattataatacaaaccgaaaaaaacggggacaaaatgcccgaattatccggaaaagccaaaggtatccgcaaatgtgaactttcgaattttataccaaagattaaatgtctaatgcttaattggatttaaatatatatggatatgaaataattagggaaagattttgtttttgctttgtcaatttgtagtttttctcgttttgacaataattatccaacagaacaagaaaatataaaactaattattattatttttatggcttaaccacaacaaaatgtttggttttttggtgggttggcacttccgccgccaacaccaaagcagcagcagttgtgaacgaattgcgagcggagagaagggagcgagcggatgcgatgtgttaatatttaatttgtgttaatcggcttagttccggaaaggccggcagctgtgagaaaatcgacaaattttcaaattccgtcgccggcggagtccaaaaaaaagcaacagcagccgttgccggggggccattaacttctcagggagagagagaggggggagggaggcaggggaaggcaagcgaaattacacggcccccccggggggtgttttgttttgccaggggaactaacagcgaaagtggggggggggggaatttgtaacatgcgaaatgatgaggaggagaagcattcattaacattagccaacattgggcaggcgaaaagccatcggacgaatgaaaatgaaagaatcaatgaatgattggatgattattattcaccacaaaccaaaagagcaacagaagcaaaaggtaattaattaattaattggaagaaatttgaggatttcgagttgaaagtaaataagtaaattggaaatgcaaacaaaagcataataataatttaaattaaggggtgcaaaaatggccataaaatatagaaaagaaattcccgaaaatgaaaataaaattgaaaagacaaggacaacatatgttttcagattgtaaaattactcaaattcttattaaaagctaaaccaagttcaaaccttatttttcacaaaaaaaaatttggacttgagatgttttaatgaattgcatttcttttatgtatttatagaaaattcaattttcccttctattcgcttatttttattttttcaaaatattttaatgaaaaaatgatttctttttttccaatttttaacaatacaaaagaaatgaaatttgacactgaaataattaatttcatttctctttttaataaaatctaaattattttgttcttcgttctctttttcctcaattgtttgttctgtttccctttttgctgctctccacaatgaacggaatgcatttttccaacaaattgtcactgaaaaagccctcctttttcacattttcgccaattttggtttctttttcattttttcccatttcctcccatcgcttaacaaatgtgtcaatttcttcgacactttcgcttaggaatttgttcattttattccattccatagcaaatggcattggcacttttcgccattcttccaaattgacctctttttgcatttttaaaatcgccgtgtaaagttccgaataaatttttgcactttgaaaaattgtgtcatttttgttgtcatttttgacaatagctttgcgcaataactcagcaaaaacagaagcgacgccataactacaaaaatgcaattaagcaaaatttgttttgtattaaggatttaattcctttatttctaattaattataacaatccaaataaatattaaatcaaaaatttgacaaattaaattttcattaatgcattgttcactccctaattaaccacactaattgtttgttttaaattctcacttttctggtgaatagatgcatttctcgaccatcttgtcaaaatcgaccttctgctgttgctgttgcgcgctaattatgattgggcacaatatgttaaactccaataatttttcagcctcaaaattgttgccggaaagcgccgccagcgtttggcgcgtggcaaattgtgccaggcgcagcacaccccgtgctaagtctgattgctccaagaatcgcattcgcttttcctgatgtaaaataaaatgaatttttattttgcaatgattaaataatttttatttttctggtcactgttatacagtatacgtattttaccatctcttcttgatcaattcttgacgctccaacgatcgcataaaattcttgcgacatttgagccaacactgtgctaaaccaactgagcatccattttctcgttgaagctatgtcgatgaccttaattaaatgacaattaatattcaaaattcactaaattgtgtgtcatttaccagaatgccatcggaggtccaagaaaaaaaggacaaaaatggcaatatttaaaaccaaaacttttggattttggaaaaggggtgttcgaacagagaccgcgagtgtttttttattttaaaaacctgacctgaatatatctttttttttgcacgtttaatgaaaaaacattcccaaactaataaaaggactaaaatgttaatgctgcttctctttaatcatctgcacagatacactactgtatactgtggatgttcttactgtatctttttgactgtaactttggtatggagtctctaattctacgattaattttgtgatgagtcgcgcacaaaaatagagcattaattgttctttgtgttcgtttgtctgctcttcctacaatagcgggagcagggagttgtactcccgtaaaatcccacggtagtcctgatcccgccgcactctattgttaagctattaattcaacttttcgcccacaatagctgatctcttttccaatcacacggtgcgctgggaattgtttcaagaaatgtcctccgaagaaaatgtgataatttttggcattgaaacgtaaaatccccaggtaatctaaaggtaattgtttacatttttgccgcatatactgcaatacgatggatcgtctttggggcggacattcaaacggattcaagaaatgtggacagtacttgaaaagtacttcagatcactgagagaccgtgattgtcccaaatttttgcgtcaaatttttgatgatgaattgacgccaaggtcagaggaatggaaagttgttgtgtgctttatgtgttttgcattcgatcagtttaaccaattgaatgttattagccaggtagtacttagaaaattactagattaattttaaaaaattcagaaaccgacacttccgttttccattttggccaaacaaattaaatcattaaaggtgaagctgtaactttcattgaacgaggagttttatggggaagcgaccagtgaactcttgaaacaacttgaaaatgatggcgctatttatcaaaaaaacaaattaaaggcctgtttctttaataaaatattggttttagttttgttttttcagcaattttacgcggacgcacatgaatatttgggcaattggtcacagcaattctctgagacggatgaaattattggagattgggtcattttcgagtcagagccaactagtgaaaaagttcgaagggcgtataggcatatttctgtggggcatcaactgacgaaatggatgctttgtttggtgagatcgctgagttgaaacaaacattgaaggagctcgagggcgaccggttcaacaggaaaaacgtggacgaaaaatgggcggatattttcaaaaatcctaattttgtcctgctcaaatcactagtctctgcaattctgtcgatattcccttaaaatgcattttgtgaatcagtcttttctgttctgaagaaca

SEQ ID NO: 9250 - DNA, 1927 bp, Heterodera glycines
  unsure (1)..(1927): unsure at all n locations
gtgtctcttcaaagaccactacaacctcagcacctgagtccagcgcgaattccacaaaatttccattcattttatagggcattcaatcagccgtttcggttggttcaccgaattgatcagcacacctccaagcttgaggttgccttgcttacgactttgcattttcccttgccttattatccacgattggtgttggttgcactgcgcttccaaatgtcccactttgctgcacttccggcacgcaactttaatgtgcggacatacacttggaaaatgtgagcttcgcccacagcgccagcacacattcagctgctgttgcacttgaccacgtgcttcaaagcctttggttctcactgcacaattttgctttacagccaaaatctgctttggcggggctggctgctgctcgatgcatttagcttcagcaatgccccgtcctaacaagaactctacagtccagctaatggcaatttggctaattatttggacaaatattctgttaagaatcagcgaaaaaacggattaataatgtggagaaattattagacgtcatattcattattagtaaagtaatattttcgaaatttaatctcaaaaaatatccaaaatctaaaaagatgaatttttgggggatttccggtaaaggtctaaatggaaagtaatagaagattattgtccatgattttgtcctctttttgagcatattttagaagttaacagtcaaaattaaataaaattcaacgaattattttatccaattttctgttaaccctcagagaaaaatgcattaataatccatcgaattctattttattaaatattagtcaccataaaaacatatttttggaaattaaagtcaaaaagtaataaaaaatatgaaataaaattcacgatttttaaagcaaccttgacacattggactgttaaattcctaaaatatgccttgagtccatccaaaagcccaagaaataattaatgtcctttttttaacggcatttaccgaacatttcctagtgaatcgttcatcatttttctattttcaagaattgtcatttttcaaattttaaatagtaccacataaaaagatattttaatgaaatgttcggtaaatgccgaaataaaaaggaaataaatctttattcagaaataaggccccttttaaagcctattttagaactctacagtccagctaatggcaatttggctaattatttggacaaatattctgttaagaatcagcgaaaaaacggattaataatgtggagaaattattagacgtcatattcattattagtaaagtaatattttcgaaatttaatctcaaaaaatatccaaaatctaaaaagatgaatttttgggggatttccggtaaaggtctaaatggaaagtaatagaagattattgtccatgattttgtcctctttttgagcatattttagaagttaacagtcaaaattaaataaaattcaacgaattattttatccaattttctgttaaccctcagagaaaaatgcattaataatccatcgaattctattttattaaatattagtcaccataaaaacatatttttggaaattaaagtcaaaaagtaataaaaaatatgaaataaaattcacgatttttaaagcaaccttgacacattggactgttaaattcctaaaatatgccttgagtccatccaaaagcccaagaaataattaatgtcctttttttaacggcatttaccgaacatttcctagtgaatcgttcatcatttttctattttcaagaattgtcatttttcaaatttttaatagtaccacataanaagatattttaatgaaatgttcgggtaatgccgaaataaaaaggaataaatctttattcagaaataagccccttttaaagcctattttagaactctacagtccagctaatggcaat

SEQ ID NO: 9251 - DNA, 687 bp, Heterodera glycines
cccatgacgattagtggctacttagacctgattttcaattggcgatattttgacggtgccgaaacgttcggcttcaaactagtgttggtcgggatcgggaccaaaacacggacaactgagtaccgaagtcccagttttgacaagttttgactgagtccgggaaatttccgggtttttcccagttttccaagccaaaaagtcccggttttgcccaaaattcccggtcccgaccttccctacttcaaactgaccccgatcccggggacctacccctcccccccccccttcccccatcccgcgcaacataaacttgaagacttaggtgttaccgaaaacaaaatttgttgtatttttagaaaaaacgaaaaagaattttttttttcttgaaattttcttaatatttttttctcgaatcaggctagctaacgaaaattattatttttttaaattatttttttaaaattttttgttaatgaattattggcggcccgtcaatctttgctgatgatgatgactctttatttcatttggcattgttttgtttaggcatttctccgtgccaccaccaccaccgattctgcttctgtcagttaccaaattcattttcccgtttatgggccaacgccaattgtgccgtttgagctggtgaatgaacggacccaagaaaagctgacattggaggaagaa

SEQ ID NO: 9252 - DNA, 1820 bp, Heterodera glycines
ggtcaaacgtcaaattcagcggatgtgaattaattaattgagcaatgacagccgatcattttgaatcactaaatgatggatgggaatcgatttgatttgatgctcttttatctctttgaaatgcttaatttttcttgcttatttttctttaaatttgactgattttcattttaattttaactaaatatttcgatatagtttaatttagcttaactttatataatttttatgcgaatttaattcaattttcaatggcatcgcccgccgaaaaaaagaaaaactttcctccgccgaccattgcttaatttcttctgccaaaattgctgaaaatcagcagcaatcgttgtcgggttcatcatttgagacatcatttggaggagaacagaagaagaaaatggaaaatcgaaatttgaagagggaaatgtgagagaaatgataattattaattaaattgaaatttaatttaaatcagtattatggccaaaaacatacatcacaaaaatgggaaaagcggataaaagtcaaaagcattaaaaaaccatgggttttccagtgactgaccaagacccagcgcaggatttcgttgggtcccaccagtccgcgtttttttagaaatcatgggatttgccggagattaatcccgcggtattacgtcccgcaaaaaattgagttccaatacggcagtgatgagatccgcaaattagaaattacctaactcttggcaggttgcctgagggctggtccgtccctggccctcatacgttttaccaatgaccctttaacatatttaaatattttttaattaatgtgaattttcaccgggctaaagcctcgcacattctgatgagaggcccaagccgaagccagaaaaaaatttagcagaggtgaatccgaagattttttttgttgaaaattatgcatgttttgagatttttatttaaatgaaatttacgaatagatttaggtatgtcaaatctgctgacaaattttcacattttaagttggatttgcagagatgtttggatggacattttccctcattttgaccgtccccaaatcggcctcaaattggcacttctctctcctcgttttgatgttttggtggacacacattttgatggcaaaagcgaactgacagtttggagaagtgtcgaaattcgaaaagagacgcagtctaaaaaacctattcttcttgtgcgtatgagtgacggaggatttttgaaatttgcgctgcccgacagtccgctgcccaacaaaatccgttttaggaagctgtatattatgtaatttgaaccttcgaaacccctaattaattctggatacatgaattttcaggtacactgaccattccgtcatcgaatttctccgtgccaatcagcaaatatttggcaattccacccatttggctttgaagatatttccatcagcggcagaaggaaccggtgttgtgaaaatttggccgcccattattgtgccaaacattcgccacttgcgcgcttccgcccgtgctgatcacttggacaacttttgtcgtctcattttgccaacaattctctctgatcttgctcaactgaattcaatcggatccttggtcatgttccccgacgcacttgctgatgatgggccaactgctgcaacttgttcttctggccaagcgttgtccaaatggttgcacacgccgagaaaagatggccaaccgaagagattgcgttgctttggttattattattctccagcagcaagagaatttgagtggatcaacaatttcaaagaggttgcttgctgctcggcgctgaactgaccccgtctccggcggggta

SEQ ID NO: 9253 - DNA, 1444 bp, Heterodera glycines
  unsure (1)..(1444): unsure at all n locations
aaggtatcatcaaaagatcatttgcctatcatccgttttttctgctattcgagtatttcacccatttcaatttcggccgcttctttcttcctcctctcaaattgctttcgcagtgatggctttattctgataaagaaaaaactatacctttaaatcacaataaaataagtaggcagaaaaagaagtacaaaatttaaattttaatcctaatttattataatttaaaattaaaataaaataggcaaaaatggtaaatttttaaattttagtccattatgataatttgaagttgtttaaaggaatatgagtttgagcttctcaatgggaccgtatcatctatattagctacggtaaattcacctttcatatggtcgctccttttcgctcaaaatctcttcctgttttctcatgtcttggaaaattacccattcttcatgtgaaacacagccgaccttagttgcaaattccaattcgtcaacgtcaaagatccgacgagccgctggattttcctaacggagaaacagttaatgaagccatgaaatgcaaatttaaatgctaaaacatttccaatatccagagtacctttttcaattgaggcttttttgggtcggggtaagtgtatttgcccgtcttgagtagaaattcatggcgagacatgacttggtccaactcaagagtatgccaatatttgctttctgccaattcgcccggctcaattcccatgtgaaaataaatgtactgcaaaaaatggaaattgatttgaaaggaaattttgtcgcgaagaatagaaataattcgctcacctcataaatttcctcaatttcttcaaaactcatcaaacagatttgaggactgttgaccatcagtttctttaagtcgtttaacgtgaagaaatccaaaatattctcccaaaacatgtccatttgctgaggaacccccatgaaaagtatctccggacatcgcatcacaacacttcgcatttgggcacccgcccgaacgccgcggccaaggaaaatgctcagccgttgctgaacacaatctgccgacaattcttcgagtccgctcgcccatctgagaaaaagcgattattccagcccaaaatgttggcactttcccgacgataaatgacatacttcgcataaaatcgcatggcgtcttcataagtcatttccatacagtcgacaaatacacccaacttttttggtcgtttctcgcccattttttgtcaacgccataaaaagggcgacactttttgaacaagcgtcgatgataaattccaaagcaacgcctaaaaaatagagaaagctttttcaaaacatatgcaaaaaaaacgctacagattacaattagtttagtgaccgaanaagcattgcagtttataaatacaataaatgtctctattttgcccgaatcccggagattgatcactctctgtttcaccctg

SEQ ID NO: 9254 - DNA, 2802 bp, Heterodera glycines
tgtttaagaattacaaacaataatggaagcggtcggaaaaaccacaggacgaactgtcagaagtgttcaaaccaaatacagaggcgtttaaaatgtttcaggtcaccgaattcaatcgtagggaatagtccccgctctgcgtgatgtatcgcacccatggcagtgcctggtagccgcttttctcgatgattttgaggtatcgcacttgaatgcctgatttgatggattattacttacgtggttaagccaaacattggtccactttttgcttcgctcacccgatgtggtgaaatatggaatttcaaagcgcactttgatcggacgcttcgcctcaacttcttcgctgagaacggacggaagtttaaagtgagcgcgcattaaatattccttccctccggggaaatttttgatattccacacaaaagaattgtcctaaaaaggaaaagtgcgaagatcgaatgagaattccttttgctcttccccacttccggttggtaacggcaatttccgatggccgttttgaagcgcggactgtccgaataactgggggccggcacgacaatttcgacattattcgctgtcgaacgtcgcttgaactgacttttggccttcaaacgcaaaagcataaaatattaagtagttaaacaaataatttaaaaaataataattattttttaataataatggtaacaaccttcccatttgaccttactttgaccatatattcaacacgactgtgcgaaaatttctcaattacctgtaaaattaagcaaataacaaacgcaaaaccaaattaattaccgcttcgacccaaatgagtggtttgacaattgtgctcaatcttggaaaattaagaaaatgcaatatcagtgcggggtgtgtgtacctgtaactcatcagttcgaattccccgtcaggcggaataaaacttatcgtacgatcattttcttaattaaattttgtttttttatacttttatttgtcaaattaccaaaacgcgaaagcctcacgcattgatggaattttatgtctttcaattcgacggctttgattctcccccctaaattactaattgggatttatgcttcgttggttttaaattactcccagccgcatcaaattggaccttaattaatttgtattacaaaaagaacaataataaaaataacaattgaattgaattaaaagaaatactttgtcattcaaacccaggcgcaattcgggcattccggtgagaaaaacacgcattttgacggaaccgacaatttcactttgcaacactgtaccggcgccacttgccttaaaaaagcttcttatcgcgaataaaaaatttgttgtcctgaattattaaaaagaaaaaatattaatttcaattaccagaaggttcaatgattcgatcacgtcaaggaatacctttaaaaagaaaaaaacgaataaaatattaaaaaaagaaaaacctcatttttcctatgtctcacaccttcggacctaaaaacgacagccaatgttcagggaattattcaagagttgataatgtccttttccgtcctcatcattgcctttttggcatttgtatgcaaaaccaacctccacgagacggcgttggtcaccgccatcgggggacgcggctgttgcgcggcctccaatttgtgtccttcctgagttatgtacctgaaaaaaatgaagaacagaaaaagacaaatagaaaatactcgcgcaatattcgtccttcggtgatttgcggatagccaaaatccatcatttctttaaaagaacgaaaaatataaattaggaattgggtatttaataccgtccaagagctcgtagatgatcacaaaattgtcacgaattgattcctcctcaacatccttgaaatattcggcaaaaacagcaaccaatttgtataagaatgtttgcactaacgacacgttggtattgcaccgggacacagcaacaacttaattcggtgttcaaaattgacccagaaataaacatttgcttcatgatatgtaccataaatgttattgaaacgaatccaaatcatgtgggtgccactctcaacatcgacgacgggtgcaagttgaccctcttcttccagatcgaccaaaagtgggacgaatttctcgataacaacagtgtcaacatctccccttcaaaatcaagacccaaaaaattgaatgatatttgaatgactggctaaccggtaattgcgtgaaatgagcacctaaaaagtgaaaacacaaaaaatgaaaagctttttcttcaaatggtggggggaactgatccagaggggggggagggggggggggggggacgtacacccttattaactgatggtaaagacagaaatgcatctaaattagataataaatatttagtttccaattttcacgaattatggacaatatattattgtacagtaatcaaagcacaaaatgcattcaaaactccacaaacatcgacaccaatcacaagtaattccctccccgctgattcatgggcacattttttttcttctgatcctttgcaagggcttccttcaactgtttgttttcttcctccaggaatttgacacgctcttccaggaacttctcacgctcacgccgtttgttcctcgactgcttggctgcctcgttgtttctgctgggcctctccaaataccgctgtttttccaattctgcgctaaaccctttgctcgtggcagagttcaacggtggcgtattgtttgaattcaaaatgttgttgaaggggcgacgacgaatgtcaccaccgctctctcgcggactcaaactgtcggcagat

SEQ ID NO: 9255 - DNA, 1590 bp, Heterodera glycines
  unsure (1)..(1590): unsure at all n locations
ataaaaagtagaataatttaanttggaaagtaaaatttcatgctttttatagaaaacaaaatccaagccccacatcgcatggcttttttcgcgaccgatgggatttaaataccgaagccgacaaccaaacttataatccttatttcgtcattattttcgccacttggattttgagaaatttcttaacaaaatgtggtggaaacaaagtttaaattttctgtaaaaacagatataggtgtgagcgaaagtgcaaattggaaaagcagcagcgccgatttgcggggtcgacattttgatggatgttctgctgtttgactttttatcatggccaattatcattagggctgggaatttaagtcaaatgactttttttgatgactctaaatggccttaaaatgacttaaaaagtgttctaaactttgtttgaagcttctaacatgcatttttatgacttttttacactttttgggatttttataacttttttgagttttttttttgcgaattttccgtgattttttttaactttagcctaattttttaggacttttttgcattttatacgtgcttttttggggttttttttattttactttttggctattttttcaggacttttttcaatttttcatgccttttttatgcctttttggcgattttttatgacttttttagtcgactttttaagctttttcgtgccttttttccccagctctttagatgaaatgcaaaaaagaaagggaagcataaaacggtgaaggaaataaaaggacgcacaaatgcacacgtcacaacacactctctgctcactgtccgaggatggcactgacagtgggggagagacactcgtaaaaaggcaaccaaaaacaaactcaaccaaaccaccaaacgcaacagactgaggaggtcaaatcaatgccaagggacaaatgtccccacaaacaatttatgcaatgggagaaaacccatcagatacagtaagacgacgttgttttgatgtacggcaaaaccaaaacaatgtgtactccgacttttgacaaaaacaagcaacgaaaaacaaccaaatatccagcaatggtagttttgtggtttcttcgaaaaataaaattaaataattccgaagtgcattttctaggctaaaaaaaatacgctgatcacgaatctgagctcggattttgcaaaataattggttttgtctatgattattcatcaagtacttggctttttcagaaatttcatttttattttttctgatgaattaggggttaaaaaaatgcgttgaaaatgaatccgagctctgatcatgcgaaatcaatgtttttgtctatgatttttcatcaaatatcataaaaaaataagcctcagccaagcgggctcgaaccccggaccacgcgtctcatatgacccacaaaggattaataactaaatttcaaaaaaaaacgtaaaaaactaaaagcttgacttctccagaccttcaataggttattcgaaatccctttttatgctctacaacatctgtgtatgagttttttacgcccgattttattttaattaaatttttgaaaaatcaagtacttgatgaaaagtcat

SEQ ID NO: 9256 - DNA, 1919 bp, Heterodera glycines
tttgggccataataaattcaaaaaaattgaattgtgtatgtacctcagcacaaatttcgtcaaacgatttcaaatttgatgcctctcgtgaaatggaattgctttggactgacagctgacgacgtccaacggcacttttaaagtcggatggcattttcatcggattgaactaaaaattggcattttcagaacagtgccaacacagtttctcctcattataataaaaccttttgcaaatcttttccggtcgccaaaaagtgaaacgaacgagaaaaggacgacaatttagaaaaagagcagcgattagcaagcgtattcatattgcaaaaaaaaacaactgcagaaaaacggatggattaattttgaaaattaaattttaaataatgtaaaagtcggaatttggcattgacatcaggccgagataagaataccgggatggaaagttcatttttccggaatttgagtaccctgagtccggtattcaaatcctgcttttgctggggtcccggtcctgagccgtttttaaaagccgggatatgggcccagaaaatcctgcgggatccaggtcccatcccggctctaattagcaaatgattattgaaaacaaaaaaggtcgaaaaaaagttgaaaattttaaataagtttaaaataaaacgccataaatttgatttcccaacgcaattttcaaattgtaattgaaagtaacaaacccaaaatttggccattttttgtctaataaaattaaaaacaaccaaatacgcccgcttttgactttcattgcataagcaaatctgtgccatttgctttttgccttctctaatccaaaatttcttcattgattcttcatcatccccaactctctctcttttttggtcatttctttatcaaattatcatcattatcatcatttccatcgcttggcccttatcagcaaaaagtgcgtgcgcatgggccagcaaaacagcagagataaacgaagccgacgaggcgacggcggcggacgtacacaaatcggtggggggagggaaacggcggagtaaacgaaaataaaaaattttgtgcaaaattttgttgctaaaactataattataaaccttttaaataatttgcgggaagaatgaatttctcaaaaaaaaattaaaaaattaaaatttttggccataaaaattttccaaatcgcaatttgtccaataatttgtgtaaaattttgcaaattttagtgaaattaaaattcgtttttccaaaacaaagattcaatttaaaaaaaggaaattttacattttttaattgttctacatttcatccttttaaattttgaaaatttaaaattttttcatttttttaactttggcaagggaaatggacgccgacaattcgccgctgttgcagaacgatgccgaaaatccatctccaactcgtgtggatgaaattttgaaccgactgaatttgccaaggtggatttaaattattaatttaatattattaatttaaattattccaaaataattaattattttattttcatatattatattatttatagagcgtatattatttttttatgatttaccatttatttctgaatgcacattgttaaaaaaattaaaacactttttaaaacggggacggagcaaaacattgccgccgaaattttaaaaacaaatttcaaattcgaaatttcccagaaaaacatcttagaaaatttcttataaaaaaatttcacgaaaaaaaaattggaggctaggcctacgctttaggcctaagcctaggcttaagctttagggcttagactgagagattttggggtgcacccatttaaaactcagtgatgtcaaatcgaaagcacttggcaaatctccaacattcggttgattccttggctttttgttcctaaaatttgaaaaaaaaaattcacaaaa

SEQ ID NO: 9257 - DNA, 1629 bp, Heterodera glycines
tcaaaaaatggcaattttaaattgtgaaatgccaatgccaaaaagaaataatttaaacggcgccgaaaaatgcctttccctcagggcggaaatgcggtggacgcggcggtggccacaacattttgcatcggtgtgatggacacgcaaagttccgggcttggcggcggccatttcatgaccattttcaacgcgtaaaattctcctccagggggatggggtagaaaatttttgaaaatttctaaaaaaaatttgacagtaccacccgaaaatgccacgtggtcgacgcgcgtgaggtggcaccggctgccgcaacggaaaacatgtacaaggaccggtggaacaagtcaaaatttggtacggtttgtcactgtgtgtgtgtgtgtctttttgtgtattgtaatttggctagcaaatttgttaggtgtacggtatcttatcaatcaatttttatgtactgtatatttgattctacatgatttggcttaattatcttttataaattgtgtatttggctaataagcatcaatcataatgggtgtatggtaactgcagtttttgtatatacggtatttggcacaacaaatactgtatttggttaattaatattttaatatacggtaattttgtaattaaagcacatcgtttctttaaattaggttgggaagctgttgccgtgcccggcgagctgcacggcctttggacagagtacacacattttgggggccaagtcagctgggaatcgattgtccggccgacaattcgactaatggaggagggtgagtttggattttgatgatccaccgtatcaaatttaaatgggataatttgtcatgctgcaagaaggataagcctgataagcaaatggaaaagcttattgttagttgcgtttttcgatatttttttttagattttcgatttatttttggtaccataactcagtgatcggagaacaggtgacaaatacaagcaacatataaagcccaagaaagacatgccaaaaatagtttttagttttttttttaaaattaattacatttgcaattttttaaatttttatcccccaaaactctttttaaagtgatcggaaatgcatcaaatttttaaacccttcaaattttaaatgcattaaatttttgattagctaataggtaaaaagtgaagctaatgattttttcgtgttttcattttttgaatgaattttcgatttaattaatttctttttggttatctatcggaagagcaacacaaaccttttatttaagccagggttgccatcgtccatactccgtttccaaggacgggtatgccgatttgcaaggacatagtggggaaaattcatgaaattcaaggacatttaaaatttttattatatgcaatgcaaaatggttaatatttattcaaatggcttgtatttttcaccggaattgtttttttccaacatttttttgttttcacttatcattttcttcatttacgacgacttttttctgctttaaaaacgctttttttgtggcgcgctttttccaaaaattttgtgggacagaggggggggggggggggtccggcggtgccgacaggcgccgccggggaaaaattttgaaaatttgaatgcaatttgttaaaagattt

SEQ ID NO: 9258 - DNA, 2061 bp, Heterodera glycines
  unsure (1)..(2061): unsure at all n locations
tcttaaattggtcggaagcgcaccaaatttttaaaccgctattaagacaaatgacttgctttgcctgaaattaggcatccatttttctaattttttaggaccgttatgatgtacaaaaattggaaaatttgcctatcaatttatcaaatacttttttttgttttgaaatttcgtgcccttttttccatggcattttctttggctaggctatccgacatcgcacgcgctggcacatgcgttggagcagtacaaagcacaggtgctcaacgagccgaccatgcgccggcactttgtcaacccggcaacgggcgtggtgtacaagctgggcgagcagatcaaaacgcggacaaatttcatcaacacactgcgcgggttggccaccgcggcggaccccgtggcatttttctaccgcagcaatttgacgcagcaaatggtggacgagttcaagcggaacggtgcgggcgggcggcattttaatttagtgggggcgggggagggcggtggacgattgctgatcaagcactgacacactgatctgaaaattctgcaattaacaaatttggaggggtggggaattgattgggactgcccaaatgcgaaagtcggcattttgccgcgcgagccaagtgccgaaaacagggaaacgatctcgagactgaattgatgccgagcatttaaccccgagaattgagttcatggaacgaattttaaataccgggggatgattcgaacggctcccgttaattgacccgtgagtcaagatcgagagttttctccgagtattgagacagagaaaatcgactccgagactccaaaaaccagcaaaatttctcgactcagtaacctagattctcgtatattgtcaatcaattcaagaaaaaggctccaagattactttaaacatttatttatcgatttttcgatcattttcccatttttgttaggtggcattttgacgatggacgactttgccaattatcgtgccattgtccgtgccgatgccgacatcatttacactcaattagaggacggtcgcactgtttgcgggcctccgcccccatctggtgccgcggtgacacaagcaattctgtccattttggacccgtcagtgatttgacgcatatttatctatatataattttcgaattgtttggcgcgagggtaattaaccaactaattaccccactaattgtatttgaaaataaacgaaaccagaattgtaatgtaaaaaatccgggaattcctaacttctccctcttaccgtataactctcaaccacaccgggccaaatacggtacatacaagcattctctgattactgtcatggtatcgttcaatccaaaaaatcattgtttcaaaatactttaatttgtaataccgtattaccgtaccaccataaatttccactccgttactgtaccaagtattttcagtatcgtgttcaacaccagcaccatttctggcaacgtgggcttcctccaccgcttcatcgaggcatccaaatttgcgtatgcggcacggagttcaatgggcgacatggcatttgtgaagaacgcgacggagttggcacggaacatcaccagcaagtggtgggcccagttggccaggtgcgttttgtggggctgcactttttaaaaaatatttcagcgattttttgaaaattttttgaaaagtttcgaagtgaaatttaaaaaaaaattttcgggatggggggggcgaaaaagccgctcctgttttgtggcaccgatcggagtcatcccctgctgatcaggtagggacaacgttgagaattccatgatcatgggatgatttcaaaatggcattaatatcattcattattcattcttcaaggtccaagatcagctggggcacacatccggacgactattacggtggcggttaccaagcgctgcccaacgaccacggcaccacgcacatcagcgtggtggacaagcatggcaacgcggtgtccatcacatcgaccatcaatttaatgtgtgtgtttgtgtgtttggccaanatttaatccaatgatccaagttgggatgctaattgatcatt

SEQ ID NO: 9259 - DNA, 2731 bp, Heterodera glycines
  unsure (1)..(2731): unsure at all n locations
caagtacaaaggaaaagcccgagaattggccaagaagaagtttaatgagaaccaacggcagggattgagggacttggtcaaagctgggctggtcaacggttcagctgaagacattgcaaatttctttctgacctgtgatggaatcaaaaaagtaaatatattgaatgtctgatttttagcccaatatcttttataaattttcctttttcagtccgcaattggcgatttccttggcgagaaggacgatttcaatttggaagtcctacaacattttgtgcatctccaaccacttcggtcgctgccattggtgcaggcaatgcgtgggtttttgtcgcgtttccgcttgccaggcgaatcacagcaaattgaacgcatcatggagtatttttcggggcattaccatgtccaaaacccgggcatatttgagcatcaaggttggtaaaaaatgtttcaaaattgataaattgcaattaacttctattttaatgcaatgttagcataaaaccctatttttgaagattggcatcatactacgagcagaatataattttttgctttttcttcagacaattgctacaccctttgctacgccataataatgctaaacacttcgctgcacaatccgagcgtaaaggagcgcatgagtttggacaactttctaaacattaccaattcattgaatcttccgccggcactggttacggttggcaatattttttgttgctgggcatttaatatgaacaaataaaaatttaaaaaataaatggttaattctataaaaattatcgcaaatttgtttaaaaaaccgaattaatgctccttttctgtatgttttaattctaaaatttaaggacatttataattccattcgctccgaagccttcaaatttccggacgacaatttgcaagagcatttctctgccgctttgtttcaacagtcggagaagcagggctggcttgagaaacaaggtggcacaaagccaaaatatgcaattgtaacaacgaacatttgtttatttcttttcaggcagtcgttacaaaacgtggaaccgtcgttggtttttacttgccaatcgttgcctttactattttgaatcgcccagtgtaaaaattttgtaaatatttgggttcaatatgaaatatttcagagtcgagaacccaaaggcataattccattggagaacattagggttcgggttggtttatctaaaatgatacattttttatttctgtttttatttcataggtacttgaccaagaaatcgacacgattcggcgagcgcatgtgtttgaactttactcaccgaacacggaggtgatcaaagcgtgcaaacagagcggagagggacggcttttggagggacagcacagcacttaccgagtaaaagcgggggaatgacaaaggcacggacggcgaaacagggcactgacaatgccatgtttttaatttgcaaatacctaatagggaataaaattactaacaataaataataaattattagcattcggcgttttcttttagtccaattgccctttaattaaaaaaatattctttctttttgcagatttctgctccaaacagagaagaaatgcattcgtgggttagcgccatccaacgcagcattaacaaagaccaacacattgaagtaagaaacgattaatcatcggcaaagccttttatgaattacccaaaatcccatggatggatttttaattgagtctctctgaaaaaacacatttaaaaaaactaataatagtaaatctttttcaaatcaataggatgtgcttgaacagcgacgaaggcgaatcgcaagcggtggctcattggtgggaaaatcatcggcggggcagcagcaaaacccagtcgacgtcagtggtcagtgaatgaatatactgtatcattaactgataataaagcacgtccaatcaacaattttttaaaggttctctgctaattccccttcatggtggcagtgattgatgaaatatgatttatggaattgtacacaaaagcgttgaattgaattaattgctgtcacttacctttgcctttgagtttgtttacgattcactgtcattaattatttgttttttatgagctgaactcaataacacttttgtaaataaaatttcacttttgaaacctctcattcttaataaaatccacatcctttcatttaaattgttcttttattttgtgataaatgtgtgcaatgtaaaatgagaacgtatttttatttgtttgcgtttcaattaaattaaaattggtagagaccggatattttggaaaataccgggaccatggacttgccgggataagaaacctgggcctgagttttcatcaggacataaaaaaattcgagatttattgaattttttaattcggcacctgaaaattattatgtaatagtgatgctcggagtcttgaccccgagacccaaaagactcgaaactgagactttttcttaaaaaattatacatttataaatcgaaaaaattttctgtaaattaaaaaaaaatcatttttatgggcattcctaaaaaatgtttttctctttgttttttttgttaaaaaaattgtttaatcttttttttacaaataaatgaagtcttcgacgcatggatatcgctgtcaacggtgggatataaaacccacaataaaaacggagtttactgagagaaagcgcgagctgtaatttgatttgacganaatattactttcaaaccattt

SEQ ID NO: 9260 - DNA, 1616 bp, Heterodera glycines
ttatattatataagcccattaaacaatagggaattttcttgaaatgtccagctgtgcgctgtacgtcgtttgcacacctctgttttgcgacgttcgattgctgtgccaatgagtcgttatgagccgaacagtcgccttccttatgaaaagctcgatgctaatttggcaatcattcgaaaaaggttttttttttttactttcggatcacaaattcctgtgaaaagcacatatacttcgaaaacccatttttaaatctccaatttctgcattattgaaattcttcaggttgaaccgtcctcttactttggctgagaaaatcatttactctcatttggatgacccgcaaaaccaaaaattggaacgcggtgtgtcatatctgaacttgcgccctgaccgtgtggccatgcaggacgccactgctcaaatggccatgcttcagttcatatcgtccggaattccggcggttcaggttcgcacactcacaatcagagactgacacgaaaggctttctatgttcatttttcaggtccccaccacaattcattgtgaccatttgatccaagcgcaagtcggaagtgagaaggacctttaccgagcaaaggttggccaatttgatggatcaaacattactattattcatttaaattccgaaaggagtttattattagatagttattctaatgcgataagagcaactattgtattgctaaactgctttttaggagatcaataaggaagtgtacaactttctcagctcctcttccaacaaatacggcgttggcttttggcaccccggcgccggcattatccaccaagttatcctggaacactacgcttttcccggtctgttgctaattggcacggactcgcacacgccaaacggaggttcgtgacttaaaaaaaatacctttcaaatatgacaaacattttttaggaggattgggcggaatttgcattggtgtcggtggtgccgatgcggttgatgtgatggctggttttccttgggaattaaaatgcccaaatgtcatcggagtcaaactgaccggccgtctttccggatggacagcaagcaaggacatcattctcaaagtgggatgaaaatttaatgatatgatttgcaaattccattttttaaattttttttttctttgcttaggtagccgagattttgacggtcaaaggcggcactggggcggtgatagaataccacgggccgggcgttgaaacaatggcatgcaccgggatgggcactgtgacgaacatgggtgccgaaatcggtgccaccacttccatttttccgttcaccgattcaatgggggactatttgcgcgctaccaaccgaggagacatcgccgagcaggcgaagaaatactcaaacttgctcacgccggacccaggctgtgagtacgacaaggtttgctgttttctcggagttattttacttcgtatgtaactttttttagctaatcgagatcaacttggacgaactggtgcctcacgtaaatgggccattcacacccgacttggccagcccaataggcaaattgggtgataacgcaaaaaagaatgggcctgtggaagaggaaagtgggcctgatcggctcatgcacaaacag

SEQ ID NO: 9261 - DNA, 1134 bp, Heterodera glycines
tgatcggctcgtgcacaaacagttcatacgaggacatgtcacgtgctgcaagcattgcacgacaggtcaatcacataagaacaaggattgaaaaaagcctatttggccaaattataacaaattatgctaacaaaaacaaataaactgaatttctcatttccaggcttccaaacatggcttgaaagtgaaatccatcttcactgttacgccaggaagtgagcaagtgcgtgccaccatcgcgcgtgacggcttcatcaaggactttgagaacattgggggtgttgtgttggccaatgcttgtggcccgtgtattggccaatgggaccgaaaggacgtgaagaagggcgagaaaaacaccattgtcaggtctcatcgctaaataatgccatgtgcatctttaactgggtttataatcaattagtaaattgtaattcgtcagttcttacaaccgcaatttcaccggacgcaacgacgccaacccggccactcatgcgtttgtcacttcgcccgagttgaccattgccttggcgttggcgggcactttggactttgacccacgccatgacacgctgacgggctcggatggtttggaaatggttcaaaagggaaaatacttaaaaggcaatttcaggcaagaagttcaagctggaagaaccgaaaggcgaatgccttccggccaaagggttcgatccaggcgaggatctgtaccagccggcccgtttccaaggcgacgtggtggtggacccgaaaagcgaccgtctccaactgttggagccattcgacgcttgggatggcaaagacctcacggacatggttatcctcatcaaggtaatgggacaaggggtttaatcaatttcctctgataatgagtttggacaagccaatttaattataaatggtttaggtcaaaggaaaatgcaccactgaccacatcagtgcagccgggccctggcttaaataccgtggacacttggacaacatctccaacaaccttttcctgactgccaaaaacgcggagaacgacgaattaaacaaggcatgacgaaacaataatatataaaatatattttattgtttccttaggtgcgcaatcagtagagcggcgagtggggccaggttagcgagaccgcccgc

SEQ ID NO: 9262 - DNA, 3159 bp, Heterodera glycines
  unsure (1)..(3159): unsure at all n locations
agggaaagaaaaaaatacgacgacgtgcaaaagcgtgaagtcatttcagccaccaacggacagacgagcatggaaaggaaatagtgcatggctctttggaaaagaaaagagtgggcctggggagagagtgtccttgtccttccacacatattttttacatctctcgcccattttccacctcatctctcctttcttctttcaattgcctgtcaattggactggctgcggctctttaaacttacctggctggggagttcctgcgatcacaaaggcatggctcctgtggcgaggcttcaccattgcactgggggctgacccgcagggcggtcccgaactgggataggcccacagctaaatttttgagtgtgggggacggcgttcgcgcctcccctttaaaagatttgcttttattttggatttggactgttcaaaattaccttcttcttggtcttaattctctaagctttcgattgaaaccagcaatgtttggattgactaagtagtaataaaaaagttgtatgacctaaaaaaatgagaatggtcactgattggacgcgttaaactggaataggaccaaacttaattttggttatatttaatttaaacggaattctgtgcgtagcaagtgtgcaggaattttaggcatttgcctaaaattaaagccctaattatcacatattatttttgagtccgacattttcctgataatttttttatcaatttttatttgttcaatataaatcaatacaataataatacataaacaaaaaacaaaaatggcaacgtctcatgaaataaaaataataataatcattaaaacaaaaatggaatgatttttacaacaaaaaatagtgaaaaaaagatcgaaaaacaccaaaaacattagcggcagagtgaaagcgaatggcaattggcaaaaagtgctgaggctggccgatcagtagtgatcagagagattttgtaaaaaaaaataaaaataattttttgtatacacatgtccaagcagggcgaggtctgtaatttcatttattaaaaaaaactttttttatttttatttccatctatggataataaaatatttgtttgatagaatttacaaaaaattgtatacttttgattgatttattgattaaattttttaaaattatttttgtttattttgataaaaatgaatataaatttctcttccatccttgggtctgatcccttctgcttggacatgtttagccaagaaaagaaatttatgccaaaatcggactttggccacctccttttccatctgatgactctgctcactgtgccatttgatcagctgttcctcgtgtctgccacatctgatcattgattgatcattttattattatttctgatcactctaattggccattttaatttgcacttattattacagggctcccatcgtccatcctccgtttccaaggacgggtatgccgattttcaaggacatagtgnggaaaattcatgaaattcaaggacatttaaaatttttattatatgcaatgaaaatggttaatatttattcaaatggcttgtatttttcaccggaatggattttttccaatatttttttgttttcatttatcattttcctcatttccgcgcacgtgagatcaaagttcacctgcaccagtagcaacgctttgactgattcaacttccaatagatttctttctttggtccattgactgcttgccagtgaaaaaactcgttccacgaatgcgttggatgtcggaatctttaaaacaaaattaattttaaaatttgaaaattgagcacctcatattggtcacaaatttcatgaaattcggtgtgtctttgcgttgatcctttgaaatatgaagttaatttgtaaacgacggactcaatgtcaaattgcaattgttcggcacccttttttgctgcattatgcaaaatatgggctgaaatttttaaataagaagaacaaacaatttaaaagtaaccggaacagccaatcggaatgatattttgcctctttgttttgagttttgcaaaaacattgttccccgtcctaccctcctgtaattgttgtggcacaccaaaatttgtcggcgcattgtcagcacaaaaactgatcaaattcttaaagtccagctgatgtttttccatggacgaacaaatccaatcaaatagttgatcagcagtctctccaggcaatgaagtcatgtccaacattcgggtcctgagtcccaatttgccattgaaaaatcggatcacaatcggaacgagttttttttcgccatgattacttgcgtcaatgcaaagtgaaaatggttgttggcccaactcatttttcagaagttccattgaaaacgggctcagaactcctttgttgaaaattcaatgaaatttttgatttttcaaaacctttaataattgctgcagttttcatctgtgccgacccatatcgtttcgcaatctcagaatcagagaaaacttctttatacaacgttgatgaacaatcagttgacgcaaacgattgatgatgattacacacatggtaagcaaaagtgcctaaaaacaaatttttacacttaaaaaagattaaaaatgaccctcagccgttgcaacttgaaggtcaattgaattaagtgtcgatttggatcgaacaaaattctcaattgttgtgcttttacgccgttcctctttaatttgcttatgttctttgttttccgtgtgcgactttatggccgaaactcccatcgactcgacattgatgtctttttggcaaaaagcacaataaaaaaatccattcccttttcggcttcttttgacaaaagtatattgcttttcccaatcgggattgaaagaacatttgcgcttatttgggaacattctaaaatataaattatgtcgcaaacgcgaaaaattgcgtaacaaattcattcacaagcatgagaaaatttgaaaatttgcattttatttacataatgccataaaataatcaaaatatcgttgaaaattacaaagatttctcaaatttctttgaatttttttaaaacttttctaaatgttcattttcaaggacgtccttggcatccaaggacattttttattttcaagaaagagggcccaatttcaaggacgtccttgccattcaaggacgaatggcaaccctgc

SEQ ID NO: 9263 - DNA, 2213 bp, Heterodera glycines
  unsure (1)..(2213): unsure at all n locations
ttttcaagggctatctctcagaacgggtccggttttctctccaaggcttggagcccgtcatggntcggggacatctccttgaggaccctcagcctcgtcccgaccctgtcgatggccaacctaagctaagcttgccggtaccagcggcttttttgtacagctcgatgagctctacaaaacggtatcaatggcgtcaggctatgtctactacaaatggataaaattggcgagaagtgatgtcaaaaattaaataatttgaaaatgacttgcgtcccgccgtacattagtattaaccggactgcaccgtgttttgtgacttgaataattaaatttatttatttaattttatcgatcactgatttttttgtggaacgacctagtaacaccgaggggaacaacttggtgggggggaggagtgacatccattggatatttctttatccaaaataattcatcattttttttatcaattttcatattaatttctgtcggcatttatttatctttttttgccagtatgataaagaaatttttgcagtaaattttttttaaagcgttctgtgcctaagtcattttataagacagttatgtttggcattttctgacaatcattgctgataaaagcaaataaagttttgaaaataaaataaaaatgcaatataaacaaaaattaaaaatacgcgaaatggaaattctttctatagcttttattataagaaataattcgtatttccaatgacatttttggctcagacaatggtattatgcaatataggaaactacgaatttattgacagaaatattaaataccaattatttgcttaagcttcctttcccgaatctattataaaaacaataagttcctcaaattgtaaagcatattttttttggggtccaatttaaatgcggggatagaaatacactggtaagattttgataaaattaactatttttgatttaaaatctgataataaaatattcgaacttcagagaatttttactattaattcaagaaagttttaaaatttgaccaaaaaccgcacaaaaaaacaaagcgattcaaagaagtattttaaatattcaaacatttttctcatctttcttttccaccaatcatttccataaatggcaacaaattgtgccaactttcagaatgggtgtttgatgtgtgccgaaatgtcagagtgatcattagcctcttcttcttgctgctcctgcttaacttgacgaggcagaatgccggcagcgacgagcatttcatagtcgggctggttgaggtcggccaaattcattgcagccatttggcctgatttttgtgggaattttttaattttttattctcctcagataaaagtttgtgtaaaattatgtggcaaatttttcaggaattataagggttgtcagatgtaaattcaaaaagaaaaatcagttggcatgccaaaagcttcatttcttctcacaaagctttttgaagaaaaaaacggtgttgagaagtgcctccggggaaaaacttgaaatttttgtctaatttgttttttagaaatttatttaaatattttaaaaaatcccttcgtctagtgaaatggatatggacggttggcacatttagggccgtccattgacgccgaaaaatgttgaattggtgcccttttagtcgggagcaaaaaccaatgttcactttggtttacattagaaaaatgttatgaaaattatatttgtcaaataaaaagtgcaatactgaagtctggttgaaaatttaagagcctcacttaatgaaattttttgatttgctaaatatttgtattaatttgtttgttcagactaatgaatttggccaaaatttaagctaaaatattaaaatcactaaaaaatcacaactataaaagatgagtaacttacttttgcttaatcattggataccgcccgagcggatcctcaggcccccccccccccccgcccttcaaaattttgaaaaaaaaaataaaataatagaagactcagaattttgaaaattttttataaaaactgatgacaagctaatgtgataaaacaggttaattcttttcctttcagtatccctgcaaagtttggggcgcttctgataagtttcacaaaaaataataaaaaattaattttgcaaaaatcaataaataatgaaccctcctccttaataattttcctgcgcccatggtactcactcggccgcttcgcgg

SEQ ID NO: 9264 - DNA, 1678 bp, Heterodera glycines
tgaaaattagccaatttataggtcaaattttgaaaattttacgggaatttatccctcattcataggggtgtaatattcgcgttccgcgccaaaatgcgaaacgcgaaagtaaagaaaaaagcgaaatttgcaaccttaggtcaaggcttttctgggaaacttttggaaattttgacagatttttaagaaatttgcaatattatgcactcataaaaaactgccttaacatttataattttagcaataaataaaaagttttaaggaatgagaaaggatattttcattggcattttatgcaatttatggagtgccaaagtcttatgattctcaaaattcatgacattttgagtgattccatccaaccaaagtggcaataacattaacaggaaatgaataaaactgtaaaaaacaaaatatgaaaatgagggtaatttgtagggatgtcaaaattatctacaaaaaaatggtcgaaatatgtacataaatatgtaaaaaaaatctcgaaatatgtaagaaaaacacaaaatatgtaccaaatatgtaaataaaatttttaaattgttattttttgaaaaaaaattcttcgtagaggtaagatagccacaaaatgtaacctaattaagtcttattatcaatcatcttttagtatttaaaaattaatttttcgtatttataggggtacattttcaaaaaaaaatgttattctttcacaagaaatttctataaattttcaaaaattctaaaatattaaaaaaaaatgaaaatatgtacgaaaaatttgccaaaatttttatttttttttgaggatttccaaaaatttgcataaaaaatcctcaaaatatgtaaaaaaaatgaaaatatgtcagaaaaaagtccaaaatatgtaccaaatatgtataaatcatgaaatatgtaaaatatgtataaaaccccgaaatatgcaaaaatatgtaaataaaagtcccgatttttttcgcaaacataggaaagaaagtgtttttcctaatatttagaccatgaagaagccaggaaaaaaatatgtctttacataaaattggcatccctagtaatttggggttgactttttccagggaatgggcaatgaaaaaaaaagaaagacaacacaggcttaacctcaatttatttaaacgtttgtctattatcccaatttctgtcattaattttcattcagacccacaccccctccattcttacaagtgtatatttttttattgccgtttttgaaaaaaaaagaaattacgggactgggaactcaataatcgggatggatttcccggatgagaatgcccgcttttttcccctcccaagcttttgcaatttttgaggatttttaaaggaaattttttattaaatgccccgaaaaaatccaaaattttacaattttgtacatcttttcattttttacatatatataaagtgagaaattgaaagtgtatataaatttcttgtgaagatttttaattattttttttttgaaagtatacctctaaaagatcgatttttcaaaaaaagagataaaaataataatttttaaatactacaaaatgattctatgcctatttagatgttccttttatggaattttgtgcctatttcaccctttacaattaattttttccaaaaaaataaccatttaaaaattttatttacatatttt

SEQ ID NO: 9265 - DNA, 1977 bp, Heterodera glycines
ggtacttttctgttttggggcctgtaattgaatttttttttaaatcaactacctaagcgtttaaaaactacgcgccaatttcgagaggcataaatgccacaatttgcaccattatttcctcaaatactcctttcgttaattaagttctgcagtgagaacaaatatttgtgcaattttgcgcaccattgtgatcaaacaaacaaacaaaaaaaaattcaaatccaggccccaaaaccgaaaagcaccgcatacagttatcaatatcaataatttattcgcaaaatactcagattcatatcacataacaaaaagcaggattattgttccaaaaataaataatttgactaccataatattgggttggcacaaaaaatgaataaatttttaaaaatcaaaaatatgcattgaactttgaacttttgccaaaaatattgtttctttcttcgatcacatccatccattgttattactcatcaaatcaatctctcgccataaatcacacgggcggcggcacgcgtgccgaagcgacggcggaagccgatgccaccaactttgttgtctttttgagcaaattgtaggtgcggtaaatgatggagtagaaccaggcgttcaaagcgacgtcaatgcccacggtggcggcaaagaaaagcatgagggaacgaaaattcatttctgaaataattagtgtacaattagcagcgcgacaaattaaaatgtaattaattttgaaagccatggggatgtctgatttgtgatcagctagctatcccaaaaactctccgagaactgtttttaccactagaaatctttaaaatgcgcccaaaatacactaaaataaaaaatattaaaaaatcctgattttcatgcttctttaatctggtcaggaacaatttttcaaaatcaaaatttaaaaaaaaacactttctgcagcataccaataaaattaattattctttttttcataagtaaactctattcaccctgttccttagtagagaaggcttgctgtggagaccaaattccaaagataaacatagtcaatgagatcaccgctgcgcataacaagccgatgcccttaaaaaacaaatcgattgaacttggcggcatattatgattgctagaatccggattttttggccgggcttacttagacaactgatcgggccaaggcagcccggaaaaaagccatttaacatggcggtccgggccccaggtatttttttgaaaaattaccggcccgggctcaggttgaccggtaaatgcctatcgggcgcccgagcccgttcggtatccaattaagagctgatttatggtgatccccatttttaaaatttatttaaaaataaactttcatttgtctaaagattgttttatgtaaatcgaaatttagtgcgtttcaaaatttttttcgaaatgtgtgtttttatataaatcacctcgaaaatcagataaggcaggaacagtgacggctccttctttttcatggcaataataaccgacagatagaaaagagacgaagccaggtacacctgtggacaaatttcaaaaaattttttgaatttttattcctcaatcaattaattaatttaccattccggcatagatgttgtgaaagccaacatagctggaaattgcagaaagaattccgagcccaaatccgaacaatgccatcacagtggttccctcaaattaaaaaaaattaattaattaaattaaaataaacagtttttaccgtttcaattctggtgcggaacggtccccaacaacatgtgtgacgattggcgtaatccattcaaaacgaatattttattttgttttttgtaaagaaattaaaatatttacacaatttatgggtttaagaaaattttacttaatgtgaaaaaaaaattccttgaatagtgaatgtaaaaaagcacttgacatgcccatatacaggtgggaaatgacggaaattatgaaaaaagtctttgttgtctt

SEQ ID NO: 9266 - DNA, 3164 bp, Heterodera glycines
  unsure (1)..(3164): unsure at all n locations
ggggggggcaacgaanncggcggttttgttagtcatccaaacattttctgtacgggcagcgcatcgtttgtcgtgttgaaatgtatggggggaattgaggtgatgatgatgatgatgaggaaggatgatgatgattatgaggaagatgggcaaaatggaaacgaaaacggatggatgactcatcaaaatgaggaattggacaaaattgcaatttctacatgggcttttgaggcagaaacaaagtaccgtcttttgatgaggaggcaggcgcctctgttttgccttgcccttgttttcgtggaaaagaaaagagatggatgactcataaatcagcaaaatgatgaatttggatgtaattgcagtttttacatggacttttaaacctaggggtatcgactttttatagtgcctgttttgctagccttgttttacgtggtaatgaaaatggaacgatttggataaaattggaatttatacatgggcttttacataaacttagaagtatcgacttttgatggggcctcccttttgccacccacccttggtcttcggccgaaggcatttgtagtattgaaaaggatatggaattgtaatgataatgatgtgatgaaatgatatcgaaaaaacatggattactcaaaataattgatgttcggcttccgatagggcctgtttgctagccttgttttttcgtggtaacaaaaacggaacgaatttggataatattggaatttctacatagactttttacacctaggggtatcggcttttgagaaaaatgatgaatttggaagatatgtattacgaatttttaaataaagatttgtttatttgttatcgttgttgaaaggagttttgaaacgagggagagatcccggctttcgtgtgtatgtcttgttttactagctaaaagatatttattttttttatttcatccaattcattcatgcaaaagtgccatcagttgaagtataaaaggaccttgttgtttttaaaatattaaagtgaaattgtaaaaattgcgcaatgaaaaaccgatgatgaaagaaaatttctaagtgaaaaaattttagtgctttcttacagataaattaatgcttcccgattattaatagcttttaaacttaatgatttagccaattacattttctttcatttttcagccatttttactttttaattgcctttttttgatattatacgtcacttaataaacaaactttttttttataagtaaaaattgttatttaaaaaaaattaattaaatatttctctcctccactcatatgtaaattagaatttcacgctccgattgtcttttaatcaacatttgtttaacattgccaactgtgcttcctaaatatgtaatttttatccattcattcagaaaactcattagcaccattttggtttagctttaaagctctgaaaattattattttttcaatttcataattttattcacaattatttaatttaacttgttttaatattaattaagaatggagggcaaaaaaagttatggaggcgtaaatggagcatttatggcaataaaaatacattttattttaaaattacaaattttgaaatttttaggctctgcgaaaaagaattccaacttttccatttgaaaagcgtctctccaaaattgacacattgaatttggcggtaatttttaaggcattgggataatcggcaaaaattaattaggacaataattatttttcgtgaattaattataagtatatttggaacattttaattttttgttccattaaagtttcttgttgttcattgaattatcaaaaaagcgtggaaaatataattttttaacaatcctttgcaaatatttttcatttggagaggaaacccaaaaattaaaaataattaatatatattttttattaaacaaataaaataaaattggcccactaaaattgccgattttccaacgccaatttctaaatattatattaatatatttttaaatattcaatttaagtgtgcttacatcaatcttctcgatgtttgtaatgcttgtaaactattaaatttttctcaaatttttatgtcattaaggaaattttggccactgaagagcatccagctgtttttctggaatactcaattagtttggcaaaatatggcgggaactcagcacaaactatttggggcacaagcggtaattattatgaaaaaattgaataaaaaactcattagtgggtgaagcgttaatttaataattaccagtgattagcgggtgaagcgctaattaataaacaatctttgtttgctcattaatctccttcctcttattgctctgtttctctcccatcctcccactttctatattttttcatgctctatctctccttctatatagctctttaatgctctctccacttttgtttctctctcccatgtttctctctcccatgtctctctctcccactctctctctctctctctttgtttctcactcactcactcactcactcactcactcacgcactctctcgccctcgttctctctctctctctctataatattctctctcctctctctctgtataataatgtgttgcaaattgttttaaccccattctgctgctctctcaaattttcttacccagccttagcgctaatgttattttttaattcatgaattcaaataattaaataaaaaacaattaacaaacaatactccagatctgctttctcgattggactggatcaattggaaaggaatgggaatggacccgcccagaacatcatctcaattttaaatttggcttcataattttgattattcataatattgaaaacaaataacaaatttaacatttcatccttttttatcaagcattcattggctatatgtagtataatttgccaaataattcatagacaaatcccgaatcactttttttcgatgatcaatcggtcacctcaaaattggtgtctctacttctcatagcagtaatgtttgggcagcagtgtgaacgtgcagaaggggtttcgtcggaaaatttttgtcggatttccatttctcagatagtaatgaaacatgaaatccggctgtttctttagtgcctgaaaattaaaaaaaaattcatttattgccgagaaaacaactggcattctataaaaaaataaaataaatc

SEQ ID NO: 9267 - DNA, 1696 bp, Heterodera glycines
ttttcagtttatggccaaagaaattttgaataaaaaataaaagggccttaactgtgtgaagtatgtatttttaatggcaaaaattttgaattacggcatttttcattgcagaaaattgtataccttcacggtttgctgcttgctcatatggtgccagtgaatttgctccttcaaaatctgcaaaataaaatttgaaaattaaattttccatttttttttgcctgatttcgttgttttgcattcagtgttgacacgacagctcctaagcttattttgctatcagaattttgcagaaagctcagcagaaaacaaaatgcaatttgtaaaattggagtatgcatttgataaaaataattaattaattagtaggggacaaaaccctggaaaaaaatgcattaaaccatgtgcaaaaaattacaaaatttgttccgtaaaatttatgtacaaaattgttaaaattatctggatgacaaaaatttatcttcttatgaaaaatttatttttgtatattttcggtatgaaattatggttactgtatttcttaattaatttaatgaaaataaataagattaacattttatgaagatttgtttaaccctaatactaaattatttatttctcagttaaatttaaataagaatgtaaaattgagttgaattgaaaatttttatatttcagttaaatgtaaaaatgtacgaatgatgtgagaataaataaaagttccttaaaatgttatcgactttaaagctgagcttaatctgcatttgccgaagcccttgaaaaaataaatccccacaaaaatatttaatatgttgtgccatactcaaaaaataagataatccatgccaaaacataaattagaatccgaataaattttcactagaggcaaaacttttgcatatgaccaaaatggataagaggataacatcatttttctcaaaaaagcacaattaagtgaattttttatgtcattaaaattgaaaatatttaaaaatgttgacgaataaaactaaatttaacttggcaaaaatgaaaaatatgaagtatatcaaaaaaaaatttaattaaaaattatattattgaaaatgttaaatacggatcatttgaaggaaatctggaattcttaaattgggtctgatattccgtttgtgtcattttaaacgatgtgatgcataaaatttggctcacaatttgatgcttttgaccagttttgttttttctgttcaaaaaaaacaaacacaccactaaagaccataattgatttctaaataaaattattttaaaaatttttctaaaaatctatctgggacacacacgaaagtttgtggccaaaaatctcaaaaagtgaccttttctggccattttggcgccgcatatcatacatcttttttggaacggaatatgctaatagagaacacttaaacatattgaattatatcaaaatgtaaaaaattatgacccttttaaactggcggcgccaaaatgtcccgcgccaaagtgaccccccacccctgctgaagcgggtcagttctgtctgagccaagtttagagcatcataccttttttctttgatgaccaaatccaataaacttggtatcattcgaaagctcttaacaagttctttcggctttccgaaaatcaaaatgatataccgacatgcaaaaaagttataaataaaaatatgcaaaaattctga

SEQ ID NO: 9268 - DNA, 2779 bp, Heterodera glycines
atcatcaatcatgtcagagcacataagagcgaaatcgatcgaattcaactgatcaagatcagtgagaattgtcggtgaagtgcggcgacacaaattgtccaaagcatcgccactggtaaagcccaactggcgaaggtttgtcgcaaaaattggcaaaattgtatagtttttgatttactgaatctgaaggaaacaaaaacggattttgttgggcagtggttggtcggggaacggaaattccacaaaagtgccgtcgatccgcacagataatttcggctttggtccttcgtccttgtcaattctgataattctccaaattgccaattcgccctttccatcaaaatgtttgtccactaaaatgtcgaaacggtcggaaagcaatgccattttgagtcagagttgagcatggtcaaaagatgggagaatgtccatcacacgtcgcgcactttttgcgacaagcattcgccatttgagctttcacgatggcgatgctttggacaacttgcgcagtcgcacttcgccgacaattctcactgatcttgatcaattgaattcaatcgattctggacttctattacccgatggaattgctgacgatgggccaaatgcaactgctggccaagctttgaccaaatggttacacactccgagcaaaaatgggcaaccgaagcaattacgtttccgtgcttatgtgagtccaccaaatttcgaatgcgtcaacaacttcaaagaggtgtcctgccatattttcgtcaatttgtttttattttaccaattttctttagacattcgccgtgccaccacttctgtcagttaccatattcaattttatttttgggtggacacaatgccaactgagccatttgaattggtgaacaaagtgacgaaagaaaagctgacactgaaacagaatatcgatgaattcgacttaaatgtgtgtaattggttgttgcaacggtgcccaattggggagacggcgacggcgccagttaagtgggaaaaccgcgaaaattcgggtgccaattttaactatatcagatttgagctgtggtatgacaataattcggatgccaatttgaacaaaatcatatttgatttgtggggtgaaaatgatggcaatcattaagaattggtgtcccgacgaaaaaaaatgttaaaaatttgtcgggtattttttctaggcttaaaaaatgcgctgatcacgaatctgagctcagattttgaaaatcattgatttttatctaagattttttgtcaactacttgattttttcgatttttaaagttattttttaaaaaaagtttagcaatgaatttgggttaaaaaaatactctgatcacgaatctaagctctgactatgcatgaaccttcattttgtctgattttcatcaagtgtcataaaaaaaaataaaccgcagccaaacggactcgaaccccaggcccccgtctcatacgacccctagggattaataattaatttcaaaaaatcgtaaaaaattcaaaacttgacttctccatacatttaatagatcatttgaaagctctttttagtatcagttttatgtccgactaattttcttaattttggaaaaaatcaagtaattgacaaaaaatcttagataaaatcaatgattttcaaaatctgagctcagattcgtgatcagcacatttttttagcctagaaaaaatacccgacaaatttttaatagtttttttggtcgggacaccaattcttaatgattgccgaattgattgcgagttggtttcaatgaatgaatgcataaattactgacagaattgaggctccgacgaaatgcacaaataagttcagctaactcaacaaacggaccagtcgcacttaacatccccttttacagatttaacacaaaatataaaataggcaaaaaattcattccctttgccgggagggtaacaaaattatggaatcaacttgataaagaactaataaaaacaaattctttaaatcaatttaaaacaaaacttaaaaattcattagggtaataaccggaaaagcaaaaacagaattaattttttaagtgatttgacatttgtgttatcgatctcgattgactttgacctcattttattcatatattttgattttattttttgatcatccatatatattatatcacttactctacgacattctatctgaacagtcgtcagagtaagtggctttttgcccttctgatgactttttattcacgaataaatgaataaataaccagtgcatgtttaattctacgtttaaggcaaccgtaagaattgactaaataataagaatgccaggtttccatataaagacttgttaattttcaagagcatagaaatttttgagcacaagggttgttaaatttagtatattttaaggatttatataccatgtgatgtatgtatattgtgttattgttctgaaatccctccctctggtgcccgaacttcccggtgcccaaatttttggtgcccaaacttgctggtgcccaaacttcgcggtgcccaagggtcatgggccaataaaagtcgatattaaaggctttttatatgttagtgattgcaggttatttgaaaaagaattcaatataaggaatgtagagaataatagaaatagggtggaaggaagcggttgggggtttcccgatgtctggttatttgatccgaatgggataaaacatatggcattttgttctgcgaagttgtgatatattttatattaattatattagtttgggatcacccagaagctgtaaattaatag

SEQ ID NO: 9269 - DNA, 1455 bp, Heterodera glycines
ataaacaaataacaagtcaacacaccacacaccatccccaaaacgagagatgaaccaataaatagagaatatagagaaaaatacgtctctcatttcgcgtactatttctttagtctgctaatcacagcgagtcaattgcaatcgatatggagtgatgggcaatcattaagaattggtgtcccgacgaaaaaaaatgttaaaaatttgtcgggtattttttctaggcttaaaaaatgcgctgatcacgaatctgagctcagattttgaaaatcattgattttatctaagattttttgtcaactacttgatttttttcgatttttagttattttttaaaaaaagtttagcaatgaatttgggttaaaaaaatactctgatcacgaatctaagctctgactatgcatgaaccttcattttgtctgatttcatcaagtgtcataaaaaaataaaccgcagccaaacggactcgaaccccaggcccccgtctcatacgacccctagggattaataattaatttcaaaaaatcgtaaaaaattcaaaacttgacttctccatacatttaatagatcatttgaaagctctttttagtatcagttttatgtccgactaattttcttaattttggaaaaaatcaagtaattgacaaaaaacttagataaaatcaatgattttcaaaatctgagctcagattcgtgatcagcacatttttttagcctagaaaaaatacccgacaaatttttaatagtttttttggtcgggacaccaattcttaatgattgccaaaatgatcccattgggtgagaagcaacagcaatttttgattgccaaattaattaattttaggccattgtcgccaccagcggaagaagaaaacgtagaagaagaagcggatcaaagcaacggaaatgtcgtctgattaagtgtacggaaatgaataattaattatatttgagaaatgatctatctcaatttgtttgtgcatattttctctctgaaatgcctttgttgattctttcgtgccaattaggtatataaaacataggtagattttttccttgcgtatcaattgaatggctcctggaaaatgcgtcagtgatagaaagtatcaatattcctgctgctgggattttcaagatcgctctcactggcatctatttcggcaaaacccggaccacggaccaaaattcgaataaaaaaccgacagctcaaatccttgaatttcgtatttttgtttgtcaaaagctgcttaaatacacggaaacaaattgaaagcattaattgctgcatttacctaagcctttttatacgaaaaagactaaattcccaagtttggattttcgacttttgtttcatcaaatagagagcaatttgggttgattgttttttgacagattcggatttagaatacgatttgtgggctctgttgcagttcacacgaccataaaaaagacacg

SEQ ID NO: 9270 - DNA, 1164 bp, Heterodera glycines
  unsure (1)..(1164): unsure at all n locations
tcagtgcaggactaagatttacgccaaaaattaatttaaaaaaaaatttccgaggccacctgccaaggccatccgtcagggtcgccaagctcactgaatgtgcccggacaatcattgccaaacaggcacaaatccttctgttgcccggtgtaattgtagaacaggttgagcatggcatgtgccgccatcgccagaccgtgctgtgaacccagccttgtcgagtaggctttgcacgcctcctagggggggtagaaaatgaaattttttttcaaattttcggggtttttcctcatttaccttaactggccatcctggtaacggtgctaagaaggtggccgggtacgggtagtcgaccatggccaatgtctgaaagtggcgattgatcagtttaaggacgagagttttgaaagtgattcgctccgagatcactgaccatcgatcacattttcatgaacttttggggactgatcagaaagtgagagacaaagatttaatattgaaaatagattctaggcccaattattttatagaacgtttttgggaaattgatcacgaaaatccagttgatctcttcagcattcggagtctgatcggagcaatgatcagtgattaataattaaattaattaattaaaacaattatttactaatttttaattaatgaacccacctccatcacatccttaacagaattggccaacaaatcaccgtccgacgggcgttccaccaacgcttttggcgacaaacggaatttatcattcaaaaagcgacgtccattttctgatagtgtaaaagattaggttccgttaactgagtctatatcaaaaaatgaaaaaaaaaattaaaaattaaaattttcaaattattttagcaccatttttgaaggaaaaattagcccttttctcaatatttaatatttaaactcagtaaattttgttgtttttctgaccaattttataagaatttcgtggagggaataaaatttgaaaaaatatttaaaaaatcgaaattttcaataattaaaaaaaattattctccaagccgcaatttgcatgaataaaatagttttttgttattgttttaacttacgatacccggggcaattttttagggcatccgggcctttaagaattaaataaattcggngattacagggattttcttt

SEQ ID NO: 9271 - DNA, 2790 bp, Heterodera glycines
aaacacatttataggcatctgaaaatgtatgtaaaaagtaccctgtaaactgtataagtactatgattcataaaaattccaaaaaaaattcatggcgctgccgacgcgcccaaaaaaacaaaaaaacggagttttcttttaaatttttttttttaatttcaaatttccatcaactcattctctgtttcagcatgtgctgccgttgtgcgacctggaccatttgacggttggcgttgacgcccaggtgctctgtttccactccaagcggcgcatgaaattccgctgttcgcccaaccaattggccaccgttgccggcaccaaccagcaacaacatgagcaacgactgttggcggtggagacgggcagccgccggttgggcaaaaccattgcgcactgtgtacgccgtgcggttgtgctgcagcacagcgtgtggctggaacgagagcagcgccgccggcgacaacaacgacagcaccagctacaccggcgtggctctgtcgccctcgcgaacggcggcgtggaggaggaagctgaggtggcggagggtaagtctgtttggtaccaaaaaattggcacttttatggaaatttgcaaaaaaaatttttgagaaatttgagtgaagaaggtggtggaggagtagataaaggcaaatcaacatttttctcttagcgaaaattgttttaataaatatcaacattgacgttgatatttatttaatatcaacataacattatgccatcaacgtaatatcaacgctatttttaaaattgggataattttttaaaatttaaagcaatttttcaaaaatgacttttggcggaaaataagatggggagagagataacgcaaaagtgagagggtgttatattcagccccagtcatacaaaagcatttttggtaaagaagaataaagaaaaattaattaaaaagagagtgttatgggaagagatttaagacagagagagaatagagaacatagcgaggaatctgcgtctcttaccaaaagaatcagcgaagaagagacatgaactcccttcccattgcgctctctattgaaattgttttctctacctccttcatcaaaaatgttttgtatgactgggactgagatccagcactctctcatttttgcgttatctctcgcactaaaattataaaccgctcatataaattttaaaaaatgatttgccattctctacctagcagcacctttactacaatgtttattacaataatgtgcccacctgtcttggcaaggtctcggatcgcgtccatgctctgtttgatgctctccacattgcacccgctgttcacaaatgttcgggtcacaattttgtcatacgcatcctccggcggagttggcacattgaggaaccaaaacaccggcgcgctggccgcaatgccactgaaaatgatcaaaatttgaaaaaaaaaattggtatcattagaagaattataattagagagatatgataagagatcaatgagtaggaatcacgaccaaatcccgatcccaaaaggcaattaattgagtgatattttatagactctcgactcaacaattgaaaagcttttaatattaaaataatttttgcaccagttattaactgaaacaaaatttttttttcaaaaagtctaggacaaaaaccttgggctcaactaacagtagttatggaccggtaccataactactactgacggtcttaaagtttggcattttttttatttcttgaattcaaaaaatcatacccgtccatgaggtgcgggtatttgatgcgcatccatgccgtcaacattccaccgtaagacccgccaaatccaatgaccggcgaatgtttggcattcggtaatttctgcaatatttatagacaggataatggtcaaaatgcaaatgatttgatttgtttgattgaagaatcagggaaacagtccaattatgagatcattcttctattttcccgcccttatattccaatattactttttgtgatcggatacaaatcgaaaactaaacggaagccgatcaagcgcattaattataatcccagctgcacagcgggctgatcaagcggggtgatcagagtcagacattcaaatgccaagcagatcaagtgcaatggtcaaggccctaactcaaaaacccaaagggaactgatcaaagcgcagtgatcccggatccaaaatccaacgggagctgatcaatcgcagtgatcaaagtcccaaaggattgtcgcccacctcatttttcaagtagtcgatcagttgagcaaagtcggccaatgcttgttcagagctcaggtagcccaaattttccaattttgtgtagctctcattgccgaacggttgcgttttgccgtaaaagcgatgctccgcaaaaacaatggcggcgccaaactctggcgcaatgtcccacatgaagcccttaatgaatgtgatcactgatcagattgttcaatcaagacaacatttttcggcaaaaaacccctcaaaaatgccaaaaattaaagccaaaataataaaatctccaaatcaaggagagacttcattattacaatagatcactacagatcagagcaggataattgtttttggccaaacaataccgtatcctcgccaataattcttaccgtattctcggcaaagccctcaatgctgccttcgttgccggtgtaaaagaaaatgggcgcatttttatcacgaaaactgtccgtgttcaaaagatatctaaaaatgaatatttaaaatattaaagtcatcttatgatccgagaaatacataatttttttcaat

SEQ ID NO: 9272 - DNA, 2291 bp, Heterodera glycines
taaaaatgaatatttaaaatattatttttcatcttatgatcctgaaatacataatttttttcaattatttcaatttaaaactaattaggcctcgagattttctgcgtattacgctacgaattttttaaaaattttttgtattcagaggcctgaccgctttacatatttttcatagattaaggtataatttttgggggtttccattattttgagcccgtcaaggcctcattgccaaattttcgtttttttcaaccccctaacccaataaatttaggtttttgcaggtttttcgaacctcagccgaaagctgcgcgggtcgctgaacgaaaagtgatcgatgggcatgttgtcgtaccacagctcttgccatttgtatctgggcgcttctttcagcgcaaaatggcgcgaaaatttagtcaaagtgatcggatcacggcgaatccatggcttttcgatcgccaaaattggggacacaatcagcaaaaacagcaataaatttagcataatttctgcaaaaaatttaatgtagtttagtccccggttctacggggacgaaaagtcggggggatttcggggtcgaggactaactctattaatggaaattattatttaataaaaataataatttatttttgtttttggcagcaaaaaacgggagaagaaggaggtgacaatttatacatgtataagatgatgatgacaaatcgtttctaatttccttaaaaaagtgtgaataacaacaaatggaaaatgaattaaaagaaatgtctatgaaacattccaaaatataataataataataataataattattattattattattaataaaagtatttttataatattttagagtaaatttttgagtaattgctagaaaaataattaaattatttttatataaacatatgtaattattctaataaaaaataattgataaaataatctttttatgaacaaattaattaaattaaattttttataaaatattttagcattaaattatttttattaatattattttcaataaaaaaagcaatttctgatcaaaatggacctacctacaacagagctaatacgaacaatttattctgctgacaaaatttgacccctgccccgaggggaggagaatttttgggagatgagacgggggggcggacaactgttcaccatttccactattcatcagcagcctaatggaggggataaagcaataaatctccaacacatttgacagcagcagcagcagcagcaagagaagtgaaaaagatttataatggagaaaaggcaaaatgccatcggtcaatttttagcaaaaaaaaaatatatatatatatatatatatatatataaataatatttattttaatggatataaaataatcaaaaaatacttggaaaacatttgaagctttcgtcaatcagatcagaaaacaattttcaaatgctacaaagaagggataaagcaattttgacaacagcaagagaaatgaaaaatttataaatggcgaaaatgcaaaatgccaacagaattcgaaccaaaaaaaaatattgaattctcggcctttgattcaaatttggttaggatacaaaaggcataagcttttagcattttcaaaatcccccaatttaaaacagatgccaaaattttttacaaatttgaatccaataaaaattgccccgaagcgcaccaaattttaaaggaacaatatttaggccaactgaatgatataaaaatggaaaatttttctatttctaattaatcatcggcgatcagatttgatcattcagttagcttaacgcgttgatccggatttgttcggatgtgatctatcactatagaagatttagtgaaaaaatcggacaaaaaaaaaattgaaagtatgcataaataaataagatattttaaaagaattaatttttaaataaaatgaatttcaattaaaatttgtattttatataaaattaagttaatttatttgttaaatttatggctctttctgctgataaggaaatgtctatggtttaatcagtccgtaatttatcatcatttttctaatccatttaatagttactctaaaaataaatcaatgtcattaatattttatattattatttatttataattaaatacattataatttggctgaattttataagtttagctactatagcctgtacatattttaatgaattttatcaaaagaaatttgctataacaaattttcaaaaataaaaccttaaaagattttaattgaaaatttcaataatataaataacacgaaaacaaa

SEQ ID NO: 9273 - DNA, 2558 bp, Heterodera glycines
tatcatttgcgttttaatttggcttctcgggtattatttttatttaggtttaaaagaattcttctcagaagtcattaaataaaactaaaaaatatttcattcttctaatcattattattatcaaaaaatacaaatcaaaataattgaaagttcagataaagcaatagatttttcaaaataaagatgccttttcaattgacagttttacgaaacgactcaatatgaaaataaaatgcaaaaaatttcttatatttatttatttattttgaaattcaatggacaaaaagaattgacgtatatggtgcaattaactgatattggattgcataatgaatatgtaatttcttcgcgaacttgttgggaaaaatattattttgaaaacattaaacaaattatttgtcacgatttcttcatactttttcttaatcgtgccttcaatttgggctttttttcggcatatttacgctccaatgacgttatgtgttgtttcattgacattgaattagtctaaaatttgcataaattattctataaattaactaatgaaatttttttattttacggcagcccatacaaaaatctctctttgtcacatgggctataaatcatatgcactaaaaatgcgcataaaatatgcattaaaaatccctcaaatatgctcaaaacccgaaaaatgccaaatattcaataaatttaccttcataaaacaaaaaatgttatcgtaaaaatgcgattttgagccctttaacttaaaacgaaaattttcatttttggtttacaaatcaaacaattaaaatatagaaattatgatttgattggggtctgggacgcggaattaattaaaccaaaagcaataagaccggtgatcagagactgggaaacttggacttttatgtgtggcatgcccaccacaaaatttgactccattctctccacgtcggcacagattgtccaaatggcacggcgcatttcctccaccttttcctccatgcttgtcgccgcttggtcactgtcctccgcctcacggaacggcgacaaacactcggagttgcggcgacgcaaaaatgctatagaaacaaaaaatattaaaataattattatattaatcctttttagaatcgaaaaatagaatttttttcggtgcggagttaaagagcaaaatagagagtcaatagtaacggtaaaaaaaaactcaaaaatcgcagaaaaacactaataaaatggaaaatttcagctcctatgaacatgcaaatttacttttctttcttattttaagaattaaataatattcatttaaataagttttataaggatcaataatgaaaatagccaaaaaagcgcgcaaatcgctgaccgcggtcacatcacaccgttagcacttaactgctaatataaaaattacccatactttccgctgagattttggacaattttcgctcatgtcgttgatgcatttgggtggcttaaagcgaaaatttttaaaatatgcaaattttcacttttttttaaatttacctcttctcaacaccatttttcgtgctcgaggataatccgcaaaaacaacactgaccgcgtcacggctcagcgtataaacagtggaaaagccaacggaacggagctgaagagttaattgtgaaaagaacaaattaattgttcaattaatttattgattaaaataaggtaatttaatttcataaataacagtcatgctctcaaatatattttatgtgaattgtcgatgagaagattttacagatttttcgagaaaaactcgttataacgttttttaaacgaaaccaaattaaaaaattttgtatcaaacgatagctctttgagttttagaattataaattctgagactgtatgtataaaaataattttattttttaaatttattttttcttaaattaaatcagaaaaatttataaatggataagaaaaatgtataattcgtggctcatatattatgggaaaaaagaaaattagttattattagttattactgtgtatggatatcgtgcaccgctgaccaaagcccaatcaccgtacacgtaatccacggataattggcaaaaaaatttaatgtaataaataattcatttatttaaaaaaactatttataaatcaaataaattaatttttaaaataaattttataaatatattatgataattttctctttaattataattataatttcgaaataaaatttaaataaatattaaatttcaaaaaatgtaaatgaatttttaacccatatttataagttaattagttgaattattaggtgtaattagaaagagaaaaatgaaaataattgaatattacatgttttcttctttacctttcctgttcaagcaaaagtcgtggactaataaagtgccgttcggccaattcctcgtcgtaatcgtccaacaccaattccaattttccatgtttcacaacaaacatctcccctaaattaaatatatgaaataaatacccaataaaaaaattattcttttcaaaaataccaatggggtttttataattaaaaaattaaaattaaaatgatttaa

SEQ ID NO: 9274 - DNA, 2818 bp, Heterodera glycines
  unsure (1)..(2818): unsure at all n locations
ttattaatttaaatatttagacttnntaatttgaaatgattaacaaatttgtgttaaatntaattttacttttggtttntattcngccatatattcaaataaatgcaattcgatgctacgaatgctcaacggttttttaatttgaaattaaattttaattcattttaaaaatttaaatttcctcaaaattagttaaattccggtgaccaaagctgcaattactactcgggaacaacttgtggctatggctttttcggctgcgtcaaaattggcacttacggtcaaaaaatttaaaataatttccgagtgccccaaaattaaaaaaaggaatttcttcctgaattagttggccaaaatattttctgataaaaacaagtttaaattggcaaaattcgccccaaaagacaaaaatttttaatcgctttaaaatattttaacagaaaattaaaatgctttttaattcaaatatatagactaaaacccaaaaaagagattatttggcgtttttttattcagatggcggcgtcgataaaagtctgtgtcaattattccttattaaaataaaaagataatcatttaataattttcaaaacaattaaaaagtgggaaatttcatcgacgacccggccgcaattgtgtcaatggtccgcggctgtcaacttttgccgttgggtggcgtcgatgcgtgccaacaacaagtcattctcggttttcgggttatcacttgtaagccacaaaacccaaatttgagaaatttacattctttttttagtaaaatttccaaattttttttaactttcacaagtcacagcgatttgtcattaaattaaattatataaattttattgtctatctaatgaaaaaaaccaaaatccgcttttaaaattaatgagaataattttttcgtagaattggatgaaatttgaaaaaatagcaaaaaatttttttttagatttttctagattttaaaactcattcagattttcctattaaaattctttaaaaaatttttgttagaaactccattacaaactgaccattgtacaaactgcaacgactccgcctctttccacctcttttattttgaaattttctttttggttacaggatattacaataataattttcttgtcctacaatttaaatttcatcttccatttttaggttactgttactcggattactgtaatggtgctagcagaagaactgttggtccattgctgttcaccaacattttcattatgttgtctgtttgttcttcttattttgctttgtgtaccgccattttttggaggcaaatttaaacaaatgttataaaaatgaatttttctgttttttttttgattaaaataaattttttaaaagatttaaataatttttattcccttaatctatcaccaattttacctaaactgttttttgtattttaatgattttgaattttcacaacataaatttatttgtacctttgcaacttcgtctttgccacaaacgatgtccccgggcccaaaacggtggcgttggaggcgaagcgaaagttcactcaaaaggccgcgttcgcagaagccaaacaccttttggcagaatcaaataattatcattaagaatcagtttaatatctaatggcattttttataattttttttatttggtcgtatttaaataaaaatataaatcattttctttgcaaatggcatttcttatgagaatatttttaaaattatattttggcgcactggtgatcggctgagtgcgttcagatggaattcggctgccaattcgcgtgccaaccgcggcggcaacgaatttagcaattcctaaaatttaaaatatttgaaattattggtttttatttttgccacattttcgtccactgtttggccccgatcgttgctcatccattggtattccacccatttgatcactctgtcgtgcatttgatggttgacatggctgagttattcaaaagaaaaatggaaaaaaagtattttaattttaaaaattcataaaaaatgaaaatataagaggagaaaatacaatttaattgaaaatttattaattaattcctcatttaaaatagaaatgtaaatttatcatttaattaaatatttataaatattcgtcaaaatgtaaaaatgcttaccgaatgtgcatgtaaagtttgcagccatcaatgtattcttgaaaacgcgctttggcagaatgggcacgactaacctgaagaatttgaaaaaataaatggcgccaaaacaaaaaaatcaaaccataatgccaacatcgccgataatcgcagcaaataccagcagtccgatcaaagtgtccacaatttcgaacatcgattggacggaattttcgggccaaggcttaaaaagcaaaattataaaaataaatattttttataataaagtcttcgttgatctttttgtcaattaatttttatttatttttctaaaattatcaaatttatatgtatttaaaaaatggagcttttattaaaacagattttttatttttagcattaaaatatgcttccatagtctggtagattaagccaataacacttaatttctttaatgattttattatattttcatttacagtttaaaattctgtcacctgttcacccagtgtaaccaatgttaaggcggaccaataaaagctcattgcatattttttggtcaaatttccgaatgccgtgggaccggagctgaaaaatcatattttaataccaaaaattttattatcaatattattttattttaagttcaattaacaaaataaatttattccgtcgaatatttcatttttttaatttttt

SEQ ID NO: 9275 - DNA, 3486 bp, Heterodera glycines
  unsure (1)..(3486): unsure at all n locations
gccacagagggaacagaacgagcagaagctgaagcagtacaacagcaacgctccccaacggacgacgacggcgacagcaccgacggaaaggcagacggaagcgccagcagtgggggaggcggtgcagcaacagttggagaggcggagacgccaattggtgcggaacggcggacggcgaagcggcaaaagcggaggcacaccacgggcgatgcccaaatttttgcacgcgctgtgctgctgtctccggccgaaagcatacaaaagtgagcagccgagtgacctaactgattagcgtggccaatttgtatttaccatttctagattataaattgggtcccctttttgttgtgtttttcagaaaatttatgacctccccccactgcaaaagtacccaatttaacaactccaaatctgtaaaaatttaaaaaaaaaatggcgttgccgataaactaattgtaagcagggaggactttgttatcacttctctaaaatggttgtttttttagggtgcacttcattcccccccccccgagaaattaaaaaaaatttgctaacttagaaatttttcaagaaaaaaatcttagaaagtttttcataagaaaattctatgaaaaaaaaattttgtgaaattctcagcgatttttctgaaatttttttgaaaaatcttagtaattcaccctaaaaatttctcgaaaaatttttttcttcgagttttcttatgaaaaaactataagatttttttcttgaaaaatttcttggggagtgggacgagctgctcccgttttttaagcgaagttcattctttggtctcctggtttaaccaatgtttgtttattggcctcactacgataggattggcatggttttgtccacttattcaaatcaaatgccttttttaattgccaatttctcacagataaacactacgacggttcgtcgggagcggactttggcgatggccgtggcgacggcgtcggcgtcagttcgtcgccgtccccaatcactcaagtggtggtcggcggcgggggcggcaagcagttccagaaacaacagcagcagcaacaggcggcggcgagccgaacggcggcctccaattccacgaaaatattggtacgccatttttgttaaatgcacccaaaagtagcagggagacggagcaggtcgtttcccctcccccgatttgttcaaatttcaaacagaaattttttcaacataaaaatcttagaaatttttttttataacaaacttgataaaaatttagaaaaaaattttcagctatcttttaaaattttattatgaattaatgtttttttcaaaatttttccaaaaaacccgttttttttgaaacatcaaaatggccaaaaccagaacgaaaaacaaaacagttcaccagatcatcgcaaatttcgcttccttttcttgtcccttgcctggtgtcaaattacaacaaagtttttttctcggtcggttcacttgcgcattgtgttgttgcaggtggtggaaaataagtgatgaaaatggaaatgggaaagaaatccgtcgctttttctgatcgctgatcagagtgggttttctgatcaacacattgtgagaagtgcgccacttatctttcctccctttctttcccttggccttccgtctaacctttgtggtggtaccctgatcagtcccattaatttggtcatgatttgattgcgtcgtcatttaactgtttttcgtcccttttttcagatgggcggtgaaattcggcaacggttcacttcctcccgccagcagcagcagcagcaagaacagcagcagagaaggcaacagccgcagcaacagcaaagtgccggaaaaggcagcagtctgacggttgtggtcggcggagagtcgcaacaacagcagagacaacaggtggggagtttattttaaaaattttacaaactcacaaattttcaagtttttttaataagagaatttcaagaaaaattaggaaaaatttttcagcgattttttggaaaatttttgaaaaaacaaattgattcatcttaaaatttgaaaaaagcgcttcaaggtcactcgcagtattgttctcttttgacagtcattgagcattatcttttcttcccgaccaaaattacgaaaaacaaattcatttttttcaaaaagaaaattagctataatttaaaaaatcaattaattaatgatagccaatgcgttaaattttagtgttttcctttagccgtcctcccttctcaattcgtcttctccattccttttgccacgggtaaattcatcggacgccaacaaaaattgcctaattgtggaccttgacgagacacttgtgcattcctcgttcaaagtgagcactaatgaattgtatttaaaaacaacgaatttcccttttagccggtcaaaaatgcggatttcatcatcccggttgaggtgagacattttccatcattttatttattcatttatttgtcctttttcaatttcagattgacaatgtcgtccatcaggtggggaaatttcataaacatgatttaatcaacataattatttaagttaattagattcaaactgacaaagaattagacttggccgggttcaaacccaggccttttttgtcaacctgggttttcctcctaaattttaaaaacataaaactcgataattttgaaaaaaagcctggatcaccctagacttggattccatgtttgacctctggacctggatttctagacaaaagcccaggccgaggaaaacccagggctgaatccgtgtccagatcgaactctaatattattattgtcaaaagttcaggaattttccaaaataccgggctctacaaaaaacattcattttcaaattcgcatttccttttttgaaggtttacgtgctgaagaggccccacaccgaccactttttggaacgaattggcgcactgttcgagtgcgttctgttcaccgccagtttggccaaggcaattaaaaacaaataaaattaaaagtttttcacttttgtattattacagtatgccgacccggttgtcgaccttttggacaaaagacgcattttccgctcgcgactgttccgcgagtcgtgcgtcttctacgagggcaactacgtcaaggtgggcaatgatgtgaccaattatagccaattagcttttaattacttatttttcaaaattgttttttactagaaaaagcctctaaaattttttaaaaaacaagctgttttttaatattaggttgggtattttttttaaactttaatattttcaattagtaaaattatgaatttgggattgtcggaatcccccttttaattgtcgttnaactgcttgtcattgtgcccccgtatttccaggaccttttcccggttgggccgcgattntgcgtcgggtgattatcatcgacaattcgccccgccagtacgccttcaccctgacaatncgngtgccgttttttggtgttgctgttggcactttgctttgtc

SEQ ID NO: 9276 - DNA, 3077 bp, Heterodera glycines
  unsure (1)..(3077): unsure at all n locations
tttttgttgttgctgttggcactttgctttgtcattatataacatttcnccctttcagatccgggtccgcacttgggtcgacgaccccaacgacagggaactgctcgaacttttaccgttgctggaggaattggcacgagtggacgacatttacaaggtgaacatggaaaagggaaattcgaaaaaacaaaaatgtcaacaattcattttgggtaatgatggcacgatgctaatacaataaagcttggacaagtgtgaagatcacaacccgctaaaaaatatacacaattttatttgtttgattttacctttagcggcaacatttttttatcgtagcggtttttctttcatatttttattaaatggaaggtgatcaaattttacggtgcaccccaaaacatcggcagaagattttttggaccataactttgttcgttgtcaatcaaattaagcggtttttatgttgttagcgataactctttgtttattatttttctgctaatctcaaaaaaatttcgttaaatttaaagaaagttatggcaaaaggaacaaaaaaaaacccagtttatcaaacttttttttccctgattttttgtacattgacaaaaaattttaatttagtagttaaatagagtttgatgagtgctttcgaacagtaccaagaatgtttaatttggttgagaaataaaaatgttatggtccaaaaattcgtccgacgacattttgtcctggttacgaaaattctaacccttcactctcccccccccaataaaatactggtctgtaattgctcaattagtcgctcattgtcaatattggccacaggccaccggcaccgtgccgccctcgcagcagcctcgctgtctgactccctccgaggacatgctgttgccaccgccgttggcgccatcatcaccaatcacccaggtgttgccgccaccgcaacaacaaaacagcagcaccgccgccaatggcatcagcagcgttcaattgaacggcggcgtcaaagacgctaatggcaacaatttggcaacgacgacaacgacgccgccaatggacaggaggagcgcaaccgaagggggcacaacgacgacgaaacggctaacgatgttcaatcgggtaaacgaaaaaatgtattgcgaaatatccaacttattaaagataaaacagtattttaaatcaaaatttttgatttcccctattaggagtccctcctccgctcacacaaatttccaaaaattcccgctaaatttttacaaaaacaccaaatcagcaatttaaaataggcgatttaaattgaatctgttccttttacaaaatcattgtcttttgtcaggaaaactccgcttcgatgccacggcggtgagaaaacgcacaaccattttggcatgccccgaggcgttcgggttgaccagcgaaaagtgcctgaggcgcgcgtcatttgcttacaacacacacacaagaacaacattcttcaaacatgcgcacatttgtacagaaatatagtcactaccatatacagtaaccgatgacactaccgtaggcaaaacattttattattctccttttctgttcctccaccggtggtccactcattgtcaatgttattaaccctgtcttcttcactgtacttttaccatcggatgtcagccacgccccaaaaatggacaaaatcggaattcgttggatcaaaaatcaaaatttgaatcggctgctggcctccctggtgaagctaatatattagaaattgatttatatgttttattaccacataaacatttacaaatgtattatcctctctctttctctgttccctcctcaaatcccccactctctctcaataaaaattctctgcgcaatttcgtgtaacacttataaaattgatataaacaactttatatacataaataatacataggtgtttaatgcactcacttttgatcacatatttttgtttcttttcccccggccaaatgttcaaaatcattgtcccccaattgtgaatgtgtgcgcgtgtgtttgaagtttctcttttttatcaccatattttttattcctcccgagtcgcgccatcccttttttctcccataatcaccggtgattcgactttcaccccttcgcttccccccccattccgtcattttgtccatgtaaagtgcacaacaccgtcgagacatgaggggccgaccacagatcagatcacttaaaaatgccgtttttgtcgattttgccccgcttttttcgctcgccatgtctctgcttcggctgttgcactaccgttaatccaacgcgattccctccccccttttttgctccctttctctttttcctctctttctttgtcaaatgtacattcagtgcctttgcctccccccctttgacttttcctttttttgtcccttccaattttggcgcaaagtttcactttttagtcttttgtttctcctttttaccggcttattattatataataacaacaaaattattatgacgaataaaaaagtgatgaataaacgcactaattggaaataaaataaaatattttatcgttttataaaaacattaatttgataaaccattaaatgtttgtttgttttttgatggcgtaaatggcaaaaaacaaaactcgagagaacctcgcgaactctaactcggaaaatgcacagtgttataggtatatccctttgttatcttacaaaaaccactgatttgtgagccacacatgcaaatattttttggtacagaagctcacttttgagatggtatgtaaaaatatgaattttattatgttataattgtcggaacaacacatttctatataaatcttgggatattttttgattgaaaaccccaaaaaggaaaatatttatcaaaaaattgctaaaaattttaaaacataaaaaatatatttttataaaaagacaaaaacaattaattatatttacgggatatgcatattgacattcaaacagagaatttccatgctaaaaagatgctttcctgcatctatcaacaaaacaaagctgcagaatgaattaagaatgtataaatccgtcccctataattgagcaaattca

SEQ ID NO: 9277 - DNA, 1181 bp, Heterodera glycines
tggcgatgcatggcactgagttgattgcctgccaaattgagaagactgagcacgggaaggttcatgaaggaaagtgccggcagaatgccattaagcaaattgttgtgaagatgcaatgccatcaacatacgaaagccacggatagctgtcaaattaagcaaatgttaattaaattaattaattacgaattaattacttatttaaccaattaaagaaaaattcaattcaacagtcaaaaatagatttttgcgttaaattttttgatttggtgaatgttatctatgaatcgtcaacaaattgaagtttttatgagtgaaaaattttaaaaaatgggttattccaaaaaacaatagggctgctggaaagaattttagtgaatattataaattaaaaagggcaccgctggcaggcacttcttcgatgacattgtggccaaggttgatcgtctgcacagtgcctttgaccccatcgaaaaaagttttgtgaacagctgagattcgattgtacgacaaatcgatgtctgtgagctaaatttaaatttaaaatagtttattaatttggcaatttgtccattcgtttgtccgttttctcttacttttggcagcctcggcagggaatgttcgaccttcaattcttcgatggaattgttggacagatcgagtcggaccagcgaatggaatcccgcgatggtttccggaatcatttctttgatctgatttgtcaaattcatttcctttttttgtccgctttattttacccgattcccattaatggccaattcctgcaaaacattttccaatcctccaaaagcccctttctccaaaagttcaatttcgcaattgataagctcaagtcgacgaatgtaaagcccagcgaaaaaattgttggaaagcgttttgatgggagttgagtgaatggtcaaaacctaaagaagaagaagcaaataaaatgtaaaaacaacgaaaaaaaaagaatggacctttagcaggccaagatgggcttgagaactccgcaaaagctaaagcaaaaaatttaatcaaaaactttaaatttgattaatttgttattgttttccgcttcacctccatcatttgcgttaaaggttctcattttgttgctgtattacacttttcaccagggggggaggccactttcatttgccgcccctaatgctggaacag

SEQ ID NO: 9278 - DNA, 2398 bp, Heterodera glycines
aaaaaaataagaatcttttgaatgtatgtacaaattccattaaaaatttagaaggccaaaaattcccctacgttttaaaaattaaccaaaaatttttggttacaccccaaaatctcgccgcggaaattccaaaaaaaaattgtttgttgttttttttgaaaaaatagtaatttatcataaaatttcataaaaaattgttgaagaattttcaaaaaattttgtttttctctaaattttcttgtaaaatttttttgaaatttctgcggcgagattttgtcgcgtcgagacttcgggcggcgagattccgggggcgagattttgcacgtccccaaattttcattcaccttactttggaatttttgttgtttggcgagtttgttccaccgtcactggtgttgttgtggttgttgtctgttccgtagtctcttcaataattatgtttttcaacgtcgggaaaacgtctctggggaagtaatcgtactgaattaaacacagttataatttggaatttcattgtattaactaacaggtacaacagatttctttcgtcgtcgaatgtttgtcattttgcccattttatggccattgatcgttgtttcaattgtctcagcaaattggtcggtcgattccttgggcggcctggtgctctgttgctgaacaaatgcggattcttctgctgcttccgtctcctccgatgcgttgtcttcgatttgatcggcggagagtgacttaaaagggaagttaaatttgaaatgaatttcataattattttaggtaattgcttttaatttgcctcaatttccgaaactgtcgtggattttgttgtcgaaattgtcgaatggcgatgcatggcactgagttgattgcctgccaaattgagaagactgagcacgggaaggttcatgaaggaaagtgccggcagaatgccattaagcaaattgttgtgaagatgcaatgccgccccttctgctggaacagtgcaattcagttgcactccgtcgacatggtcaacacatgcacaaaaggcacgcacttggaaagggcacgcattttgaagtcggaatttggaggaaagaaaaagcagtgaaaaaatgaggaaaaagggacggagagaaaagagggaacttttcattttgcgatgtaaggctaaatgggataattttagctaataagtggacagaatgcgcaacacaaagggaagaaaatctccaatttcattttcccattttttatctgagcatgaattgaacatgcttcgagaaatcaacggaaatttgctggtcattcgatcggtgacgtcgtgagcgaaagacgacaaaggatcgaatcggacgaattgcgcattggagagacagtgtgaaaagggagagggagggagagagtagagagagagggaggtgaaagcaaaagcaaaatatgttgggggatggtcagcgccggaggggaagaaacgtatgactaaaagaaaggaaggaaaggggagggggatgaaagggagactcatccatcgtccatcctccgccctttcatccgatgatcccacgggatttgcccccgattccctccggcgatggatgaattggaatgtgtggagatgtgcttctgttacgccgaaaggtcacagaagcggagagggaaaagtatggtcaaaagacaaaatgaatgggaagaaagggtatttatgcaaaaaaaggacaaataattggaggggggggggggaagtgacattataatatgacctgcctgatgaaaatcggtcatttgcggtcagtttattaagggaccattttcgaacattgcgaccagcggcggattcttatttcaatttaaataatactaaatatgattaatttaatactatttttttctaattaattccataaatttttttaaattaattttcagcaaatttttcgatcaatttttttatttgttcaaaattttattatttcatttaaaaagaatatctaaaagaaaaatggaagtgattaatgtgttacattaatataaggacaccttattttttgttagttcccatgaaccgatcgagttgaaattttaactgtacgtagcgattctgaaaatattaagattctaacagtgacaagacgaaaggatttcggaaaaaaattttatggatttttttccaaaaaaggggtgttacataaatataaggacacttttcaaaaggctgtaacttttagaattgagcattaaaaaatctgaaaaaattcattttagcttagttttttgtacttatcaaaaaagtcatttgtaacaaattgatcagatcactcctttatgttgatctgaaaatcataaaatgacttgaaacccgggaaattttataaaaaaaattcctagtgggctgaaaaaattttttcgtgaaaaaccatta

SEQ ID NO: 9279 - DNA, 691 bp, Heterodera glycines
cccccgggtggaaagaagaaccgtaaaaaacagcctttttattctttttttatgggaccagtaaaagtcagtattaccctttcatccgatgctcccacgggatttcccccgattccctccggctttactaaagcaaagacaaacagaaaaataaatgataaataacaaatatataaatgacggaggaaagacaattaataaaaatgaaatgaaggagagaacggcaagtgacccgaatgagtgaaagggtcaacattaaataaacactatgggtcaactccactgtgcagagaaaagcctagtactatctcgtcgttttcttttttttgtaatttctctcactttggcgtactatctctccggttttaatcatgtaaaaaacaacattcacttcgctacgtttaactttttttctatacgttaaatctataccaaattttgcatatcgatagagaaagaaattaggaacaaaatgtaagggtttttaagagcaaaaaaagggttaactaaaaagttataacggtttctcttgtaaaattcttattttttaaattttagatgggaaaaagaaaactattacctaaaattcacggcaaaaagggagtgaaagagcgtcaaaagaagcgggaggagaggaaagcgcaaacggccaaggcgatgcaagcccgatgggcaaagaaaagtgagtttt

SEQ ID NO: 9280 - DNA, 2433 bp, Heterodera glycines
tgaaaagattctaaatatattatatacccaggtctcgttgcaaacttttggaaccaagttttacgcaaatgtatttttattttttaaattaaaaatgccaaataaaattttcatttaatcttttattttcttgggggggggggggcgagggggaagcaacggcgtggaagaaccagcttctcccatttcatataggctctattatttaaataatatttacatttaaattaatttaaaaataaaatatttctctattaccaccaaaaagaattgtggcgccatttggaatatcactaattgcttcggctgcatttgtacaaatccttgcaaaattcaactgattgctggtcgaaaaacaacgaaaattagcctataaacaatcattataaaaatttatttcaatatttaatttacaattttttcttggagaattcgagacaaattgtgtgatgctttccaaaacataaaaattatttgtattgaaagatttttaaaatcctaaattaaaaatacatttaataaaaaatatttttgaattatttaatcatttaaaaattaaaaagcactattaacatttaattaaatgttcagacatcaaatgttctactattttgtcacaggttatgtaaacaagcagaagcatgcttgtttaattactttgagtctaaattatttgatggtattaaatataaagctaatgcaaacattagactaaaaaacagtttacaccgtaaaaataaagatttcaactaatttaaaaaattcaaattgaataaagacccaataaacaatttaagaaatttgtttttattataattgtatttaatcaagaatttggtgcttaattaaaataaatatatttcaaataaaaaaattaatttaagatttttcactttatttaacaattttaaataaagaatttatgagaaattactctttaattataactttaatttttttaataaattatttaaaaataaaattaggtaatttcaaataaaaaattaattcaaaaaccgaaatttcttagataattgcgttctatttatatttcaaataaattaattcaaaaatttgataattttttatttagtcaattttaattaaaaaaaataaataaataaattcgacttaattattctttaaatttttaataatgatttattaaatatatatatatatataagtatatttctaataaaaattaaataaaaaatcgaaatattattagttattttattttaatacttacttgtgaatgttaaatttttttaacaatgacataattttttgtacttttatagtcggttgaaaacattaaaaaccaaatttcccgctgagtgaacatattgaagccgtttattcagccaaaattcactaataatttggacttacgcagtttggcattttaatggacgcccccatttcgtgacaattttggggttttttctatatttttttttgccacgtgggggccaattatgtctggaacttattgtactttcaaaaagagaataaaactggaataaaatttgccatttcaaaaaatagatattcgggtaaagatttaaaaataaaataaacattagcaaaatttaaaatgttgtggtattattggcggatggcgtaagtgcaaaggatcagcctgcggtgggattcgaacccacgtcccttcctttccgtggaatgctctaaccactgagctacacagggcgccctttgcactcctttcaatcccaactttaggggaaagaaagctctcttcattagtttgagagagtcgcatatcacaatgtaggctttgaattttaaaagtgtacgaatttacgcccttacataattgctaatgagtctctattaaaaccagaacgcatattttaaaattttctttgaatattttaaaattcataaattttctatcatgaaaaatactattgttactaaaaaaactattttacaacgactttttgatttattctgtatattaaatttttcaaaaatatcattaacttttctgtcattgaatcctcgcattaaatgaaagccaaacaatttttttttctaataaatgtctgtcatgatataattacctcccaaatgaatagttttttttgtttttttaatttccgcccaaaaaaggcccattataatttcacgattattaagaaaaaaattgtcccagaatattaaatggtgaaatttttttattttgtttaggtctttctgcgatcccagaggtaccagattttgtgagattttttttaatccaaaatttgaatcgagtaacaatccgcggctcagaattaaaaaataatagaaaactttcaaatttattttgggtgatcctttatggcatcgcctcaaatggaaaaatcttctgttttctatgagtttatcaaaattttaaaacttaattttcatttaatttttttt

SEQ ID NO: 9281 - DNA, 1342 bp, Heterodera glycines
  unsure (1)..(1342): unsure at all n locations
ttataaaaatataatgaaaatnaattggcccttttgagggcacaaattattcaaattttaaatatgtagacacaaaagattttaggcttaattaaaagggttttaagttatcccatatttgcggcccggaaagttttaccaaaaaaatgggccgcaaatattcgaaagtgccacttaagaaaatgtccggtacgcaaatgtcggggccataaaagtcgggacgttaatacccgatttgattgtgttggattccatcatttttttcttcccaagatttactttttaaatacatttcccacaaagaaattgatcaataccatagtttaaaataggcataaaaaatccttgaaaaaagtacttttcaattagtacgtcaattagtcactaattagtacccccgactaaaaggaccccaccaaaaacaagaagttgttgatcacaatcaatgttcagcttctctacgtgccgtgtattgtggtttttgcgcaaaagaaaaacatccgtgaatcatgttacaaattgttgctgttcatgggcttggtcagcatggtaaacattcactcgggctgtctgctgattggcacttatgctgtccgtggcgatgtgttttgtgatcggccattgttcaattacattgtcggcatggcagtttttggtgatcatgcaaaggggatgaaatccgttgccggtcaccgccctccgacccaggacactcactaatcctccaaaaaattttaactttttccataaaccatcaacaggcattcgtgccactgacatatgcgaaagttatcggatctcggatgttctgtaatttctggattaatttaccatctagattctaactaaatcatttctcgcactatagaccaggctggcattctgaggccccaaaaatttttcgtaaaacgaaatagagaattgttaagggccatggttcgtatgcggtgaagtttaaatttcttgggtccaaattcatttgaattttgtgtcgatttaaaattaatttattttaatcagctttttatacatgcgaatccatggtgtccgtcattttggcactgaaccgttgcattgaaatgttaaatcatcatttggcccgtgcactgtttgacggtgccaaggtgtacatttggattggcatttcaatttgctacggcattttcatgggctttttcttcattccaccgataccgaacggcatgacggtgggatatttttggcaagctcacatcggctacattgatgacgcggaaggatgggtgggttgcattttgtaatttgtaattgcaaattgttgctactgtacatattttggaatgaaccgtattcttttttaatt

SEQ ID NO: 9282 - DNA, 2582 bp, Heterodera glycines
ttattgtattcgcacatttttcatgggcatcttcccaaggttggctggcataatattcattttctacaaataattttatagaaactttcaaaaaaaaaatcttaggcttcaaaaaagtttattgaataatttttttgcatttttaaaacaggattccaatttcagcatttcgaagcctattttgcattaaaatcttgattcccgatttttttttttataaatttagcattttaatttccgattttctaaatttgaatttgtatttatttattttcatttttatttgtttaaataatcatttttcttaaataaaggcttgttcgcaatcattatgatcaccctgaattcacacatccgacgcagcatcaaagcagtgtttattgaaccagctctgtcacggttgacgagccaggccaattcgacaataaaccaagcaaattgagaatcggaaattggcaattttactgagtaatttgccataattaccctaaaaaaaaagaaaatttcaattgcgttctgtgtgttcttttcatatgcataaatatgaatattttgaaaaattcgactttttaattaaaaataaaaaaatttaatttcatcatatttatttctttgtatgtttgagaataattaaaaaacaaatttcacttatttgtttattataatattagtaatttaacaaaatcaattaatttatttcaacaaaataaagaaataacccaacaaaaattaaattaaatatttaactaattttctcatttttaaatttttttgctcatcatcataacacatcattctaagaattttgttttaagaaatagaaactttttttttgtcttttttaaactttttaaaataaaattttccccttgacaaaagaatttctcccagacattttaaacttgtccagccattccaaataaaaaaaatttcagaaaatttcctctacgatctccggtttctcactccgaaggtcagggagaaaaccagtaattacaaattcctgtaattaatatgccttcaatgttctgggccacaaactgtacacttttgttgagaggattatgattttattttcgttatcttcttcaaagcactcaattctcctgggactttcttccttaattatgtatatccggggcaaaggcataacttaaatttataaaaaaatgttttttttcttttttaaatgtacccaattaggttggcagctttattttatcaatggcaaaaattttcattagtaagctgataataacgagagaagttaatgcattaatatagtttgtgcttataaaatattatttcatttgctgtacaattctcgagaattggcctttctcgagactgtaattttcccagattttagtttttcgtttttatcctttccaaatcgcaaacccattgccaaatattcataaaaaagttatttgaattttaatgaaatcaattttataaacaaagtaaaaaaatgttattaacataaattcatttttacaaaaagaagactttttaattattgaaaattattgcttgaatgcttttctgattttttaatgatattttttttattattataaatttgcaacctctttacctaatgggggcaattagcaaattagcaaaacaataattatttcatcacaataactgcaaactgtaagtgcattgcagaatgtacatcatcatcattgggcaacattattcataattgtactttttattttttgttttaatctccataattatttttttgcgcgccattgtgcctttgatttcatgattatttcctgcggcctgtctttgtacgtctcactaattaaaaagcaacggaattattttttaattaaaagatgcaatttatttgggaaaaaattatttttttattttatatatatataaattttttgacttacaattagacatatttgttaattgtaattcagacccaaaaatttggtagttggctttccatcagggatgtgcgaaaatcacaaaaaaaattttcgtatacgaaaacgaaacgaaaaggggcattcgacacgaaaacgaaacacgaaacgaaaaaagaaattttgaaaaccgaaaacgaaacacgaaacgaaaaaattttgacggacgaaaacgaaacacgaaaacgaaactcaaaaagtgccgaaaatgtaggacgaaacgaacttccatccctgctttccatccaaaattttctgaaatggtattccaaccaaacgctttggaatttcgacctcagaaatcggctgacttcccactcttatataaaaaaattttatatattatttaattaaagtagcacctgctgtttatgttgcgattttctttttttgtgggtggtatttttctgagaatggcatttgctgttgtcacatgtcaaccctgaccctaatgtactgaaaatgctctctctcattcccaatttgctttttctaattaatttttgacttatggtcttgccttttcaattattaatttggtaccctaattaacaaaaattgcatctgttaacatttgtcaagaaaaacgtcaaaactttctttaatctttttggtctaatttcttctcgt

SEQ ID NO: 9283 - DNA, 6931 bp, Heterodera glycines
tttttccttgtgtgtgattctgaaaattccgtaattgccaaaacacgtgacatagacttccattttgaaattgaatgcgcagttaagctgttattaaaccaatcataataaaaagaaaaacacaaattgtaccataaaaggttgcaagtgcttccactccaacaatcagttgtcagtgtaataaatgcggattcttttaattcatctttaattttctgtctgacacgttggtatacaattggcaaggcagtttttctgaaaaaattgaaaattaattttatttaacttttaatgtaattcatcacctataaaaacattcacttttcactttttgatggggaaacaaagaatgaaaagtttggtcatccacagcgccgaagggaatggttttttgcaccaaaaatgaagaattttcttatcaaacgaagagagttgtgctgaaaaaagatacaaactattaagctaattaaaaagaattacagtctgaaataggcggtctgctggaagactgaaagtctgagattgtcttctgtttttgtttgtcctttttggctttcgattcaagagaattcagcttttcagtgaattcggagttttcgtgaatggcgtgaagatgagtatgcaaagttttaactgttcctttggcaagctggtattcatatttgagctttccatttgcttgacattcaagacaaattgctgtagtctttgacgtttttttaaataggccaatttgccaaataagactcattttcttaaaattaaaaagaactaaattatcatttcaataaagtagaatttttcgaatgaaatgaaaaatttaccagaaaattgacaaaaaaaaaaatttataaacattatgccaaagagatttttgaaggaaaaagaacaaatttttgttaaatcataacccggtaaaacccggtcaaaaatgccgggttccgggccgggttgcattttcaaaaacgaccgggttccgggcccgacctctcaaaacccggtcaacccggattttcccaaaaatcgccgggcccgggttgccgggcccgggaaaacccggtaccgggcccggccccggttcggtctctaatttttagcgtccgacggtgccgataggcaccgccggggaaaatttttttaaatttataggtaaaataagaacatttggccataaatttccaaattatgaatatatttaagaaataagaacaaaataagaacaatagcccgaaataaggacaaatcttacaaataaggacatttttattttgtaagatttggaccctccaaataaagacaaatcttataaataaggacagatccgaatcctgatataaacggtagcttgaagtcgatagatagaatttcttttaatgccaatatttgctcttgtatttatacctaattcccgagactaagcttacgattgataccaagattttaggcattttaggtcctaagaaactgaggaagggtattgatttgaacgtaacaactttgtccagggctcccagatcaaaattttcaaaagcctcaaaacactattttccccaaaagcctcaaaatttctcaaaaaaccacaaaaagcctcattttgaaaatttagcctcattgacctatcaaaaaaccacaaaatgaggctaaagcctcagatctgggagccctgattttgtccaattttttgtcatttaattttaggcattgattaagacattgcagaataaaacaaattaaagtgaaacatggcaaccgaagttgatgaaaatacagcagttgctgatccttggagcactgttgaagatgtgagcggtggagagtcaatgcaccaattggtcaccctggacgttcccgagattaaactgttcgggaagtggtctcttaatgacgtggacgtgtccgacatttcactcgtggtttgcatttgcattcctaagcatttttggtttactttaattacgactcaacataattttaggattatgttgcggtgaaagaaaaggcggccaaatatttgccgcacagcgccggtcgttaccagcagaagcgcttccgtaaggcgacctgtccggtggtggaacggttggtctcgtcaatgatgatgcacgggcggaacaacggcaagaaactgatggcggtgcgcattgtgaagcatgccttcgaaatcattcatctgctcaccggagaggtttttgtgggggggggggagaaattggacaacttttcattcactctgtttcaattagtgggtatccgataaaaaaatgcttaaagttaaggcaatgttcttgagttgtttcataaaaatagctgttaattcaattttgaccttttgtcgatgtaatgttaaagttttatttttcaattttcagaaccccgtccaagtgttagtcaatgctgtgatcaacagtggacctcgcgaggattccacgcgtattggccgtgcgggcacagttcgtcgacaggcagtcgatgtgtcgcctttgcgtcgtgtcaatcaggttggagtaacattccccatctcacacccacaaaaaatacatctgaacatgtctttttttgacagactatttgttttcaatgttaaatttagaattataacttttgatattttaggcaatttggttgctttgtaccggttcccgcgaggccgctttcagaaacatcaaaacgatcgcggaatgtcttgcggatgagctgatgaatgccgctaaggggtccagcaattcctacgcaatcaaaaagaaagacgaattggaacgggtggccaaatcgaaccgttgagggaaaaaagcacagaatggaaaagaggataaaggacacaaagggatcaatttgttcaattgttgttgaattttatgttattttgttcctcataaaacaaagagacaaattctgatcggattgtctgaataagatttgttttgttgttaaatgcgttgtttttatcacacgtccaacgaccgtctaaagtccgaaatttacttttgttgtgttttgttcgtcatttgattgtctaaactcactttgtttacaaatggcaaaatcaccgaagaaatcgcccactaaacgacacgtgagcgtcgcttctcacaatcagtccttaactaaacggccaaagttggacaattttaggggtcattagaagatcaatttggcttttaagggttgaatttgccgcaattctcaataaaacgaatggaaccgcagacaaacagccgatgtcatttgagcacagattggcaaaactcggtgagtttttgaaatcttattcctgttaatgttcgtgcctttttcaagatggtgatgatggcggtcttcatagagcatccacgtcgaggtcagtcacttcatttccgtatcccatgggaacctttccagttttagtggccacatttctgcccgacagcctggagcggaggcgaagtggccacggccagcgccggccaaatgggtcagagaggggcgaacagacgcgaacttggcctttcaactgattgacatcgacttttacatgggtccgacttttcattcgaatgactggtgggtgaatccgaggcaaaagaaggcggacggcacttacacacttgccgttccgttgatacaaacctcgaaaagcattgcctttttgtcctcattagcagagttggtcggcctccacttggctgaacaatcttgacaggacaacaataaccgtaatataagtgttgtgaaaattttgcctgccggtgtttttggctgacaccctttatgagcaattttgaagcctgaacctgtatttgaataaaaccaacaactccgaagttttaactctttcaatttagagcgaaatggggtgatcattcgactgttcggcgtcaccgatttcggcaattcaatcgccgtttgcgtgcccggctatcggccttatttcttcgcttcggccccacttggcttcgaccaatcgcatatttctaccgctatttcactgctcaattcaaacatttcggtgaatacaaactaccttttgacacttgcatttttcgcattaacttttcctcagataagtgcacaaagtggcgttccgaaggatgcgtcggcgatggtcaccggcattgagttggtatacggctcaaatttgttcggctttcacgccgaacttcgccagcaattgtttttgaagatttttgtgctatcaccccgcataatcaccgcatgtaatttgcatgccctattttcaatgagtttagagtttagttgtaaatatctaataggttctcgagtactttacgtgttggagagaattgccgccgacgaagtgggccattcggcaaactttaggccctgccaggccttcgaggccaacttggacttcgaagtgcgtttcatggccgaccttggcctcgtcggttgcggttgggccgagtgtcccgctcggaaatttacttacatcgacccgaaacaacggaacacaaattgccaaattgaggtgggcacaaacagtagtgcctttttaattgcatttccaattgtgcaggtcacaatctatgtcaacgacttgaacgtgcactccgcagatgaacccaattggtccaacatcgccccgttacgtacgctgagctttgacatcgaatgcatgggaccattgggtgaatgagttaagtaagcgatttttttataaatttccccttgaaataggcacttttccggacgcttcgcgtgacccgatcatccaaatcgccaacatggtcaaggtggagggccaaagggaggagtttgtccgcaactgtttcgtcgttggcggttgtgagtcggtcgtcggctctgacattgtcgagtgccgtgacgagaaggaattgctcgaggcgagtgttttttttcctctccaatttttatattcatttccatcggtcccatgtgtgtagaaatgggccgcgtttgtgctttgcgtcgatcccgatttgcttaccggttacaacatccaaaactttgatcttccatacattttggatcgggcaaagcatttaaaggtattaattctcaacacacgattaattttttgtactaaaggaatacattttcctattttggttcgtacctttcgccaatttcatttattttatttttgtcacagattgacaaaaccgtctgtctgttgagtcgaattcgcgggtcaatgtgtcgacaaagggacgccgccatgcagtccaaacaaatgggcaatcgggtgaacaaattcgtctccatggacgggcggatcatcttcgatgtgcttcaggtggtcccttttccgtctgtcccatttcaatttatttttccttttccatccttttttcctcagttggtccttcgcgagtacaaattgcgcagttacactcttaacaatgtcagctattttttcctgggcgagcagaaggaggacgtttcctacactttcatcccccaacttcaggtatttttcatcaatctccaaatttttaagaaaatgcttagaatccaaaaaaaacattttctaacgctcttttgcccattttcacagaatggctccaacatggacagacggcggttggctttgtattgcatgaaggacgcctttttgccgttgcgtctgctggacaaacttatgctggtgatcaattacattgagatggcccgtgtcaccggctgtccgttgaatttcctcgtctcccgtggccaacaagtcaaaattttgtccatgttgttgagaaaggtgttagattaaaatttatataattaaaaaataataactttttccgttgtttgttttgcagactcgcgagcactttttgttccttcccgtcgtcgaaatgggcgagggcgccggcggcgacgaggtcggctacgagggggcgactgtcattgagccgttgcgcgccttctacaaggacccaatcgccacgctggacttcgcctctttgtacccgtccattatgatcgcccacaacctttgctacaccacactgttgcccaagggggccgtagccaaaaaggcgattccatcggagtgtgttcacactactttcattgttttttccaaaagttttcatttctttttgttcagttggcgcgagggagaagattacattgttacgccgtccggcgatatgttcgtcaaggccacccatcggcagggattgttgcccaaagtgctggaggagctgctcagcgcacgcaaacgggccaaggccgagctcaaaaaggagaaggacccttttcggtaatgctaagtccaagattttgccattaactcattaatccatccattagttgactaattacaattctttgaataattgactatttgtattttcttcaattgcagacaaatggtgctgaacggtcgtcagcttgcgctaaaaatcagtgccaattccgtctacgggttcactggtgcctcccgtggcaaattgccgtgcttggaaatctcgcagtccgtcaccgcttttggtcgtcaaatgatcgaagctactaaacaaatggtggaaggtgtgtgcaaccaatgccaactactatcatgaactgtttatttgcattactttaagaatcttacattgccggcgctgtcgacggactttgtcctgcaaatgccaaagtgatttatggtaaatctttttcaattgactttttaaataataaatgtttgtatattttcatcaccatttagaggtgacaccgattcggtgatggttaaattcggcgtcaaaagtgttggcgaagcgatggaattgggccggcacgcggcgcgagagatcagccgacgttttccgccacccattcagttggagttcgagaaggtctacttcccgtatttgctgatcaacaaaaagcgatacgcgggtctctattggaccaacgaggaacgacacgacaaaatggactgcaaaggggtaatggaagagaagtaaggcaccataatcaccggatgaggcaaata

SEQ ID NO: 9284 - DNA, 1114 bp, Heterodera glycines
  unsure (1)..(1114): unsure at all n locations
ctgtgagaacgtactgaaacgaatgaaacagggcaattaatcggaatcnncaatcagccaagattaccacacaggtccggtaccatccgaattaattttcatacatttgatattttatcacatgcgaatgtacgaaaatggaccttaagaaagctagtcgaaaatgtacggacggaaaaagtcatgtaatcgtaagaccgaccccaattaacagcaatgacactttagtaattaatttctgggaaaatttatgcataatgaagcaatacctttccattacgagtgaactgagcactgcaaatcggggctccgtcatgcgcgcgggtaaaagtctcaatgcatcgattggaaactccgtcccaaactaaaaaaaaagtgaaataaaggacaaaaaagaagggggccgtgagggagaaggacaagggctgaaaacctaattctaaaaacctccatttttgggaccttttatcggcgaaaaatggctttaatgagtcgactccctcgcccctctttccatatatgacctatgtctaataatcgaccttttacattcccatcacgacttcccgtgacaaacattcgcgcattttccgaatagcacacatccgtaatggaatcagaatgttggtccttcggtattggagaaacaaagcattgctaaagaaacagattcgatgaagttttcagaatcatgtaaaaaatgttttctatgctatttaaaaacggaagaacatattgaaagcgattttaaacaaattaaaatctaaaaatatggatggtacctgtgtttcggcactataaagacgcaaggtcggatgccgagttgcgcatagaaaaaactctccgctcggatgaaaactgaccgcagtgatcggctcgacctccttccaaacatttcattgtaaaattctttcagaatatgacttaccgtgatcgttttcattgcccttttaaccgcagtttttgaataatcgaacattttcagcgtaaaatcgttgctgcccgaaaggaggacggactcgcggggatggaaagcaacgcaagtgacttcctagcaaaaagaccaacgattcttcgtagagtgtttttgttgtcacatcgaggtggtcataaa

SEQ ID NO: 9285 - DNA, 3304 bp, Heterodera glycines
  unsure (1)..(3304): unsure at all n locations
taagtgttttgtttgtcacatcgaggtgggggcataaagggtnccgaatgacccgggtgatgggcgtcggggccggactcactcagagtcacgtcaatccttggtgggccaggttaacaaactgcacccttttggggaacttgcctggaaatgattttatcgacatccaaaattttaattgaacaatcattggaggccgtggcgacaagagctcctaaagaaattaaaatgtaaagcactaaacgcgaattgaataccatctggagagaaagcagccgcccgacacggggccttgtgtgtggtgaggtacacagtttcgtacaaacttggttcagggccttgagaaacatttgtctttactcagatttgatgctatattatacttgtcgggacaacatcagcatcgaattccaagtcaagcccagcagactcaaacccaccgaccttttgtcaatgaaataaatggtcataaaaggaaaaagtcagtcatcaaaacaacacctgcaagattgtctcccgttctttagactcgggatcttccacaaattgtttagctattgccacaagacgaaaaagtttgtcagatggaggaggcggtcgtagcgaaaggccaagcgtttgtgccaagttcagtgccaattgttgatgaccatcgtaaaagagttggctaaaatggattattgaaaacaaaaatcaaggaaaacatacccaacaattaatttgtacataaagtcccggtcttttaagtctggcttcattataaaaactgtttttaacaaatatctaaaggtatattgaaaattaaaactaatgaactgaaaaatgtccaaatcagaatgtacatcaaattggttaactattaaaaaataataggatttggaataagtaaaattgtaaaaaatgagcaatgttaattaaacctaacttatgccaagtggcgagggatccctcaggcttagtttttagaatcttaatttttaaaaaagcacatttttctatttttgggttggggcccaaacgaccccgggccccaaaaacgggggcccaaacgaccccggggcccaaaaacgggggtccaaacgctctggtcccgacccgtagtgctcgtttaaaatatgaacagattattatatttggcttaatgttttttttaataaaataccgtaacaaaaaaaaagaaaaaagaaattgattttcttggtagccattgcaacattttccctgcatttccattccgtcttattaaattttaaaaatgcttcgtttattggtttaacaccttcatgatgctgacttttccgactgtatcctttgttattgatgggattttgcggcgatctttagaatttggtgagtttcgtatttcttcaggcaaacaaaacaaaatttttaaaaaaattctaaattttactatctactggagaagaagccgaatgggctacaacgtcttgtgatgcccactgccaatgtcagaagcagcctctagcttcattccaaaacctattataaagcatcaccgcgataacaacaaaactaagattcggtttaatatccttatttggaaaaggcagtcaacgaaaaataatgggaattaaattcatggatcaatcgagctttttggtcatattatggaattaaaacaatcttgagcttttaatgattgtgatttttatcaccctattgttataggaagcattaaaaggttgatttcataagactcaagagtaaatcattttgagagcaaaaggaaatattttgaaatttttcttgttacataggtgggacgatgtttctagttaagtaaattccaaaaaattatctcaaaaacggggttcctaaacaagaaaaatgccgttttatttaatttttaatctccaagtggaggccagcttataaaagccattcaataatgtcaaaatagctaattgtaagcaaattgtacttcagaactaattttcatttttcttaacattttttagtctattaaattcaatttctgcgacgcaataatttttaatcattggcattggtcgctctgcttaatttggcttgcaatttaacacatataaattaaaatttagagtttaaattccaataaatcacgttaaattcattcggtccattctttcatcgtttaaagcgcaaacggtaaattgaccatgtaagttaaagatgtgcggagaattggagcatcagaatgagtcaattaattgcggcaaaagctttgaaaaatgtgttaaaaaattcaaaaactaaaaaacggtcatcgtgaacgtaaacacactaaaaatcaaacataaaaatatgtattaaaacaaataaaatttttcttccaaagctttgagcctaacgaaattaattaaattgcatggaaacgtacattaacaattaattttagattttctcctccatcgtcaacaattatgtccaaattcgaaggagggttctcttctcatgatgttcgctttttgcttcttccatctcgtaaactttgctttagtcctatggctatggtcaaatgccttccgctttcccttccattggtggcgctgcgcccagtgcgcctccttttggtaatttgacaattcgtgcactacagtttttgaattcatatttaggcttttctggagcaccgttcggctcgcatgcattcggaggcgatattccgagcccacttgacgcggaaatccaaattgttctgagggaaattcagtcggaagtgcatcagctagagaacagtggcgaatacggggaacaattgaaaaatgcgcgtcgactgttggccaccggtaagaaatttgagcagcaaaaaccggattgactgcttttgaataataaatcccagaagcaaccaagctcgagaataacatcgacccagaatggctcgaagtggacatcaacaaaccgatcaaagtctccaagaaggtgctcatccccagtttccgtcatccaaaggtttcttccccaacctttttcattaaatataatcactgttatttggattcagtttaattttgtgggcaaagttcttggaccaaaaggcacgactttgcaaaatatcgccaaatcatacaaatgtcacgtgtacattttggggcggggcagcactcgcgaccgaaccaaggagcaggtaattctcactcaattttgtttttcttttcatttcttactttcttttgttctcataatggctatttctatcgcttggtcttctcaaaccaaatttcccaggaaatgctcagcagcggcgacccacagtacgctcactacggtgggcctttacacgtcaaagtggagacgactg

SEQ ID NO: 9286 - DNA, 1509 bp, Heterodera glycines
tttgcttatttcgcttcaatccttcgatattttggttagattggggtggtccaatccaaacaatagcaaaacgaacccatcgcccatttctcccaacggtgtgttgtccctttctctcttccttctatttgttcacgcgatcgaggcgataaagcacccaaaaagaggtcagccagcaaagctcaacgcctctgaagtccgaggggggggggggggcgttgggttggtccaatgggaaggaatggacggaccaattttaagtaatttccctccattgccaaatgcagagttatgatgtcacttttttagctattgcaaatgtttctaatttttctggccatttcctttttcgtctgttatttccaattgtttttgccccgctgaccaatggtctcaaaaattttatctttttcgctgacctccgttcgattctttttacgaatggatggcctataataaagccagcgttaacgaccgtcggtcgccatttggagacgcacgggaaaataatggcaaagaatgtgcggggggggggggggggagaggcaatgattgccctccctttccccttgatcatttcggacatcgctttaattcgtgggttcgcttcccatcggggcctaacattttgccatctctcaatcaatgtttcaacactttgctgttgtttcgggccacaaatgggctgtattttaaaaaatccgtatcaattcatgattaaatttcttttaagctttcgtttgacaccaatgatatatataagtattgaccaagtaagcaaaaagttatggccaaaaaactgaagaatggcctcacaaagtgcgctaaagccaaattactcatttgttggcaaatgttttgttaagttaaatttttgccccatggcgtttacaatttacggtactgtgctgttactcccatttctgctgttctgtcgggtgcactttgtccaaattggcaatttcaaaattggtaagcgttttttctgctaaaattaaattggttgacattcatcccaaaatgccttccaacgatgagcctaatttctcttcagtttaaattaaagtaaaatttttaagcgatttttcaaaacttttccttgaaaaaagaattttcggcgcggggagcgggaaacgaattactcccgtcaaattgtgcctaattttgcataattcggccattttggctaattaccccccccctttttgtgccatttccgtttcctcctccaacagaagcattcccaattaattgctgcggatcattccttcgccttctgctccgtcctcccgaactcaattcacatttttgggttcctccgccgcctcttttcttttctcagccaatttattcttctcccctcccctccgttgcagaatttcgccccaatttctctccttttttctgctgatttattttattcggtaaaatttaaaaaaatgcaatttttatttttcaaaaataaacatacctaaccatataaaatatttggaaatggggaagaacatt

SEQ ID NO: 9287 - DNA, 1654 bp, Heterodera glycines
aagcaggcaaaagcatcatctccagcagcatcagcagctggagactgcagaagcggtagcagtgcatccgcgccaccgtcaccaacagcagcaggtggtgccaacatagaaaatgagtgccaccaacccaatggcgataaacggatttgaaattgcagttttttgaatgaatacgcaatctcgaaggccgaaaggtcgggagacttaatgatgccgaaaagtgtgtcaaattgacatggcactacccaaaaaaaggagggacatcccatccaccattcatatccttttttctcacactgattttccattccccaaaagattggcaaatcgttgatgccagcaacaacggtggcggacgttttggcacagtcgcagctgctcaacgggcttttggagcagcacagccaatgatgaggctgaacattatcgcgtgtgaatggtggacactgatggccaagccaaaattgcttaacaaatgcctttccccccaattttgatcggactttcatttttgaaatccccttttccattaatacattccattccattccttcattgaaacaatgctttaaatgtgttttcttttttttctgttccaaatcatctgaccaacaatcccaatcactttgtgtgctatgcgctcaccaccgatcaataattcgttgtttccatttctggccaattaattaattaattgctgctaattgattggctactgctggtcaatcagttttggccctgcttgacagccttcaatagtataattattaggtacttttctcttggtatcatgccaaaaaaaaggaccatttgattatttgccgagccaaaactgctgattgattaagcaacatttatttacggtgatttttttttcaccgttttgatcacttttttgtgttgctccatttctctgtgtgcaattgaatgagtcgcagttccaacaaccgatcactgactgcataattttcgatcactttcttcccccttttttgatcacaaattgtttgttgcacatgcgccacccatttttacaccacaataagagctttatcaacctctttcttttctcattttcatgtcatgtttttgagaatgaaactgcataatatattttgcacatcccattgcttttttttatttgatcaaagggacggcaaaattggaaaatttccaaaatttaccacattaaaacttgtaaatttgcaccgaaaaatcctgtcgtttttcacgtaatttaccggttttcacttttaaaaatcgccttccttcaacgcaatgtagggctaggcaccttttgtatcttttttttatgattttaaattccaaaatgccaaaattttccgtccttttcactacataacaaacatatgattatttgtgtgtgcctttgcttcctcctcccctccttcagcaggtgttttttttttgtgtaatttaattaaattgaccaatcaaaaaattttctacaaaaaaacccagccccatgcctcgtctgacgctgtccaacgcccacaaaaaaatcacaaccaccaacaaaaactctcaacagaatatgtgcattcctcataatttaaaaacaattttgccctactaattctcaatctatttttcgcttctttttttgaatacagttccctcgaacatgtttcgg

SEQ ID NO: 9288 - DNA, 1473 bp, Heterodera glycines
ttttgacttaatttttatctgtatcaaaaaagtgatggaaaataattataacggtgaaaaggtcatttacacacagcttatcaaaaaaaaacgagcgatgaaccagtaaataggggcgttaacgcttaattagtaatttgacgagcgctaagcgccgctttgcgacgcgccaaccgctcggccttttctcagaatttaaaatgaattttgatttattggcattttgtttattacgccaatgatttattaacgatttttttcgtttttaccgtacatgtacctgtcatttgaaaagtttgcgagaaatgtaatcttatgtgtgtaacctcccattccatatattaggctttattttctacagattaatttgtatacaaatgtttaaattcaaattttgccatacaaaaatttcatttaggtttttaatggcaccgcccgtcagaaaaaagaaaaagttttcctccgacaatcaacgcctcatttcttctaccgcaattggtgaacatgaacagcaatccatgggttcacttgtgacatcatttggagaacggcgaagtgttcgcgtggcaaagaaaacgaaccgaccgttgtggacgaagacgaaacggtgtcattcaaaattgcaatttttcgttttagggccccaattttgaatttgttcatcaacttctgccagttaatgtgatttccgcgtttcagttgggtgtgtaatgatgtttggatggacattttcccgtttgttgaccgtcctcgactcggcctcaaattggcactgatttcgccacgtttcgatggtttagtggacacgcattttgatggcaaacgtgaactgaaactttggaaacgcatcagaattgaccagattggaaaagtgtcgaaactattcgtgtttatcaattatgtcaaatttgtgccatttcctttgcccgaacatccgctgcccagcaaaattcactttaatgaccttgaaattacgtaattcgaacttgaaaaccaataaaaaggcatgcttttttcagttacatcgaccacgccgtcatcgcatttctccgcgcaaataaacaaattttcgatggaagaggcaccaaattggctttgttggttaattcacaccaaactgctactactcctactgctgatgcccagccgatttgggatgtgttggcccatgaaatttggcccattttcgcgacaaatattcgccatttgcaattgtccaatgacgatcatttggacaatttgcgtcgtcgcacttcgccgacaattctctgtgatctgctgaacctgaattcaatcgcttcatattggatgttgcctgttacaacttctgctggccaagcgttgtccaaatggttgcacacgccgagcaaagatggacggacgaagcgattccattccatttttcatcatctatcaattagcatcaacgaatggatcaaattgatcaacagtttcaaagaagtggctggcaac

SEQ ID NO: 9289 - DNA, 3071 bp, Heterodera glycines
aaaatgaatggatgagccgatgggtgatgaagcgatgccaaattggggagacggcgacggttcaatgggagcacgaaaatttggacaatttgaacagtgtcaaaatcaatttgtgtggcgacaaaaagtgcattgggtgagtatggaaaagaaaagaattaaatttttataatttttttacacggatggtggggggttccattttgaaggaaaaaaatgaagaaattttagagataaatcaggtttttggtattttcagggtcggatagacacttaataatttaggtttttgtctccacaaccagcagcaacagaagaagaagaatcgggtcaaagcgatggaaaagggcgccgaattgtgcggaagtgaaaatataattgagaaatgatcggccattaattgatttgttttgttgttggaatgatcaacatggattatgttctgtgatcaggataaaatttcgtcttcagcgtagaattctttaccgtctcacatcttaataattgaaaaaaaaaatttattgcaacgataattttatatcgattgtattgactttgcttggtgacgaaaaatgctatcgccattggtagctgctaacttttcacccaccaaacaaacgcattttctaactttttgctgtaattttgtttgttgtttttttaagaattttctaaatttcccttttcagttgcaaataattagttttgttgactgactctgatacaatttttgagaggttggttttattcgaaattttcatttatttcaatcaattctttacttcgtttaatactttacataatgtcccattggtcagtgaaagctgtgtctttgtcttctacgacatttatttttttaagaaagcatttaaatgcccaaactttaggtttttattgaaaaatcatattttgtttggtttagtgtcactgatgacacatagaatgagtgccaaagaaatggcgaaagtaattaattatttgtaaattttaccaaattcgtggaagccattcagttcattaagacttaagaaattaaaaactgcataaacgcatttttcattcaaatttgggtgtgaacaacagacaataattgtctgaataaagacaagagatgtcaaaagataagagcgctttcaaattttctcaaccaattagtcctcatttggaggcttaattaggaaaaaaaattgttgataagcagaaaatggttatggtaatattttacctgttcgggatggcacattcttgggactcaattgaataatttacattctcacaaatacaataaaataaagaaaactgtttattttttgcaacacagcaaaattcgtcaacaatgcggtttacttaatttaatgggtgggctactttaatttctcttaaatcatttaattacattaaatgagtctccccccccccattcttttggcaatatttgagcactttgctcgaactttttttttaaggttgtatcttattttcagcaaatttatacaatttttcaatccatcataaaaaaaacttgcgctttttttcgctgcgaagatggaacccaataacaataatgatcaggcaaatcagtgccaacaaaccgatataagcaaaagcattgagtccgcggttttgcccaccatgatggagcttggtggtgatgaagccaatgcttcttcacctcgtgctgctgaaacggcacaaatgccgtcattgaatgccactgccacaaatggtggcccgggttcattttgtgatgggacactgggagcaccaccttacgataatgggcatcaaaatgctgctgtcacgattgcggcggcggcgtcgcttcctaagaccaccaaagcgcttggcgagccggcgaacagcggcgtcgctggcggcggtggtgtcgattcgctcgaccagccgagcgacgatgtcgaggagtcccaccaagcggaagagcttgtggtcaaggaagaatgcatctttccccaagacgagtacatggaagacgaagaggtacctcattcccatccaatccatccaaaccaaatataggaatgaatttggccattcccatatggccatggttaggaagcaaattgctcttcatttactcttggcttattgtcagcgtcttggccaacttttcactctttctcaaagcatttctgtgccaccattctgtcctgtcaaacttctttttcattcatctcacttcgtcattctctttgtttattggttcatactaggcaaaaattgttattatgccatgacgtgaccgaacatccatccccccccccctccatttttattaaattttcttggcacaaaaacagaagtatgtgttacaagcggaaggaatctggcaaaacccctaggaaaattgtactaaaagagcggagaaggaatttttttttatttaccaggcgatttctccaaattgctgttgtgactccccaaaaaaaccccaagtcaaattttagggtgtaattttacagaatatctgcccctttcgtgattagagactttcttagtccaataatacgctcattgttagttgagctgacgcatttggggataagaaaaacaaaacaaaaaatcgctaaaaacattatattgactttgaaacaacgcaaattattgtatttattcgaaatttccttttctaactgttctatcattaaatcgaattcttatccgctttttccattcattttactttttcattggcacaatattttttcgaaaattgttcaccattaaaacgagcatttttttaaaatggaatggaaaaacatccacaattattccatttttttttgtagctgcaactcgtcgatcagcacaatgatgacagtccgccagaaaacggaattgccaccaccaccgatggcaccaatgagcgacagcagaaaaacaatggcacgacagcgcgtgatggggagacaaagcaaaaccaaccgaaaacaattcggatggtggtgccaataatgctgaccacactggtgggaagccgtcggtggacagcaaaagcaatgcggaaaaggaggcggaagaaatgcggaaaaaggaagaccccgcaaagcaca

SEQ ID NO: 9290 - DNA, 1394 bp, Heterodera glycines
atttctcagtcctagcaaatttctaagaaaaataaagaatttatgggcgaccacggaatttttggaattacacaaccaaaaattagccgttgatgtcttccgtctgcttcctgcgattagtccagttttcctctcgaatcgggatagatcgctcataatttgattaatggaaatctaacaacagccgaatcgcactacttacgagatttcagcgcgtaaaattgagtttaattttcatctctatccacatattagctcaatatttacgcatattatatgcacaataaaaacaaaaattttgtttgaaaatatgttcgaatccgtgttaggggttcagaatttgtcaaaaataatgccggattcgtgctcagcaccataaaatagccctagaaaaatttttccaggcttttcaaataaaaaaaaacgggaccagtaaactagacctttgccgcaggacaacggacagaaggaggaccttttgagagcaaaggaaagggaaagactgacacgaccgaaaattctgataattagtgatgggaggtgtggaaggggaggggaaacggtgagggatgcacacacggacggacggacagatggcatgatcgaaaagatgagagataaagagagggagagaaagagagagagagagagagaagagggaagaagagaaaaagcgagaggagaagggatatgggagagagtataggaagaaagagagagagaaaaatgaggagagaaaagaatgccaaccttataactctccccccccccgcaattcacttaatttcccatgcttttcacgtgttgccattaaaattccttgtcatcgaaaaatatcaatcaaaaagcaaaatgcaccgaaaattgtccatttatttgaaaatttgtcaaataatggaaaagtgaaatgaaactcaattacataaatatttctaaatattacaaatggtattttacatatacaagcatgaatattaaatgatcagcagtggaaaatcggacattaaatagacaaaatgggaaggggaggagtcaaccgatcgattgcttattattggctaacgaagaaaacaattacctaaatggaataaaaaggcattcattaaaatgaatgttaaattgtgataaatgcttcagcaatttaacttaattgggatatctcttacactgtcaaaaatatccaaatatgaaaaaaggttaatcatcggagcaggtacattttcaaacattttttcacaaattaaatcggaaagaatgggatttataaaaataggaaaagggagggaagacgatttgtgaaggaatgggactggtcgcagtttctgcccgaactgatcggatgatcggacggctcgtcgccctttgctgctaatcctttcttgatcgcctccccc

SEQ ID NO: 9291 - DNA, 2473 bp, Heterodera glycines
ttttcacgtgtgccaattaaaattccttgtcatcgaaaaatatcaatcaaaaagcaaaatgcaccgaaaattgtccatttatttgaaaatttgtcaaataatggaaaagtgaaatgaaactcaattacataaatattttaaatattacaaatggtattttacatatacaagcatgaatattaaatgatcagcagtggaaaatcggacattaaatagacaaaatgggaaggggaggagtcaaccgatcgatgaagaaaacaattacctaaatggaataaaaaggcattcattaaaatgaatgttaaattgtgataaatgcttcagcaatttaacttaattgggatatctcttgcactgtcaaaaatatccaaatatgaaaaaaggttaatcatcggagcaggtacattttcaatcattttttcacaaattaaatcggaaagaagggatttataaaaataggaaaagggagggaagacgatttgtgaaggaatggactggtcgcagtttctgcccgaactgatcggatgatcggacggctcgtcgccgtttgctgctaatcctttccgatcgcctccccccttggccattctccgccgtttctttggcccattgggtcggcttttcctctgcttttccttttccccaatgaattcgcatgttgctaaatcggattcgctcaacaaatgtccatcttttctgctccgtttgtccgctttttcgcgtgccaatttcgccttttgccgtgccttttccttccctttggccataatttttcttttattgtccttttttgcatcaaccaaaggtcagtctgtgccacttttatttcttttcccccctttgtttccgttaggttcgctttttgtgccccctcatttggtgcccgccgcttctccctttgcccgtgccgactttcgccttcaaaatgcgcacttttaccgcgtcatcgttcatcctccgctctttcccttctctcttccgttttccccgctttctcctcgcccttcggccaattcggcgccagttccaactcagcgccgatcatttgagccttcccaaaaaacatggcgtcagtaaattggccataagagaaaagataacatttatcattatttttaaaataaaagatcacaatcagcatggattttgaaataaaatatattcaaaaccgataatttcatcccaaaggcgtcgttttgggtgaaatttgtcagttgccaaatttgctgcgaccaactgagaacagctccacttttgccgagtgtgagcagctcgactggggtattgctgagctgttgaacaggtgattgattaaatgttcaattaaacatgggcaaattaaccaattaacatttaaaaatgcttaatctaaggtccgatttgggcttttggcggttgcgtttctgcgaatcggacactcttttcgttccgtcttcccagcgttgtctcacgcgtcgttcggtgattcttcaaaacaaaatttgctcaaagaaatcgctgcgaaagtcaattgacgaaaacgaaactcttggagagaatggagcaaaagaattggccactaattacagtttatgccccccgggggacagtctcgacttggtaagtgaattttcgagaaccattaaatatttggaggaatgtgaagcgggtgtggtcctttttctgttcagtggatgacagtgcgacagaaagtgccaacgaagcaaaaaaggacggaagagaaagtgcctgaggggcaaagaagggaaattgccaaaacagaagaggaggaggtggaggaggaagacgaaagtgccgaagaggacggcaccaattcagacttagaaatggtggagccgtgcagagttcgaatcggggagaagggaaaaggcaaatcgatgcatcaattggcaaaatgtccatgcgaaagtgacaattgcatttgcatggaggtgaataagcaaaagcaaggaaagttcagccatagctttcctttattcattatccctgatcaattcattcttcaacaatattaattaccccaataattgtcggcttcccactgttaattaccgttaattaccctttgtaagtctcaactcccgcggcttttctccgcctgctgttgcccaaccaaacaatcttcgccctgtctttgccccgtcgctccgccgcattttgtcaccaccgatgacaaacgtttatcagctaataaattggcccaacaaaaagtacaagcaatggcacttgcgccgcaacggaaaagccaagagagcagcaacaaaatatttgaagaagaaaatttcgtcggtccgccggaggattttgggcgatttgtgccttttccctcgggcgtggaacagccgcggcaatgccctttgagtcagtacaaagccaaaccaaaggaaaagctataaattaattcagtcgatcaaacgaagccccaagtcgcgcactatcaaagactgtgtttcatgggatgttggaccctctt

SEQ ID NO: 9292 - DNA, 3018 bp, Heterodera glycines
  unsure (1)..(3018): unsure at all n locations
attaattaattgttttttatagactcaattaaattttccaactgtttttccncaaatacacctaccgtatgctttttgtcccatccctttacagtaggcttttgtactttcgtccaccgtatccctccccttttttccctttttttcactacccgttggccttgggtagcatcccttcttcagtcctttgaatttgttcttcaactcgtcgatcacagctgcgtaattctgctgcgctttctctctcaccgggtcgcgcacattttgactcattctttcgcgtcgcgagcggcggggaacccaaaatatgaaagtttaattaacaaacgtttatggacatgtcccccccccttcccaaattgggcccatcctctcagtattccgtcccccccccccgcctcactcggcactcctcgtccctgtcaaatcgcttctcctcgtcatgtcccattggtcccttcactgtgcatcggcaccctttccctttcggccgtggaaaacatccctcacgcaaatcgccaaatttcctcgtgaactcttcgttcagtgcgtccttcttttcagcaatttctactaaaattatttaataatcaaatgaacaaaaagtgatcggacgaccgttggaaagggcggactcgcgtttgatcaacccattctgaaaaatgatcgaaaatgggccaaattggccaaaattgacccaccaaagaatgaaaattgagcaccatagccaacagaaaaagagcagaaaatggggcaaaagaagacatattttggagactgagcaatctaaataaaatgaaagaataattggggaagattaaaaggcgaattaatgccaaattaacagctgagtaaattgggaaagggaaacattcattaattaatgcccttggggggcaattgaagtgtttgtctaattgggtatttataaacagcggcagagtgaacggctgctgctgacggctcatcccatcacttctctctctctctctcatcagcagcataagcttggccatttgttggtcccctggggctcccccccccccgccgtttgccccctcactttttttttgttcgcatttttctcttgcgatttattgcttttttcccttttatcgaatattttcatttgaaaagtcaaagccaaacgaagtgaattcatttgtaaacaaaattaaaggtgatcgatcgactgatcaaactttgtttttgctcccaatgattcattaaatccgccgatgagtcatcatctctcattgtccgatcatttacttagtttccgatcactccgtcccgtcccatttaagtttaactaaatattggcaaagaaatgattcattccgtccaatttttactttgataaaaatgaaaaataaagaattttgtgatggaatgtgttaaaatgaggaaaagaattgagatgaaatataaaagaaaatgaaatgaataataataataatatataatataaattgccttttgaaaatataaattaaaattcgatttaagaaatggaggcgtaaaaatggggtaaaagtgtcaatgagtcattaatgggttcagtcaatgattctttttatgggatattaaatgcgccattcttccgtctgatttggtattggcactttcttcattttctctattcattgctcgttgttctgcctgtacatatgctgttgaacattcctaaaatgttaaaatccatcgacaaccaattgcctttttttcttttacctcaaccgttgttccaattcgcgagtggccgaaaaattactgaaaaaaaagaaatttaaatttggtcaatgggctgtttttgcctgtcggccccgcccgggctctgatcggattcagactcggcaccagcagggctccgactccccgggggcaccaacgcattgttcagttggacagtcgacgaatcgcttccgtcaggcccacccaaaaacatacttcttgcctaaaatggtcacattagtccatttgtcctttctgtcctgctccaacttcttggctttgactccctcccctcaaatgcctcgccgctccacgcggcaaagtgccgccgccagcactttgctcatacggctgttcatcctcgtagtacaagccaatgggaggacggatggagccggcaagggatgacgaatgggaccgatctatggccaagcggggcggggcacggccgtagagaaagttggaggccaacggcgagtcgggctggacggaggagaacacggagggcttctccagggaggacactgcgcaaaggtgggggaagactgatcaaaaagacaaaatgaggaagaatgaggagggggagtgatcagacaaaggaagggcacaaattgtaaatgatggcaaaaagtgatcggatggtaaacgagaaaagggagacaagaaaaaagtgatcgaatcgaaggacataaggaaaaaatgatcggaaagcaaatgggggtcatggatgatcagcagattacataagtgatcaaccaaaacggaagcgaagaattactgaatttggcctcggaggacgacgagcgattgaaacgcaacgaaatcatccaaatgacgacaacgataatgatgagaaggaataccacggaactgaccaagtgacagcacatttaccaaatgataaaacccaaactcacacaatggaacccgtccaataagccaatttttgcgatcgcggcttaaaggaaaaagcattgaaatcaaaacaaaaccaacaaaaaacacctgaaaacgaatttcgcagcgttcgcccgagaagttctccttgcattggcactccacgtgacccaagcgattcttacggcaaatgccatcgttaaggcagaagttcagacaagcatctgcaattggacaaatggtattcaggccgttccatggcactgattgacccgtgcaattgactccgttcccacggaagcccgggttgcacacacagcgccaactcggcacgtcgccgtcgtccggcaaatcaaagcattgggcattccatgagcagttgtcctg

SEQ ID NO: 9293 - DNA, 4527 bp, Heterodera glycines
  unsure (1)..(4527): unsure at all n locations
aatccattttagaattttatttttgcttgctgtatgcatgaccaattaaaaaaaaattatgaaataaaatcttttttaatcttatttcattacaaaaaattcattaaatacaaaaatacaataaatatcttttctaaaaaatttaatttttgtctaatactttttgagtaacttgaattttcttgtagtggacccgaacctgatgtttaaaaaactgacaagagcactaccgataaaccactggacatttcgaagagaatcacataattatttaatttctttattcattaaaaaagttaggaatgtaataattagggttgcgttttcaggttttaactgaattttttgctctattgatttgaagaagagctcaaaaaacgggtcggggtcactttggcgcgggtcattttggcgccgcggactttaaagtgttataactttttcttatccaaccaaataaaataatcttgataccattaaataggcctaagtgttgtttattagcgtgcaaaatattagaaaaatacatttggttgacaaaagatatagcgtgcgggcgccaaaatggccagaaaaagtcagttttttgaggttttttggccataactttttgtgtatcaattaaattttttgaaattatgcaggctattagggactatcaagcgctttaaaatgatatcaagcttatttaatttgaatgcaaaataaaaatattatagcgtttggcgccaaaatggctggcgccaaagtggccggttccccaaaaaacgcatttctgcattaaaaattttattctgatgtcattatcggtcactagaaataattattttggcgacttcgtcactaaattagttaaaaatcactattttggcgttttgtcactatttttcactatttcgacattttttgtaaaattccttaacaaaaatgcaataaaacaaaaaaaatctacacctctaagaatcgacccaaaaaaatttcaaaaaaatacacccctaagaatcaagctaaaatttttcaaaatatactccaatgaactgaaaaaaaatttctcaaaaatttactttcttgatttttaattttaaaaacttttttaaagtaactattttgggttttttgcgcttaaaatcccagtgctagtcatttgcaacagcaaacagtgaataaaaattatttttgctcaatttttggctgaaaattatgtcactattcgtcactatttcggactttttgccactattatgtcactattttggcatttttactcacaattttagttaactatttcaagatttttcgtcactaaaaatcgcaaccctagtcataactctgcactcactcatttcgcagaaaaaacatttttcttaagaacccatggctcctctatccacccaccaaatttcattcggaaatcccacggacacatgaggacctttctttgttagtgaattacatttcattcaagtcgcgtccctgattctcaatttggtgctgttatacaaatatggggtgctgaaattctaatcttttcttgttcaactgaaggagtatctggtcgcggtgatccaattgattttttattaacacgaaaaattatcctagtgtgaaatttcacttttttcatggcttaatcgggcatacatggataaggtacgaaatacccccccccccctcagaggccaaaatttttacgaaattgaaaaaacgctcaaaaaatgtttctgacgacctttttgcttttccagtccagattttttgcctttatttatcacatttttgcggtgttttttcaaaaaaaattttcaaatttcagtgcaatttgttaacatttgttgtaaaaaactaactttacgaaataggaaatcgaaattcaatttcgtaaaaaaattacgaaataggaaaagatgaaatagaatttcgtgaaaattttaacgaactgcaattcaaaatcgtaaaaattttgggtttttggcacaaaattttaattatatttttcaatttcgtaaaaatttcccatctttaccagtgctttttaggtttttgccgaaaattttacgaaattgcctcggactcccgtacgatttacgaaattgaccccccccccccctgtccacnctagcgtatgttctgataggcacaatgatcagaaacatgatcaatgatgagctgttcagaagaagtctctctgtattatataggaacggggaaggcaataaaatcacaaaagatggcactaaatgttttaggaaagggcaaagtaatttaatataattttcctacttttacccaagatggataaacttggcacggagaccaaccgcttgtgccaactgtacccggaaaagtcggaagatattgccgcgaaggtggacgaggcacgcgaccgatgggtggcgctgaaacagcgcggaacagcgcaagcggggccttgaccgatcgtacaaccggcaccgcttcatggccgactaccgcgagttggtcgagtggaccaagggcattcaggtgatcggatacaattaattccatgtcaaattggagtttacccagggttttatggattttggataaaaaattgcataatgtaaatatttatttctaacttttttgtaacctcatccctacaaaaatataaaaattaattttacttcatctttactttgtcaaccaaatctaacattattcacagatttttgttccattccagttgcacaaattggttgaattttttgggtcagatttttgcggccaccagccacaaaacaaatcgaatagttgatagagattggaccggtcggttttcgttatttttcgattttcggtttttgatcgaaaaaaaatcgaccgagaaatttttgagttttttgctttcggttttttgaccgaaaccgttcgaccgaatttatcaaaaaaccgaaacaaccgaccgacttatcaaaaatcgaaaaaaacaaacaaatggcgaattggagcgacataacctgttaataacaatattttagtgcttttttgtgctcatttaaatttttcttcgattttatcgattccgcttttttaaccaaaatcgttcgaccgaccctcttgtccgttctctacaaatcaagcattttatttaactttaaatgaaattatcccataactcacaaaaatttggaaaatttttccaacttaataaatcatatattagcatttattcgttttaatgtgcacaaataagcatcgcaactaaaattaatgtcaatcatggccttgacattttttgcgaactgatcagtcatttaccaatcgctgattaatcatccaaacacaccaattccttcccgcccggccccgctctatcatttctgcgagaataatatataatagaataaatatcttattatatgaaacgaagttgacgggactttagtaccaatctaaaataattagcttgtataaaaataaagaattattaataatttatttataaatttggcgtttgattgccattattttctggtttcctagggcctgattttctatatcacttaatggatttttgctaactcaacgataaattttgatacattgatttagaattatgtcaaacaaattaattcagtttttcgtttcgctcttcatatctttggctgcatgcgggcacgtaccgccaccaaatcactggagtgcatcgttggacaagccaaagtcaggagctttaccaaaatggacactgaatcgtcaggaggaggaggatttcaacgaagactttggtaaaaaatttgtcttcgttagctatagattttaaatatctaaatgtgatttaatcatttaataaacattaatgacgagcttaataacttatttcagggcgagaaactcaatgtggcctaaccaagcaccactttcaatatcgtgttagtatttaaataaatatatttttaaatgaaaaatgaaaattaataatttttcttctttgcgttttatatatttttttagattgttaatcattgtttatctataaacttgataattttaaaatattatttattactaattatatttaagtcactttttatcgataatgatttttattttttccgacatacagattgaacatggacaaattgcaccagataacgactggccatgggcagtatcagttaggcttgagtgtgaaacgaaacaaagtgcaaagcgagaggtgcttgggatttgttctggcgttctaataggcgcaaaatggattttgactgctgcacattgtctatttgcaactgatgatattttgcgctgcaaaggagtcgaacttaatggactaatcccagaaaagggtgcacggtaagtaacagattttacttagtcaaattatcttgattttccaaaaaagacaaaagaaatattttatccatttatgtgtgaaattttcaagctaattccgtttgaacaaaatttttgtggtttgcctttagatttcacataanatattgtagcaagttttatattataataaataataattattaagttacctggtttttgcgcatatgt

SEQ ID NO: 9294 - DNA, 1450 bp, Heterodera glycines
  unsure (1)..(1450): unsure at all n locations
atgcctgcannggtcttataggatttgtatatgtatatatacatcattgtgtaaataatcatttaatacatctaactatagttatgactatttgtataatgaatatagaatacttcattataccttttttatcgatgctaaaccatattactgcagctagcttccctggtgtttgcccttactgtaactggatcgaagagaagacgaaaggcgaagtcaaatgcaatggaatcgcccattaatgcggttgctttcgcgtggatgtttacgatcatttggacaacactgacgaaaaacataaaagttgtgaaaattgaagttaaaatgttgataaactaattattaaaggacgctttttattttggaattcctagccttaagttttaaactgataaaaatttttttaaaagaaaagatatttgaagtaaaaaatttttcgaaaagtctaaacaaattttttggaaacatgttaaaaatgtgataaaactacaaatattttttatgtaccgaacatccaaattattttatagatgctgaaaagccattctaatccgaaaattagcgtagaaaatttattaaaaataatttatatttatttttttacccaacatttttttattgaaaaatttcgtgcttcgaaattcgaaaacttcgcgtttttcgcttcgaatttctgttgccatctaaaatgacctcctgtctcatttgcaattttgacttcttttttaataatacaaagcaaatcccttattctaataaattccagccattttttcctagttaataaactgtttttattattatttatttatttttggtcgagactttcaccaacgactcccatttttgacccatataatttttcccgccggcggtggtattcgcgcgcgggcggcggttcatttttagtgcagcgaattgcaatgcctaaaaacagtttgcctgccttttagtaaatgataaaattgcttggattattgagcccccttggcaatattcgagaattctcgaataatccgaaacccgataattagcaaaaatgtttgagtgctagaaaaaaaattactttctgttgagtcatcggaaaaaatgactatcaaggaagtacactaaacctagtaaaaaacgggtttctcttcgcgatgagttgaaagatccgagcatctattttggtaaacaaaaaaaacggtcttcctaactgtgagtcgtgtgcccaaatgaagggcctcaaaaatactggctttcagtttttcctgaaattatttcagtctcagtttgcctattccgagtgaaagcatttcccgagagcatcccccctctccctcttagccctttcctacaacggcagtccccaaacatcttatagtccctgcttttctcgctctcatccgttctttaaccggctcggcgacgtcgccgcattcgtcgacgaccttccccccacctcctc

SEQ ID NO: 9295 - DNA, 2985 bp, Heterodera glycines
cggcttttgcagttcttcgtatgccttttgcgcataataagtcatcaaagtcggccatgcggtttccttgacatttaatcattaattaatgaaagatttttcgcattttcaaaagaactataaaaatcgtagttgtatattttgatatttattacgagtttttgatcactataaattcgcattccggtggtaatgttgacgccgaaggctttaagatccgataactcatccaaagtcccttttttgtcgccgttgtgcgaaacattggcacacaatgagccgactgagatctgttttcaaataaagaattaataatataataattttttaaataaagaggaccaattttaatgagtccaattcaatcattaaaatcaattcatacaactcttcacgaatgttttcgttcgcatcagaaatttccttcaaaatgcatctaaaagataaaattttggcgctgccacacaattattaggttttttgttattaataaaattgtaaataaaagtttcaatttatcaaatttttaacttaggtaaaattaaccattcttacctgccatgatttcgctgataaagaccaattttaagcgagtgatgcaaatcgacaattgcactctcaagtgcaaagcttggaccatatattttatctgaattaattaagtattacaaataaaaataattgagactttttaataaatattaattatttttaattaaattaaattcagcaatgggctatgtttaaaaaaatatttttaagtacttttaactgaatccaacaatgagatatttttggccaatgatagctgatgaataatttctaaaatcaaatttaaacaacaaaaaatgaagaattattatactccttcgaaagtcggcgtatcgacgttgagttaggtgaacaaagtttgttgagtttttgtcaattaagtcaaaaattttgctggctttggcaaaggtgtctgcttcttcctgtgtcggcttaacgcaattgaggttcactcgtttgttgagccactgaatttaaatatatattagtgtaactaaaaaatatttatattttttaaaattatatttttatcgcatagttacaagcagcgaattgtgtggagataaatggtacgtacaaaaatggacaaattgttttcggtagagagtccggtttcggcttgggtcggtaatttttttgtatacacgcaaaataatgtcaagcggatgggtaatcatcttaacatatttataaaatatatttaaatatttattactcatagtatacacctgatcgtattcaactagggccatatgctcaatcaatttgttaccaaggtgttcaattcgttggtccagcccattgaactgcttaatcatggtgacgtgcaacaaattcaatgcctgtagctcttcactttctggctgaaaaataggaggaagggattattaagaagtaaggcttttcgacaaaaatttggtgtaagtcataagcataaatttattgcctttttttcaaaatggaaaacaaacaaattttggagcggtttttaatataattttctgtatgcatttttgaagaatggtgatttgaccgaacctcaaaagccttctgcatggccaaagctgcaaaggtcccaacgggacccgccaatgaaccaatcttggcatgctcagggatatcatttttagttgttctccaacacttccggcgggcacaatgatgttggaaaatgcctcaacataatcctttacatcctcaagcactacaaattattaatttatttattttagtaatttaaatataaaatttgtttttacctccacatttaaccgaaattgggccaaatgctaatgcggcaaatgccactgcaacaattaatatcataagccaccgtcgcattgccaactaaacagaacaagtaaagaatattctaattggtaagatggatttggttatgaaactccctcaatttgtttataaagccgaatgaggaagagcaactgataaaaattataaatttgtaagtgccaatcaaattaacgattgactgaaaaaaaattattatttcagaattacttcagttcaaatctaattatttttttaacaatgaagtaaaaataaataaaattaggctttaaaatattttacatgtttaaaagcgataaaaactcctaaaaaagcgtaaattcttaaattaatccacatttatatttttgtttccatttaaaatgtaaatgaatgctttattacgaataatatttcaaatataaagtctaaatattaattcctaaaaaattctttattttgcccttttcggaaaatccatagagtctttttcgacaaatattggtagcagcgaggaaaagcaattgttggaatgcttttccaatttgtcatgcagcgaagaaagctttgactaatccctccactcttttgagttaatacaaaagccaatcaatacacttggcaatttgttaaattgttaataattaaaagagacataatttaataattatcaaaattcttacaacaatttattaaaactaactttcctaataaaccaaactttaaaaattaaaatgtaatataaggattttcagaaaatttttctcatttactttccggaaccaaaaataagcctcaagaagatgaagatcactctcgatactctctgatgtcattaataaaagtgagaaaaatcgattgagtaaaaaatgctttataaaaaaggaaaattaaaaaagtaacacaacaaaaatgattaactgaaatcgaataaatttttatccgttaatggtggaaacatcgaatttgaaatttgggccgaaattggccaccgccaaatcgccagagttttgcagggaaatgcatggaaataatggcggatcatcgttagaataaggggcggacaaatcggcggtctctaaaaatgaatctacaatttttaaaaaaaatatattttttttccaaccccaaacgttgtccattttt

SEQ ID NO: 9296 - DNA, 2557 bp, Heterodera glycines
ttctgcgaacggcgcctttttgtaggcaaatccgacgagggcaaagctgaagatggcaaacacaaaatttaaaaattgttcatttaaacaattgtgtgttagtgctaaaagaggtaacaataaatggctgccaaaatttggatctctaacattttaaacgattttttgtagaatttttaaaaattttaggtaattttgccggcggtgccagtgacgataggcaccgctgttgagttttttaaaatttcattactttaaaaaacttcgataaaagtgaagaatttttcaggggcgatctttttataaaaattttattaaacaaaacccaaaaatattttaaaaaaatttctcggtgaaagtctttcaacttcggtagacttatcccctccatttttgggactccattcaatttgaataattaaaaattcaaaataataattattaagtaataatatgttttgtgttaagggtccgtcttacttttgcacaacagccagctttatttcgaagtagaatgtgctttgttctgcgaacaccgaacgccaccctttatggaaaataaattattataaaaggtgcgcttatttagagaacaaatttggcgacttttttgtgccgtcaggcacagttggaagcaaacattttttataatgttgagaaattatgcaaaatttaaaaaaaattccttccttacgcacgcctctcccttcttcataccccccccccccccacctaaacgaagttccccgaccctctggccaaactttgccaattccgtctggccaattctgtcgcagccaaacccaacaaatttggtgtattggctgggacagattgacttccaccgtctctggcaccctaacacatgaacgaactcataatttgggatagaccccctcccctaccccatttcctggcatagtcaaaccgaattatttaatagggaatttaataaatcatttttaataaataaatttctaccattattttctccattataaatgaccatcaaaccgtcgtcatcaaagatttgaatttgcttgtgacaataagtgtcatcccaacaatttttgtgtgggttcaaaagcaccttaaaaagtgataaaagcatttggcatgacgaggaaacgtggcaaaattcgagctttgtgattggcatggaacaaaagtgttgagaaactgaccaaatttgttttcaaaataaaaaaataactcaattttaattaagcaccaacaaagaattttctgctggacggaactgataaagccgaaattcgggaccattgccctcataaccaattataattaattataatagtttaattatttaattaaaagaatttttacttcaacagcggacggatcaaatttaaaattgggcccaaaatttgccacaattttgtcatttgattcgcacaaagaaacacaaggaaacagtgggtcatctgcagaagaagccacggcgaacattttggttgtgtctgacagtaaattaatttataaatttaaatttattaatttttgccaacccaatcgaagtccatttttggttaaaatgatccgtccggtggccaaattgacgccgcatccgaccgtgtccccctccgaaaatcccagctttccacttacgcagaaaccgttaacccaaaaggtgccatcgctttggtatccgtaactgttggaatgttttcccgccaatttgtccgatggcattgctttggtggcgaggccaaacgaagcaaaacgaaaagcataacggattaattaattagccaattaatgaattaattgagaattgcacctttccagattaatgaacttgatttcgtaataaaaaatgccactgtcactgttcggaatgggaaattgtgcgagcaccgatcgaattcgttgacctaatttataaatacataaataacttctaaataattaacttttaaatgaattaaatgcaaaatttgatacaattaaatttaataaaattcatagaatttgcctctttcattccctttatgctgaacagtcaaacattcagggccaaaaatttggatgtcaccatgacaatcattggcattccaacaattttgtggagggtttgaaaatttctgtaaatttttattttaaaatttggctaattttcacacctcggcaattttcgggcgaaaatcagaatggacagcattcagcagctcttaacaacaattcgattaagcaattttaattttaagttcttaccttttccaaatcgatccttcaaaactccaacaaaattttcaaattgtttgaacctcgccacagaattttcaattccgacaaaattgtcaaaaatttttgctaactaaaaaagggggtcattcaagtgcatttttaaaagattttaaattttatcggatgaaattatttcacctcgtcaattttcgccataaagtctgtctgttgatgcaaaagctgatcaactacgcgaaaaaaaaatgttaattaattaattatgctaattaattaatgatttggcaaattggcacaccaagacaattttccatggtgacaaatttggcac

SEQ ID NO: 9297 - DNA, 1603 bp, Heterodera glycines
atttggtgttggacgaggcggacaaactgctgaaggcgagaaatccgaaaagaccgaaaacaataataaccattaaaagtatccccttaagaatgaggatttcctgaattgtgtccaactgatcaaaaaccatcccaaactcgtgcgtctgtttaaattagtcaccacaatagccatttgacttttaattttcgaaatcttctgtttttactcccccctccctttctttattttgtcagtgcccttctcaccgttgtctgatgttttctgcgacttttgaatctggcgctcagaaattggcgcttcaatttttccgtgatgactttttctttgtcaacatcggacgactgaacacggccaccgatttggttgtccaggagttcaagaaggtctcatggggaaattaggaaatttgaaaaaataataatgccaaccgaatttaaggtgcccaaattcaataagtctgacactcttgtggagtttcttttgggtgagaatggtgccggtcggcgggaattggaacgaacgaccgacggaggttatttataaattaaaacgaaataagtattaaaaagacgaagcgataatgcccaaaatcataaatttcacaataaattctcatctttattaaatatttggcagaatattggaagacgcggaaaacgcttgtttttgtggagcgaaaacggagctcggacatgttggcaattgcacttcgacagaacaacatcagggcgttgagcatcaacaggtcgggaaagagttcgaccatttcccgattctccctttgtttcagtgaccgaactctgaagcagcgcctgggcgctgccgaagactttgcctcggggaaaattcttgttctggttgccactgatgttgctgctcgaggactcgtaagcattgcttggagttgtcctcccattttgcttattttctttcagaattttccgggagttgaaacggtgatcaatgttgatctgccggaacaggacgcctatgaacgggtgaggagagggggcgggaatctcccagaagagcaaatttaacagttcgatggggaaactttggatatgtccaagtttcgtttcgaacgtccatttctttttatatcttttaacaattgttctctttcagtacattcatcgcattggtcgtaccggtgcgtcagccattcccccccccccccattttccccgttaattcccatctttaggccgtgtgggaaatgccggccacgcaatttcatattttgacccggacagtcccagcgaccttcaaaatgccggcgaatacgttaaggtggtgccgttttgctttagttttgttttattttatgtttccattttcagattttggagaccactggtcacgaattgcccacttttttgcttgaaattgcgaaagggcaaaagtgagcgatcggaagcggctaacagacaaagcgaacaattggattgatgctaacttaactcatttttgttgtttgttttttggtctcattttcaacttttaatatttcaattgttatcgattatccgtaatgccttccttcaactcacaaaatcagcttttcgccttcattttctcattattttgtctctct

SEQ ID NO: 9298 - DNA, 2534 bp, Heterodera glycines
cgggggagggaaaagctgaattggactcattcgatgataaagcgacggaagattcccccgggggggggtggtccttcgcccctccgtcgtcacttatatggccattgcaactcgtgggggggggggggcgcctgcgccctctttcccgtcggaagcgggcgaattcttacgcgaaggtgcgcgcatttgctggaagaggccaaagggcaaggggagagaagcgattgggcgggggggggcgaaagcggggaaaacaccccggaagaacttttactttccattccttccacaattcccctcggggctcctttctccaattatattcgttcttccgtcttttctgctcttccattaatttctcccgcaacaaaacaacaacagccgaacaattcattcaatggaagctcgggtcaaagcggggtttcgggagttgtcgctctccgacgaatgttttgtcggtcgagagtgccaaatcgggactgagtcggccatgcccttggccacttcccctttttcgggagaatgccttcctcagccctttccccgcttgactccccgtacgccccaacagcggccaaaatgccgatgccgaattgatctttcttcgcctgatacgctcgaacgagacttttacgcatggcttaaagtcagtgaagcattgggaatgccttggccaatggcgtgccttttcgtctcttagggttctgagccggccagtggcactgtgccgtgtctgttcgcttcgacctccgccgtccattcggactttaggacgaggcaacagattcaagccgcacctccctttttaacattggaccctctcgccgacctaaaaagtcccccgggccgttgggatgcgctcggctcatccgcctcttctgactgtctgtcgtcgcactcctccgtcagcccggggcactgctcctcagccatctcctcgttctgctccgcctcgtcgtcctccgcttcctctatcggtccctttacgccgtgttcgctggcgccacctttcccgcaccattccctcccgcccaaccaccaaatgccgctgcacccattattccagcagcagcactaccgtttgatggtcactccctcctgtgctgatcagctacagcaacacaaatactcctcgaagatggcatcctcgtcatcgcaaaatgtcaacgccaaagttggcccaattttggggacgaggatgagaagaaagcgcaatgttgacaagggtaatgcgcgatggagggcgtgctgagaaatgcaaagcaattcacacaattgattcagcttccggccgcggcacaaatctgtacggacgctcgtattgtccaggttcacgaccaacggaaaggcatgaaaatcacttcgtaatttgaatgtcaggtcgacctctgagcatggaggagagggcccaaatcattcatctgttccacgggggcatgaaggtgaatgccatctccaaacagttgtgcatttcgcacggatgcgtctccaaaatcatcaccaggtcctccccccccccatttccatcggatggcgattcgatattcattttccaggttccgtgagacgggcaatttgatgccatcttcgcattcggaatgccgaagaaggaaacgccaacaacagcaacagaaaaatcatctgacaaatgggctaacggacatcggaggatgacggaaagaccaatcaatcagtagaattttacgcaaaattgtgatcaaattccaaaaatgggtaaaagaatttaaaaggctattggtaaatgaatctgaatcaatcgcatggcaaaattattttagcggaacaatcatttaaaatgccataataatttagaaaagtgattgtcaattaatataatttcattgatcacaatgtgtttgctcttctgctgctgccctattcctgctgataagagaagatcggctgtccgtccccctggtgcgaatgcgttttcgtcctcctcaattggtccgccacttcgtccctttctctttccacttggccaattttggcttcgaattcgctcattttgcgctctttgtccccaatttgatcaacgagttctttgatctgtgcttcttcgctgttctccgtctttttacatcattccctcccccttcttagttttcccccgatccgtccccccccccctcttttttaccttttcctccctcctcccaatttccgattcggcccctttcagcttttccgtcatgcttcggcattcctcttccagctgatcttttctgaatggtcctccgattcgattcgtcgtcctcccctctcttcccatgtcaactcacttttggtacagtcggccattgtcctccatcacttctctttgaattcggtctctctccctaaacctccggtcgaattccttcgcttctccgttcacttgctcctccaaaatcagtgcctttttcgtcaggtccgccttttctctttcgcactgtctcaattgtgccgacaattctttcattttggcgttgaacgggtcatttctgtgaccaagaggaattcgatgacaaaaa

SEQ ID NO: 9299 - DNA, 996 bp, Heterodera glycines
ccattcggtctctctctccgtccattcccatttcttctcctccattctttccaatttggtccttatcccttccacttccgtcctcagtccctcaatgattgcgtctttgccggcacaaatccgtgccaaatccgcaaagtcgcgacccaaaccccggttcaattcggcactcgatgaacttggccatcgtctgctgagtgtgtcgcttccctgtggtaagataccgtacgcctttcgccaaccgtatgttcgatcacctttctgtgtgtgcctaactcctctttctctcttctgccccattcttcctcgcttcccacagactcttttcgtcgctctttttccctgtcctctgctttccctgttgtattttgctgttccctctttctctgcccttccaaaatccacctgctgctgtcccattcgctccgttcatcatttgctgcaccaaattcacagaccgttcgaattgtttcgctgcttgctcatagctgccgaatgggaaagggttatgccgggcccctgaacaaatggaagaagcattatttcaatttgcaacccattttaattctaagcattcgatcagtgctgctgatcaccagtgatcagcagatggtccgtttcgcccacctcccaactccacaaaatattcccccgtgccgttccatcctccgatcggtggaaaaaagcgtcgtccgtcgaatttgagcatcacacgacaatcgccactttcctttgtttttgaccggtaataaacgccagtagaaagaggaaaagcggactgaacggaggagaggagaagcggaccatcgacgctttccaacgcgacttccgcgggttcgacactcagccggacattttggagaggcaaaacttggcaaatagagtgatgatgtccgagagtctcggttcgactcgagaaaagtctcgggtttttcgtttcggtctcttcttggtctccgagactcgacgaactttgacactaacactccccccccc

SEQ ID NO: 9300 - DNA, 3670 bp, Heterodera glycines
  unsure (1)..(3670): unsure at all n locations
aattaattntcgagttaaatgggtttgaattggttttttcgcgcgttattattttatttttttaaacgttaattaaaagtcaaacgggaaatcattaaccaagactgaaccgtttcgtgttcacttttattggccaaagctttactcacattaacaaaaatttctttagataattattttttgctttttttgaaacttcgattgcattgattgtgaaccgtgtcccttaaattcctttcttcctcgacgtgtctcgcgcgagttcggctaaaaataccgaaaaagctgaatatcaaagagcaattcaaaacagtggcaaagacctttctggtgagtgcataggttcatgacaatcaatttacacattcaatttgcaatatttttgctaaccggcgccgcagcgggaaaaaatttttaaaattcctttgtaatctattaaaaagtttaatgccgaaaaagaatttttttcaatttgaactgtatttttttaattatgcgtataactttttcaaaatttagatttaagcttagattttcgaatataaatttccagctataacggccgccgaaattttttaaatagtccatctcaaagtttgatttggcgatttttttgtcattttaggtgaccgggaataaaatttttaaacaataattgaggttaaacggcgatgatgggcctattgagaaacagtcaaattttataaaatttgtttaaaaatattagcaaaatttttcggaaagagcaacctcagacaggtcagtcccaccattgggactgaacttcgtaaaggtatgcaaaagtgaatatgaattgaactgatggcatcttgtttttgttgcctggtgcctctacacttttcatgacaaatttactgaataactcgaaacatcctattgttctggtatataaatgccattttccccatggaaacgaaaaaaacgcttcgaccattcaaaaaaaaaatttttttttttttttgcttaatcaaatttttttgcggcatttttcccaaaaaatcgtttggagaatggggggggggcggcggtgccgataggcgccttcgggaaaatttagaaaaattagatgtactttaacagattttcactaaaactaaaaatatctataattttctaagatttacgaatccaaattcttaaatcactttacgttttcttttctttatttatggtttcgtttccaaaattaatctcttaatgtttttctccatttaatattcccttcgaattgttcgcttcgtccatttcatttcatccctttgggtggtatcccttccctttccaaattcttccgcttgaatttgttatgtcttcggcgtggggtggaggactaagaatgtgtggcgtttcttccacttgcaaaattaattttaatttatcctccacaagtgaatataaaagcggggaggcgggggagaataatgaaagtgttgagggggggggggggtgagttcggaatgaatatatattggtgtagaaataatttttattctaccagttatcattgcgatttaaacattatttcttctcaacactttacatattacctcggcaaaatctttgacaactttccgtcttaaattttgtgtgcagcacatccatgaaacatcactttcaaggcgataacatgcagtttcatgcggacagctggtcttaaacgaaaatctcatcaagtttcggggccatgtcgtttcggggatttcgatgcagacaattttgaaattttatggcataatatcactttttttataagaaaattatgcgcaaaatttgcagattttttcggcgaaaacttttaacaaattttggcaccgcaacggccctggtgccgacccccaagttgcattccgctctcgcaaaaatcataaaaaaagagattaaacattttcataatccaccatgcttttctttttctatccctggattccttctgctccattccacccccccccctactcacatgacaggcgaatgatttaccaaaattgtaaaaaaatcctccgattgctccaactccaccagcaatcaatgatccgactgccgcacccactagcggagcggctgccaggccaaggccaggtaaaatgattgtggcaactaaggcaccaaatcctgcggctcctcctgcgactgtgcccatatcgcttgctattccttcaatgttttccgatattgctcgtctccgtccgtcataagccaccaaacgatggtccagctccaaagtccagtagccgtattcctaaaaggatcggagatgctcgggtcagcacaccgatccatgctttaacggatatatattcggatatataactgaagctcaaattgattcctatgcataacaatcatgatcaaaaatgatccaacgagatggatctttgttcctggtccgcagaacaataaatcaatatatctacctccacagtgatgccaaggatttttggctttattaaattaaatgcctttaaaaaaacttccttgtctaaatattttgggtttctataaatgaaatagtacggtttttgtaagaaatttcaacaaattttctttttaaagttgcaaatgatttttgttttaatattgttttattcagtacatcgaaaagatgtgaaatttttgtcaattcctagggattttaaatctgaaatacgactaatacagattttaacgcatttttcgatccacgtattagtgatccttggatccatgcattgtatgagcccgaggatccaattctcaactgcagatgaataggagggagattcaggacaatgaaaagcaatgggatgcagacgaggagagcttggcgaacagcaaccattttcaagcagtacaacgaaaagggttcgatctaaaattttccaactcagaaaattcaattgaaaaaatggattttaataattcagaagatttatgaaaaataacagcatttcaggtggaaagaaattattaaaatcttttcgcaaaatatttttcattttcagtaattttgtggtattttattaacaaatttagcaatttttgaattaagaaatgagataatcaagacaaaatgttaacaattattcccaaaaggaacctttctgaaaaaccggaccatataaaaacgatggtataaagaaaaaacgaattgtatataataaaaaatgcaatgtgtaaaaacaaaaaataataatttagactttatccattaacggtaatgaaaaaatatacaaaaaatgtgttcttcgtaaatcgttttgaaaatgaaatggatgtgcttctgctgtgttctgccgctgattgctgctgatggcttccaatgatgacgaagccgacaattttatttgggattacaaatggaacgacataatgaaaacgaaagctaatcatcattctctctcgaaaaaatcataagcactgctgctatactgcataattaagctggaattatcaaaattggggaaatttattcaacacaaaaataaaaaaacacattttttagcaaaaaaaaaaataaatttgtaggaaaattttttttcaaaaaagaagaaaagaaatgtttaaaatttagtcacttttaggatttgtgataattgataataaaaatggttcggaattatgcatatttttcctgcactgcaacagccagcagaaattcacaaaaaaatat

SEQ ID NO: 9301 - DNA, 1729 bp, Heterodera glycines
tgggtgtcaattagtctgctaattactcaattagcaggccgatcagtggttaattgcttttgcttattagaagccgccgttctcttacatttggctcacttacatggccatccaaaacagtgaggacaaaatgttgccgttgacagacatttacaatttcatcatgaatcgttttccgttttatcggcagaatacgcggcgatggcaggcaagtggcgatggacaaagggcaaaatgaaagaaatttgggttaattagtgtctaatttgagtacactgtgagcatggtcaattaagcagttcgcttttcgttcagaattcccttcgccacaatttgtctttcaatgattgcttcatcaaagtgccccgacgttcggataaaccgggcaaagtgcgttttttgagttttattttacattcttttgatgccatttcagtgttttctccaatgttttcctttctttcccctaagggttcatgttgggccattcacccaaaagcgattaaaatgttcgaaaacggaagttgccttaggcgtcaaaagcgattcaaagtgagcatgatttaatgatttaagtgagtttcgtttttgaactgtttcagctcgacccattcgcacccggacgaatgtcaaagcgaaaaaaaagcgaaggaggggagagaatggcacggccggagggacgagggagccgaatggcaccaggggaaagtgggggagaggagcggacagaaggggagacgagcgacgcatcagcgtacggggaggaggggagccaaagcgaacagcaaatggcacttgcaatgctggccatcaattcggcacttcaacacttcggagaggtgggccatctcacttaattaagtcggcactcattcgttagaaggtcggagggtggtcctttattttgctctgctcccgatccgtaaagggattgccatgggttgttaatgcaactccttcccgccccctccctcccgcgctcctcccattgctcttccttttcctttagctttgtgctcctcccattccgtcgcttcttcctttgtttgttccgccgcttttccctccgccgcccgctgtttccgattctccgcttcttctcaacttggccctgtgttattccacttgcgccgatgttaagctccctcccgctcttccccaactgttggccctttccctgccgtcccaaaggggccgagcagtgcttcgccctccccctcctccgattgtgccccttccgtttggcaatgccttcgccttccctccgccctcttttccttcctccccctccttttcttcctcctcctcttccaccttttccatcacttcgctgttggcgcaatgacaaaaaaatgcgaccaatgaacggacgcaaatgataaatgaaatgagcattaacggggagcaaaactgaccaatttattgtagaaaagatttgctgtatttaatgtgatagttcgcaattgcatttgatttgtcctttttactttgctttttgattttaaattcaggtttctccccttcccctccctctctctcactctttctccatcttatctttccctcctttttttctcttcgtttctctcctttcttacacactttctttcctcgcatctttttatgttctttaagccccattattattgttcatccccttaagcaatatgtagacaattattctctttgtccccctaggggaaatcacccaaaatccacccatttcccg

SEQ ID NO: 9302 - DNA, 5018 bp, Heterodera glycines
aaaaaaaatgaattgtattaaaggtaaaaacccacagcacaatccgtagccgctggcaaaatcccaccacgctttgaagcacatctcgtcttgtttacagaacagcgcctttttcttgctgccgtcgcttctgttcactcgatccaacagacaatctgttggcaattaatcaattagtcgttgctaattacccaattagtcactgctaattgcccaattaacacaaatcccaacttattcatttgaattagaaacttacgctgatttcttggccttagtccgtttgggcatgttctgctggtgtgtttagacggaccttggagtgatcgaattcgtgtctttttttgttgctaattcacttacaacaccaccacccggtgggcgcccgaccgtggcaaataattgcactttttgtttgttgggcagtgcttcttcgttttgtcgcatgcttaaatggccatttttgttgtgactttaattaaattcaattttccaattaatacaaaatattttttaaattttaattcccaatttaattttccgcttttacttatgtgactgagcgatcggtcagcacatctcgccgtatttcttcgtctgttttggatgattccttcagttgataaaataaaagtaattaaaaattggacggtgaaaagcacagaaaaaaacggaattcgcttcatttggataattaactaattaatggatttaaatttcactttcaaacttaagtatgcacacaattaatccttttgtttgtctaattgcctgaagcgattgacgaaaccaatgaaatggacggacggacggacggacggagagaggggagagacacctgagtaaattgcaacattgaagaaaatgaatggtaaatattcacaaaatgtgttaaatgaaataattagtgagcaacaggaaaagaaaaacaataaatgaccagaaaaagtcgaaaaaggaattcattaaaatatattcaattaaaaaattaaattaaattaatatttatttctttgattatttaatttaaaatgccatttcggtcccaaattatgtgccattcattgcccttattcttcttccacattttgttaacgatttgctctgtttgctctgtccctctcccattaatttttcggcaatttccccatttgcctttgggatggatttgtttagcttttcactaatttcgtcaattttaccaaattcattccaataaatcccaaaattcttaaactaatccctcccaaattttattcttttttttcaacgatgtttcaatttgcgctgtttctgctgttactaattgttgagttcgctgacattgctaatttatttcatttgtctcagttggaaaattccctcgggcaattcccgacgagtagcacaactgagaagacaatcacagaatatgtgccgtggctttaccgattcggtcaaaagctaatgcgtgagtttaagagacaaaaaatttaaaaattaaatttcgatggatcaaaggatttaaatattttcagcgtgccaagacaatattccatcggacgaatgtcagaagcatgaaaatgattgccaagtgattgttggaggggggggggaagcatagaagggatagaagaagcggtcaatggcaactcgtacaaaaggcaactcgtattttacaaaataaagcctaagcctaggcctaacctaagcaattgtacgagttgccctttgagttgccatgacaccgaagaagcgtctgactttccggaccaatgttttaccagttgaaccactgagactgcagtccatcacagaggggggggggactgattagcgagagactaattggccaatcaaagggtgactgatttgcggggaaagaatgggtccatcattttttaagtgcaactttccattccctctttcccaggataccataaagcgccgagagatggcattgttctgttgtggcacctgccgaactttgtatccgaattttttgccaaaacaatcggggagaaaataaggcaaatgcaaaagttgtgaagattatttcaatttttattttcattgcagaggaaacatcagaagcaattacgagaaagagcagataaattaaaatggacaaattttcttttattgttttattcacagggcgacaaaattaacaaagcaaatgaaattttatgataaaatgttacaatttctgggtttttatggtctaatcgcgagaagaacaaatcgaagtgaatgcaaagaaaggaaatgatcagaaaaagccattaacaagaaaaagcgagagataaacaaacacttgcaacaaaacaagaaaattagtgaacttttgataaaataatttctgaaattcaaaaagtttgtcatttcatcatttcttagtgctttttcgcgatttttgagtcatttaattttggggcgccggcgatgccgacagacgccgccgggtaacaattggaaattttggcctttttcaaaattcctattttgtgtctgtttggattaaaaattaatacattgaatgacggtctaactcagttgggcgcactccaacttttgatgctgctgctgcgcattgtgcagaatgtgctaattaattctatggcttatttggccaattgagcgatgaagcgagcaaaaattcctttgattttttgttggcgattgttttgcgtgaaattgtattttgataaatcctccaatgccactcctttgcctgcttcgcttcccttcccttgtccatatggcttttttcccatgctttatcccatgcttttcctccatttccctgtgcctcccctcggggcttacattccatgccctccctcccccaccccacccttctcattcatcccgttttcgcttctctttttgcctctcctataattcgattattctccccgtttatttcccaaaagtgccgcgccgtcgtaaaattccttcgtcacttttttcgccaattgcactgcgcattttcgttaattttttcacgccattctttcgagtttttcaggaatttccgtccttagccgcgaaagtgtgtttaattggattgacgattttagcgaagaacgatgtgcttttgttgtgttgcactgaggcggaatcgtacacagcggcggagcgaaagtatttaagcgacaaaggcaacggacagtcaccgaaagagtgccgaaagaacgaagaaatgtcggcacacgcggcaacgagcggtgccatcgcattcagtggagcaacagtaagttaatggcaaaaaaggagagggagggagtcaaaaatgggaaagtggcagagtgatcagcagtgatcagtgatcagtcactgctcgttaagctcgtcctttgtttgggctctctgttgtcggtgtacaacgaaatgcaaagcatttggggcgaattggacgtggagatgagtcagttcagggtgagagaagagtgttttgtggcaattggattaaaattaaatgtaggcccaagcggacggactttgggacgatttgctgacaatgggcgcgggcacttcctcaaaccgaaagcgacgagcagcgatcgaaagtgcggcggaggacgacaatttgccgaccaatcgaaaccgccgaaatgggtacagcgtcgcttctgctgttcctgcacctccttgcagtgagacagtgaaccaaactcgtaaatgccttaaattcataaagagtgcgaagcgatcaatccatgcccacacggagcggccgggccgccgggagacaatggcccgccgggactggcgggaatcccgggaaaagacggtttttccggggtggcggcgtcggattggcacagtgggccgttgaagggatgctttgtgagttggtcccacttgacgagttcattatattttcttacacaaagtcctattcagaattgtctcgccggtccgcaagggaaccccggcgaggcaggacgacccggggttcgtggaatgtgagtttggaagaagacaacacttttttgattggcgaacattaatttccaaaatgtgtaggcgtggccccaaagggtcgcctgggatgccgggccgtgacggagtgccaggactgcccggaatacaaggggacgaaggcgagcagggcaaggacggattgccaggaaagggcggcgaacacggacaggacgctgaaaagccaatcggacgacgggggccaaagggcgcaccaggagaacatggcaatgaaggaccggtcggaagcccgggcaacccgggacccatcgggaaacagggcccacctggtcaattgggaccgcgtgggttcgaagggcccccgggggcggacggagacgaaggcggacttggcacgggagggaaaatcggaagagacgcggcttattggtcggtttgggcagcaggcacaaattcaagacaaaggataacactaatggcattcattcagtccatgcccgggccgagaagggcacaaaggccgagggggcggcgcagggatcgaacacggaggggcacagagagaaggcgaatacggcggaaacaaaagtggtggcgcatatcgccgaagggtgcactgatcggaaaagcggaggaaaaggacgaagaaacgataaatgatttaaatgatcagtcaaataatcacaaaatccatctaaatcggaaacaaattgcccacccaattagcaattaattcgcttttgaatttctctaatgagttgttctcccctttttcctttctttctttttcctccccggacatttcattcttttaattaaaattaataattttcaatttaaaccatcctaaaataactttgtttttaataaaatattttatttttgtctgctgttttttgatgaatcggtcaaaggcaaaggcgcggagagcagacgcaatgcaaaatgttatttagcaagtgacaaaaaaggaaagaattgggaatggccactccttttgaataaaaactaattcggtggcattttccgggagggggcgggggagggaaaacgaaccggggaaagaaaggaccccgcggggggggggggga

SEQ ID NO: 9303 - DNA, 1307 bp, Heterodera glycines
cgacggaatccaatttattttttcttttaaattccttttcaaaattcactcctttccatcgttttcacagattgcccatttccgactctttcaatgatttgccaaatttttttccctttgcgccgactcactttttttggtcttaagttttcgaattccttaaaattgcttaaatatatatatatatatatattttttttgtcagttggatcatcgttgattaattagcagttgttaattgctccatttaattgtctcccaatggcatttgtccaaaatgccctttccctttgcctcctcctctcttttctcaccagtgtcagtgcgtatccaaccttttatatgatacagagtcttctccagcacccacaaaagtacacatttcgctataattaatcgactaattaattaattgctttaattaagtgccccccagtcgtcggccggcgtttcgtctcttccgcgtcccaaacgcgcgttcgaccgcctcgacgcgtctccgttcgatttcgacgcactttcaaaaaggttcaacgacaacgaagacgacaaccaattgttgtcggccatttcggtgagtgaaatgaacggccaatgcccctaattaatcaactaattgactgaattagccgacttttcagctcgacgcccctttcgtttcctctccgtatatttttaaagcgcttcgaaagcgcgccttcgatcgattggaaaagggcgcctttttttggccaacgaaaacggacatttggccaaacggcgagcgaaaacgttgactcataaaagtgacaaatgaacacttttgtattgtatttgtggccattcacaagtcaaatgattaaatccgttttctacgttacaactttgtgggtcagctgaaaagaatatggaaattgaatcgtatttttcacaaaaatgggttactgtaatggtattttcaagtaccgtagttgcaaaattttttggcttaacgattggtatcattggaaagcacattagctacaaaaaagattaagattgtacgtctaatgaaccacccgaaccaaaaatgatcagaaaaattgatcacatgaaaaaagccagcaaaaattcttaatttaatctttttttggtacagcagctcattttccggacgcaatgtttaattttgaaattattggcacccatatatagtatttaaaggatatatataaaaaacaagtctgagatcacaataaagaacttggaataatttttatcctatccaaaaactcaataacaatgcaataatttgatgaagaattttaaaaggctacatgacatttcgc

SEQ ID NO: 9304 - DNA, 5255 bp, Heterodera glycines
  unsure (1)..(5255): unsure at all n locations
tcgatttttcacaaaaattgggtgttgattatgcagttgtagtcatatattttatttgcaaaaactggtctgttactattatgtgaaaaataattttttaaggttaaggaaccttaatcattttgtacttcactgtgttccatggcctggggacatccaaaaaaatcgtgaaaatatttcgggatttattgatgacgtgttagaactttatgccatcaaaaattgccgaatttattatgtaactgatgaaggcagcaatttatctcatttgggtgatcgagaaagtcatcatttttgccttgcgcatatcatttctacaatttgtcggcggatcactgaaccttatgtcaatgcgaatttaacaaacgaaaaaaagcagattgttaacttgtggaaatggtgaaattggaaaattcgtggattgatgcaagcaatcaagaaagtccttacatttctacattagcttcttcgggtctagcggcatttcacaaaaaatttcggcagctttatgggcaacaacaaccaactttaatcagatgtgcggcttttttggatcctaatatttgtgcagttttgccaaaaatcgttgcgactaacagcaattggggcaaagttgcagaggtaaacgttaagataaatttaaaaatgatggaataattaagatttgtgctaccataaaaacagttgcacaaataagacaccctgattgtaattcattaattcctcggccttgtacttcgccaagtctttctggttttgatcgttctccgagagcagcgattgacattgaaatcgaccgatatatgaatttatgtgacagtctttttatgaaaattgatccattaaaattctggtccgaaaaccagaaatccttgccaattcttgcatctcttgcgcgcgaatttttgggcattcctgcaacatcagtgagctgtgaaagaattttttcccgatttgctgctttaatagttgattttcgtcgaaataaattagacccatttcagatttcccgtcttattactcttcaatccctatttcgtgatacttaaattgtgtatcatttaataaattattttttttgtttgtttgtttttataaatagcttttattaaaaattattcaacgagaataaataaataatggaattcatttttaaatttttaaaaattacgttgatatttaagttgatggcgtaatgtttgttgatttaattaaatatcaacattgaggttgattctccgcaaaaagtaataaaaaggttgatttgtcattctctatatacgcccctaaaaataggaattttcaaaaggctaaaggaggacaacaaaatgccacaatttttaatttaattatccctttttcattcctcgtttatttcttctatcactcatttttggattttcactttttatttcccaataaattttcattttttctattttttgttcctcctttattcttttacagcgaattccaaattgtttcttccatttgttaattatgtctcggctgactccaattttcttacaaatttcggcataattttgttgccattctttttcaacatttttcggcgctaaaatttcatttttggccattttacaccaattttctgatataatgaaatttcataaaatctctttaatttttctaaaatctctttacattgtgaatttattttttttttattgaaatatgtttattattttcgaatgagcgccagtagaaagtaataaaattttatttaatcattaatttaccaattggcaatttttttgtcattaagataaaattattattattatttctttgaaattaaacaggatttccttattttactaagtaaaataatgatttattcagttttttaatcagaaaaaatcatttaaatgcctcaaaaaatgaattgtcatttaattgaagaaaaataaaataaaatcatttcgagacgacaaaatgaaattatttccgctactattattaattatattatttttaattgtaaaaattggatcagaaaagaaaaaattgcaacaaaagtcatttggcgaaatatttggagaaaaatggcaagaaaaagaagaagaaaaacgaaatgaactcaaaaaaagagaaataattggaaaatattataaaataaaagagaaaattaagcaaaaaggaagaaaatactcaacaaaagaatggaataaaattgatggaaaaatagcgaaaaaattggggacaaatagcaattatattcaaaaatggatcaaagaatttggtcttcaaaaaaagaaatgctataaatcaaaaactgatgaagaaaaattagaaattgtgcaaaaattcattgaaatgacaaatgaatataagcaaaaaaaaaaatattcgcacatcgaatgggcaacaaaattatgccgaaattggcaagaaaattggagttagtcaattcacaattaaaaaatgggaagcaacaatttggcatacgctataaaagaataacggagaaagaaaaaatggaaaaaataaaaatttattgggagaataaaaagcaaaaattcaaagatgcatgataaagaatttgccaaaatgatggaaattgatagaacgaccatttcaaaatagaagaaacaatttagaaacaaaaatgattaaaataaaaaatttagggaatttggagaattattttcgaagaacagcagaagaagagtgattattagttggagcatttctttttgaaaatttcgcatgcaaattttaatttttctttattttttattttaattaatttttgaatttctcttaagtttttttgtggaatttagatataaacaaattttgaatacgttttatcaattaattgaattttaaaattcacaaaatacttttaaagtaatattatttccacaccgatattagggatggggagggaacagggctgggcgcaaatgcggattacggaaattgcggggtttttggagttgaggattacggattttttggatttttccgcaattttgatccgtaatttgacttttggattagttttcgagactaacaccttaatttgggtattttgcttagaaaatagcggcattctttttgtcgcacctattcatattttatgaaaattcataaaaccatagccatgggatggtgatgaattccctccaccaaaatgaaaaatgaaaattttccaggaaaaattggcatttttttaatttatcgatttttcttaataaaatcattaaatttcaaaaaaaaaaattttccggcggcgcctatcggcaccgcagaccccgattacccgattttaccttatttagttgctcccagccctgatgggggggaaccggcatggaccggattgtcataaatcaaatccagttttgccaagactaaacccggaatcgggaatacgagactcaagtcctgattttgtttagagaaaattgtaccatgcgtcatttgagggatccggtcggtgtgattctttcaaaatttagctaccaatttgcgtttttttggtacttttaattaaaccaattaataaataaatgtattgaaaaattctttattgctatgaatgataggaaaaatatatttttttatttcaacaaaaaaagtaaaaaaattttaattttcaaatggaaatccataagaatcctcgacctaattattatagttttatttactagcttattaccaggactgtcattctttgttaactaaaaaacagaatatatttataatgatgaaaataaaataaagtatttggaaataaattcaggtgaaaattttaacatgtacctctctctccattggtgatttttttcaataataataattaatggttattaattacattaagccattaactcgtcatctatcgattgaaacaccggccaatttggctgatgccttgggaatgcacactccaaattgggctttttatcactacagttcgcccaattatcggtcagcgtggccatggcgaatgttccgtgaccgtttcgatgtaagaagcaattggcaaaaatgcaaaaccaaattaaatgcattttttggcaaaaaatcgtcataattttctcgaaagtaatcaaaaaatcactatatttttctattaacctaataaatttatgaaaataaattattttttattaaaattattttaatttgcttaaattttaaattttactttttactttattaatgaattaattaattaaattacaaattttatctagtgtgaacaaatcatgtacaataagcacttttctgtgcagcccatctacagaaataattaactttaattaagacgatcaaaaaataattaaagtgaataataggcatagtttcatattaattctttgattggttcttaaatttattatattatttgggtgatgtaattccgtcacaaaaaatgtcaattcaaatttacgcaaaaagaaacataatgccaaagaaattttttattgtaaataaatgaaagaaagattatgggcgcccccacaaaatgtccaagccacgaaatgtccaagccacgaattgtccaagccacgaaatgtccaagccacgaaatgtccaagccacgtattgtccaagccacgaaatgtccaaaagagtaaaaacccacgaagtgtccaaaactcgaaaaatctattaaaagccggaaaatgggtctaaattaaggtgttaggggtcgctgaatacgaatacgacatttatataacccatttcctaaccttcgacccacccgaataagaaaaatctcaaattcggttaaaatatatgctgttttttgtcttcagattttgttattcattgatcgaacaaaatgattcgtaataaacttgaaattctacaaaaaagtcggaagaagcgttatttgtcagacatttcaaacacaactgaggaggccgtgaatttgggagtgaaattcgtcgaaccgaatgccgtgagaacttctgacagcgttgaacaaccgaatttgaaagaggctgaggtctcaacaatgacttttgagcgcggaaaaaccaattttgggggagattgcctatggttgaacggtatgtttgaagtgccgcaaaaaatttaatttccaaactattcaggatttgtttcacacacctctcaggaaatcgctgaagatgcacaaatcgagttgctcatcatatgaaacatcacaaacaatggcgaaaccgnaactactnnaaccttnantcaaaaanaacacacccacctccctncacctcataaacaacaaattt

SEQ ID NO: 9305 - DNA, 4597 bp, Heterodera glycines
agtgacggacaaagcaacaaataaaaacaatgataagcatcttatatgaattaattaagaatgaccgatcgatcataatttttcagtggtaataatgttttttatggaaaaaacctcttgaatatataaataaattggatgtataaaaatgtacaaaagaaaaattttgagatttgcacaaaatatcaacaaatttctggttccggtaactcccgtactatttctttatctatgttagtagtgaaaaactgaatgtacttcgctacgtttaacttttttctatacgttaaatccgcttcaaactttgcatatgatggagaaaaaaaaataagaaattgtcaatcgcttttttaaaaaaaataatcgcttttttagtctaaaatttaaaacaaaattttctaacacccatatcttttttcgaattcatcaaatcactacgtatttggttagaaaaagcttctcgttaataagagctttcgaatgatatcaagattgtccagtttggtgggcaaaaacacttcaaaaataattcccaaaaatctattttttaattttttggacaaaataaaaaaatattcatgttgcacaacgggttcgaacctccgccctcctcctcccatcccttcactatcttacaaaaaccacttcaccatacatgcaaatctttttggaactgggaggctaaaattgaaacggtgtgaataaaaataatcatttatgaatttaatattttttatttttttaaaactagtcaattttgtaagcacaatcggaatgagagctagagtttaagtccaattaagaaagccgcacattttaattaaattattattttgtgggtcctttgtcactgcaccgtttttatatctctactcatttgtcagcaccatttgggtcatctctgctgatgactcatcgataaatgacctcatttggtcagacagagcatcaataaacattcatttttctttgttaaaattatattataatataaatttttgaagaacaaatcaggcacatcatttactgcaaaagtgccaaaaactgtctaataatttgcattaacaaaatgtcagacaaccgaaaagaaggagaagaaaaaatggcaaaagccatgtaaaagctaaaatttcaattttaaatttaaattttatttttcctttttcagcttaatctctgccgattgtttgttcaaagtgttcaatttgcttccgcctactcaacttggccttggaattgcactgattagccaccgatttgactgttttgtggacgaacatttcaaaacgctcaaatgggcgctaaaattcattcgaatttgaaacgaaattggacagaatggcgcaaaaaaagggaatggaaattgtcaatcgctttggaaaagcattgccaattccgaaaatccaattgcctcgtaaagtcactggatttgagtgcatcaagatctcgtaaatacaaataaaaatcccaaaatttatgttggcggcgcctatcggcagcgccggactcaaaattttcaaatttttatccaaaaaacgcaaatttttaggaaattattttaaataaatcagtaaattcaaaaatttttccgttagaattatctatccttcaataaattattgaaaattttttagtttaattgaccgcaatgccatcgcttttctccaacgttttcgccaccttttctccgtctgtccaattaatttgatcaccgatatgttcagtgagcgtattttggagtttattttgcaaaacatttggccaatgatcgcgaaaaatatttgtgcgatatatttgatgaagtacactttccgacatttgcgtaaattcgtcccgacaattctcgacgattgtccatcacttcgcattatctctttccatgccggtgtcgactatttcttcaccgaatttccgcccgatgacagtgccatggcatcggatggacaagcgctggctaaatggcttctcattccccacccggacgatgtgccaaaggtgctcaaatgctggttgaacatggaaaagggaattggccgttgaaaattgcagcgttcaaagcggtacataccgtaattaattaaattttaaattttctcgattttatgcatttgtcaatgcttcatctcatgccaatttcattgctgtcgtttggtgtcctccgtcttttgctgactctgttgtgccatttgatctgaccaacgaattgactcgggaaaaactggcgcttaaaaaagtgactgtttccacccttttctgttggtccgttgtccaattgcgcgagacgcgagcaaatgggcaaaatgggaagaggaagcgattggctggtatattgatgatcaatggaatcaaattgacataaaaattttcactgacggcgacatcagggacgggttagcgaatgcttattaaaaaataaaagtttattcagttttttatttttaggcttctcaacgcaactcctggcccaagtgatcagccgaaatgaatgaattgtggcgaagtgatcgatcattttgaaattaagtaattattgacgtgtcacaattgttctatgatcaacctgcatctcataaaatggataaatattgtattataaacaatttaaaagccaacaaaataataatcctaaaaaataaaaatttattttttggtgataaaccattttttattttcaagtcttttttattgattgcgctaattgcctttaattggccagttaaagcatccatcacttcagcagagattatatggattttcaactaccttttgctcagtaatggaataattagacattcattctcgagtctaatcacataaaagttttagattcttcaaggtcgggagtcgtttgatcaagtacgagtattattcaatttaaaatttaaagccaaatgttaacctaattattagggataggaattttatgtaaatacatatttttaaaataaccatttaaaaaattttatttacatattttagtacatattaggggtttttgtacatatttcatatatattttagcattttttatacatattttatttacatatttcgcgatttttcttacataaaattcccatctctactaattattaaagaatttctaattattcaattttccaaaatattttaaatatccaattttcgataaaagagctgtcaaaaattacacctaattaaatcccaaaattctgccaaaaaaaattggccattttgggtgctaagtttaaaaaaaccgcaaaatttctcattttttaataaattgtctagaagaaccacacataattgtcactatcattaagacaaacctcctctaccggtgtttaattagctcgcccctcccccattattttgtgccgtgccaatttccgtttgccatgacaaccaaatgcccccctctctcccccgttccattctcccctccccctcctaacccccacaaaaaggcattatttttattgcttacctattttcatattttggtgccatcctcgtcacatcccaaatccatccccgcccaaactttcaatgccgaagccaatcccatatgtgtttccagcagattgtacttaaccgtgtcggatctttgttttacaaaatcacacttttattggtttttagtaggtgaaaattgttatagcatttctcataagcagccaaattaagcagatttgaatttggtattttgctctgatagttcccaattggctctattcgcatggaaattttcaaaaaattttgttagagttaaaaggaattgaaaaaatattcttttttggttaaaacttttttaaaacaaaattttttgaaaatattcatgctaatagagcaaatcaaaaactatctatggggaaaatgtcaaatttacttcatttgctgtttccgataaaagctacaacgattttcatttaaaaaccataaaaaagtgacgtttttatagctttggtcatgtcttttgctcttatagcaaaatctcatgtccttgaaattgtccttgctttaattacccgggacgacgtgtccttagtgttcacaattttccttccttttattatcattgacaattatctctgcccttaatttgtccgttaagaacagttccctaaccctggttggccatgtccttgccccgatttccttgcgatgacgtttacttaattgctcacatcattgggcttttccctttatttggtcactgacattatccatgcccttaatgtgcccgttaagtacatttcccggactctggtccaatgtccttgtccccgccctcgtcctggagcagtatttctgccactgctgctggtggaggtgctggtactgcttcaacagctctctcccctccgctgctcattgcccaactgtttcttgaccgtctctcctccccatgggagtcccatttcaactgcacaacgcccgtccaaattcgttttgtgcccctttcatcgacggtaaaacaaacaaaaatatttattggggtcggcgctgattcatatacaaattctcgggttcaattcggactgatcctctccatattcccgattgcgtctcaattctcgactcgagaaaagaccactcgagccatttttaggtatca

SEQ ID NO: 9306 - DNA, 4487 bp, Heterodera glycines
gcgccaagctgtatagcaggggatgacaaatttgtgagagagttgcggtggttgttgatttctctttgagtcaacaaattgtggaattgctgttaaaagctgcaattttatttgtcctcctctttttttttctgcttccgaacgggcgtcgccaattttgttcggtccacagaatgggtgctaagccaatgtttagtgtccaacaaatataaatatttattttgggtgaagacaatacaatttatttagaagaaaataaatgaagagaaattggggaagaacaataatgtcaattgcacaaaaagtgaactgaatagggaagagtgaacatgaatgagggaaagggggaatttaaataacaaacgaacagaggggaaaagaatatcgattgggtcaaagggcattgcgtgtggcgttatgttgaccacactcgaaagccaaagggcgctgcccctaacagataattatattgataataggtatgcacctagatttgtgttcaaaatatttttcttgaaccgttttttcaaaatttcttgatgctccaatggggccctacaagcactaacgggaaaatttttcgtcaatttaattttaacagatttttttgaaaaattgcaatttttaagatttttatcaaaaaaatgagaataaatcatcataatggatgtgtattagtagcactcagaattttatttttaaattaaattgcattaaatttttgtcagattttcatgtgctgctgccgctgcaataactgctgaggtcggaacaaaacggagcttaaccaagaaatgaaaatggaaaaagaatagatcgtcgcattaatttggacaaataattttttttatttattaaacataaataaaatgcgaataattaattattttattcaataattagggagaaattttaataacagtcaatcaaaattcagattaattttggcaaaaatttggtcaattattttttgggattttgtgtgaaatgaattggatccgcagcatctgctgtcattaataaaatatggttcaaaatccattacatttctaaaccctaattagataaatgttgattgaattcaaaggattaagcaataatttaggaaaaatggcaatttaatttttagaaatttattaatttacctaatttcgatatgaaattttaaaaagggcatttatttttcagggtcgggaaataggcccaaaaatgtcgggggttgagtcgagggccgggggctcggagtcggggagcagttctagttttaagccgttaaattgatcgttaattaattacctaattgtaaaattaatgtataaaaatttgtaattaattaataagaacttattaggctaatttggatgaacaaattttaattaattatttgaactgctcaactataatacgtcacattgcacattaacaatttacttctgataaccatgaatttgcatattttaaattgatttaattttgaaaaataaaagaaaatttgtgcttttttgagttttgtcttctcaatttattttccgccaacttcttctcaccaataaaaaattagagcttctaaattaaaagtaaaagtcattgtttttaaatttatttttttttgtcgggttattttagtattaagaaatttttttttcaaaaaaaagtctcggcccgtgtctcgtcctagttaaagtctcggcttttttgtgtttcgaatgctgaaaattttaaaatttccagtcttgagtattactggaaatttatgtgctttttaaactgaaccaatagtttcaagacgaatttgctcaaaaaattcgttgaaattattttttaaaattggagatagataattttctacggcatttttgtcatttttttacatatttaaatccaattttggcatttaaaatttccacattttcacattttcttaattataataataacaataatgagacaattacttcccaatttctctgctggaataagcatttagtgagcagtgtttttcttttcgcaattaaatttatatgtccatttaattttaaattatttttgaatttcaaatttccattttcccattaaatcatttgcatctttcgaaacattttttgtcttcggaagaacagaaaaaaaaaattattttgcccatccaattcatccttctttctgctgctgctgattcaccatcatttttgcatctttttttttaccgattcattatttttcgctttttcgtcgccttttttatgaataatgttttcccatttgtccattttgcgacttttcatccctctttttatgaataatgttttcccatttgtccattttgcgcctttttgcccgcttttgccacatctccaatcgcattaatcagcgttgttagatcatcaaaaatgtttcgtatatttcgtaaaacaaatgcgaaaataggcggcccatcatttttttgctataaatattcaatttctgaatagacaattcattttcaaacaatataaatatatttttattcaatattttaactaaataataatcattaaaacataattcctaaaattgaaaattttttttaaattaatttaatctaatttttcattcggatatttttaaatgcaaaaactatttttaatgaaataatttatattcataaaattaaacattaacatataattcctaaaattgatgaaattttatttaaattaatttaaacaaatatataataacattttttatttttagatttgtgcaaattgtcttttttaactctctgttacaatgtcttccatgtatcatcatcttctgctcaaaatcacgatgtttttggctttcgcggcggcgcattttccgggtaagcaaattcttttttaaattcttattattattataattatataacgaaataattcatttttaaattaccgtattatttcactaccgtattttttcaaagattgagtctttttttgtacatatacggtagtcatgtgttttttatatttatttttcaattttttagtcgcggctatccaatgtgtgtccggcatggcacttacatacatcaacaacagcaccggcgctgaaaatgtcacgatcggcgttcagcagatggtcaagtgccaccacggttgcgttcgcgcggtttgcagtgtgaacttgcccgaactgagcgaccactttggattcaaaattgtccatgcgtttggacacggaacttacagtaagtccgacctctaatgtttctttatggatggtcaaagtaaccgtagaaatttgtatcagagtagtggtcccggcgggaatcaaattgaagggcaaaaacaattttttttttttttttttgggttttgccaaatttttttctcaatttttgttgaaaaaaatataccataaaaattttgcctttctcgcaacgcctattggcatccatagcccaaaaatcacactccgccccccctggccctcaattcagcaatgttttcccactttttttttttgaaaattgcgcggcgttttttgagtttgaaaggcatacattaaaatatgccgttactgggcgaaattaattttataaacaacaacaaaaaaatcctttctgccccattcagagttgtacgggaatcggccggttgcggttgtcagcggatgtgcggcaccgaaaaatggcacggccacggaatcggcagccgacattttttttgggaacggaacgatcggtgggaccgagtgcaagcaagtggcagtgtgtaccactggtgaactgtgcaatccgaaaccatcatccgcgagccgtacttcatctgctttggccattgcgtttccggttgttgtcgcgcttggtgaacaataaaatttgttgaaaatttatttaaaatttgcatattttcttttcagtctcctccatggtgtccggctatgtgcagccgttctgagatggcgtactgatggtttgcgaatgagggaggaagaggacggaacggacgggcaacgaagaatacaaggaggggaaacgatgaggcaaacacaaagaggatggaacaaaaattggcactgtttttttaatgtgatgagtgatcagcatacaaaaacccaaaaaaaaaaaatatatatatatgctttgtaattgcttgtagaaaaataaacagcgctttttaaaatttcatgtcgaaaattttaaaaaaaaattatttctaaaaattaaattggcatttttcctaaattattgctttaatccttcgaatccaatcagcacttaattaaggtttagaaatgatttctttgtccgataatatttttcaaaggaaataaatatttcaaaaagcaaacttttgaatttcaatctcaaaaatttatttttaaaatcaacaaaaagcgcgctgcatattcaaaaacagcgcttcagctttttgggagtcattaaagcaacaatttagcccaaaatataatcgaatggatccacatggcgcacgctctttgttgacaatgtcaatttaaat

SEQ ID NO: 9307 - DNA, 2110 bp, Heterodera glycines
tccaatttaaaaatttctattaattgcaattagtcaatttctcttaaatacttttacgttaaatctattataataataactgttttattgctctactgtttattcacttttatttgtatatacttgaaatccatatcattccttggacatggtaatcgcatgatggtgttaaattattttgtacggcatcatagcatttattttttttttatttttagcgattaaagttttatgatgaattactaaatgtttcagaaattttcccaaaaatcaaaaaaaaaaatttcttgtataaaaaatgctaattgtaagattttttgaaagtttctgtctgaaaaattatgaaaaaagcgcaacggagtcgaaattttatggcattaatttgaacaaaaaaaacgatgaaaaatgttcccccacttggaggtcgatgtcggcaatttcccactgcttcagcgggctcagttcgtccagctcggccaaatggagttggaattggcgcagattgtcccgcaaatgggcatatttctcgctgggaaagtaaaaatttaggaaaattcaaaaaaaaaatgaaaattttagacaaaccataaatttttcgagtaatttttggtacttgtctagtttaggggacagatttcacatacattttcaaatgcctataaatgtgttttagaaattagtgaaaataagttttaaggggtattgggggtcgctgatcacgaatccgggctcagatcagcgctaccattcattataagagctgtacaaggacaaagaatttataggcttcctgtaccaataataccctcatgggtaagatgccaatgaggatatcatccatacaaattttctaattttatttttgttcgagtccgggtcaggggttcgaaattgggaaaaacggatgctgcattcgtgatcagcgacccccaaaaccccttaaaacttattttcactaatttctaaaacacatttataggcatttgaaaatgtatgtgaaatctgtcaggaaacttagagtacccaaaaccctactccaaaatgccaaatttgtccacaaacaccgagcgaacgtgcgaactggtgggaagcattgtgacgatttcaatacaatccgatgcaacttctgctgggtttttggcaattttcagcgcagatggtccacgttccgactgaattgtctccaactttgattggtcaacatcgtaaacgacgagttgggcaccgcgactcagcaaattccgggccatgtgtccacccatatttccgagtccgatgaagccgatacgttgcatttcaaaaatgggaaaaatttttagtttgtttttgaaattgcggattttgcgggattaatcccgcggggtcccatgccgcaaaaaaatctgattacatacattcacgcacgggatgcgaaaatttgtgtttgtgcgtgattccgtgagatccgcattttttgaaaattctaagaacattatgccaaattgcgaaaaaattttaaatttaacatttttcattacaaaattttcattcaaaatatgaaaattttccctttgttgcaataaccgattcaaaaaccgatattggagaggaaaagcattgttagaagaaaatgaacacagttgcaacatgacacctttattcatttcaaacacattaagaatgatcaattaatcaaccaaccatcggaattcattaaataaatcatcacggggaatttgatgttgagattggattttgtgggtgttatggcgctatatgggggctttagcgatgtctttttattcaaacggctttgttaatggcgcttcttcaacggattaagagaaccattgtgtgaaattgagacaataaacggggaaaggggacggggtggtcatttatttggttccctcccccttttatttcttccctccttttggccatgtcttttaatgttgctgctgttgaaggcccttaatgcgtgaagagatctcttccgcaacacagctaaacacgaatttgaactgttcctcattctccaccattcccatgcgttggtctctcaaatgctccaacgaaagcggcgatgttccagtccttcaccccctgaataactccgttgatcaattgg

SEQ ID NO: 9308 - DNA, 2762 bp, Heterodera glycines
atgccatttgccaaaggtggccacggtgttctgttgctttgcctgtgccacaatgtatgtcggctctgggttggcatcaaatattttgctggcgttgtaataagcgggagagtgctcggcaacggatgaggacacgtcaattagcgtttccgtggagttgaagccgtgcagagtgaccagagagtcatcgtctgaatgtgtggtgaactatgccattatttttcccaagtcgttcggtactcacatggcagcactgtcgcgtccacatttttcgccgcattttccgctcgccgtgcgaccgtcgcttcgcctgctgcgttcgcgtagtccttcaccgactcccactctttgctgacttcgcccggcttttccatgtgctccttcaaaaatgcgagaaggacatgtcccgtgccgatgtccaattgctggtcggcaccggtcggtgccgacaattttcgcaggccacgaggaagtgcttgagtgtttagagcgatccccggcacttcgtccgctgctgatacgctgtgaaatgttgccttcctctgcgattcgctgacggcacaaatcgtcgcaaactgagccgcctgctttgccgcctccgtctcggcacggtgccaaaattgggccttcttgacgatgacggcgcattcggaccaaattagcagccaacacaacgagaagggtgaagatggtcatggcggaaacagccattattggcacgaacagccaatcgcgctgagaacgctccaccgggacgacgtcctttaattggttggcaattagcgtaaaagacatagaatcatcgcttcatccacgccttaccactccgcttccgatgcccgtctcatccacgcggatgccggccaacgtttggatgtccttccgtcgtttgtacaccgcctgcgccactccgctcgcattttccaatgcggcgtccgcgttgccgtcctttttgtctttgttcggttgcaacacgccgaggcgagaaatgcggaaggacaactggccattttcgtagaggaactcgtcaaagtacaggttgttcggctgcgcaatcttcttgtccaggtagccgatcagcttgtacagctcctcctccgtcagctgttccttggccaccttcaaatagacgcggtttccctccacacgttggatgccgcctttcacttcaaattgcaaaatgcaaatgcaattcattgtgggcatctgagttaccgattttgtgcacagtgtttgccaggcccatgtcggcgttgttgaactgctccgagtccttcttcagcaacagcacgtggtccaccgcgtcctcctccgtcggctgtgctgcttcggcttccgcgagcagtggcggcggcgcctcttcctgcagctgttcctcttgcgcttcgttcaccgtttcttcaactgagttttcaattttcgtccattgtttgccgtccccctccgcttttcaccgttttgcactacgttttgcagttggcgaatgaatcgtgccaatcggctcagctgacgttcgcttagtgcgcccatctgtcgctccgccgctggtcggccgtcgagcaaattgtgaacgaattggtccaactcgacctcctccgtcgcgctgagtgcgtccgttgtgcgcttgtccatcgccttttccgcttaaaagcattcctttgcattggccacccttttttcagtcccaccattcgtctttcattccccccgccccctccgtccgttcatttcttcgcttacctttggtttcgtttttgctgccggtcttcttcggcacttccctctccgcttttccgtacatttcgtatgccattcggtcttttccgtcttcgtcctccccctgccctccgtccaacacaacaattggtatcacttccacagcctctcctccgtcgtcttccgccgtttggaattgagcttgtccctgtccggcagctgctcctccgtcccccgcttcatctcgcgggtcggtgacaagcagtgattccgcctcgtcctcctcttccgcccgttcgatttccgcttcggccaaaagtgcgttttgtaccctctgaattggcctgtacagtttgaatctgtttaaagcatgggactgacctgaatcagtgcccaaatgttctccgggttgcgcaccgtgcagaactccgtgtcgtagtccaagcgaaaagccacggccaatttgaaataggccaacacgcactgggcacgtgcgtccggccaatccagtcccagctcggccagccgagtcagctccgcacgaagcagctccgactggacgccgttgatgggccggtcgaggaccagcggcctgaccaaagccgactcatcgtccgaatagcactggccgaacagcccgtccggcaaacagacttcgccatcggtgcacaaatcttcgctaaagtcgcaacctgaatggagaaaggggttgtgccaaaaaacattccctctttgggcccatttggccactctttcgcaaattaattttggcatttgcatatcttcaaatgataattgtcttgtctatttgtgttttcgttgtgacaacggccaaattattcaacaaaaataaagcagtaaaagcattggcaattatttgccgcccttttcctttcgtggcattcatttggcacgaacagacgacggaagggcgggtaattaatggagtgaggagttataaggacaaacatgaagaccttccaccaataaaagcttgttagtaattcaaatgaggaagaggagaggggaggaggggggggggtaag

SEQ ID NO: 9309 - DNA, 978 bp, Heterodera glycines
cccccccctctcaccgggggaggaggagggcaaggcttcctccttcccgcccccacaacaggggaattgccggggggggctttacgttggggaagacaatttgtcaatggtggaattctcaaaatgaggacaatggttagtgttacctcattaacaactttgtttttcaaattgtctccccctccctccctcacttttccttccgtcccttcccttttgcctttccctttggctttttctcccccatttccaatccccccctttccccctctttttccctccgtttccatgccaatttttctcatttatccgtgcctcttgccccaacttttgtccctatttctgccatggtcaaataatgccaatttcttctcgaacacccaacgtcactcaaacaaagttccctctaattgagtccgagtgcatttgtttttgttcctttggttaaacatgcaaaagcttgccggaaggcgaattttatctcaggccaaaagcgaatgggccatttattgacgtagggacggacggacttttgtcaaaactaattgcgtaagtgttgtccatgcgcaagaggggggagggcatgacaaattatggcaatttaatgcgaaaatgtgcaaattggaacaatgccaaagaaaaagaaaaagaaaattgtggatttgcacaaaacataaacagcaaaattggagtaaaaaaacggaaatgtgaatgagaacggtggtgtactgatgggaaaattggccacatttggccaaggcaaaggaaaagttggcaaacattgaaaggaaggaggggagacaagaaaatcccatggaaaaagaggggacagaaaatgagacagagaacggcacaaaaggagggagtgccgcctacacgcacatcaaattcaaatttaaatgctcttccgtcagccattttaatgaataaatggacgagggaatggctaattagcaacgtaaatgtcgcgttaatttt

SEQ ID NO: 9310 - DNA, 2056 bp, Heterodera glycines
atatgttttttcacctgtaccgaatccaccatttgtacactttgctttttgcgagcaaattttcctggtaataattgaacattgtatctttgatcactttgctgcccattctgctcaattcgtgccgtgccaattccccactcatttcctcctcaatggcattgccattggcaattccttcattcgcttttactttttgttgccccattttaccaaaacatttttctgcaattaatccattggtattccaaactttgtccagaatttcatccaacaaattttgaatgtctttttgggcggaattttgaaaattttccgtaatttctttcacaatttcgcgcccatttttcgccattatttccattgaatttttgtgttgcgtttgctgttttaatgcttcaatgaaatcgccaatttcagtaaaattcaactgaattttcttcgttttttcgtgtttttccagcgaaataaaaatggacgaagaacaaaataaaaagacggagaaaatcaatttcattttgccttaaatatatttttttcatttataaaggtattttaaaagtgaaattatattttttttctatttaacaatgctcaattttataaaaatgtgcttatgtaataattgaattttcataagaatatgtcaaaaatcaatgaaagaaaataatcgatggaaaatttttttttaaattatttaccttgggaaattgctaattagacctttttagaattaattaattttctgctaggaaccaaaccattgcgtcttactgttcttacaaattagtgcattatttatttgttaaagcaatgaggtttaaacaaaacaaaaaataaaaggtggataaaatgaaaaaataaaactatcatttaaaataataattaattttctaaagaaaagagtaaataaatcaatgaaaattgaaaacaaaattatctttaccaaatttacagaaaatagaataattactaatcgtcgtccgacaatcactaacaaataaggtcatttactcaggcaataagaattgagtcgatcacatcgtaaaattgccgggtgtgcaaaattccttcgtgcgaaacatttgcaatttcgaccacttgattcaccttaaattagtctaattaatttgtttttcgtttataatttattgactcttttttctctctctttcttcccataatccgctaattaattttttttattatctttgctaattgagcgtccgactctttccacccaccaatttgccctggtccttccattgttggcacactctcaacgagtcgatgtttacagtgccgtcccccgccccttttgtcactgtgccggttgagttaattccgttcggatatgcgtattgctgcggtgtgctgtccgcggaattcccatgcacgcaatacatctttagaaacccgagagtgaattttgaaaataatttctattttagcgaaagtttaattaatgaatttgtgttgaagtttcaaaaaccaactaaaattaaatcatttaataaatcgattaaataattatatcaataggaaatcgagtaaaattttatgcttcgtttaaaattaatttttcactattaaaatttgttttattttcattttaatttttttcgccccgcccattaaaatcatttaattattacgggtgtgtattgctgtgcgttaatttgtgatgccgagttttggtaaatggttgccaaatttggcacattggccaatgccaataagttggccatgtcggccactgtgtaggcagtgccttgaatagtaaccagtgttgtgccggattgaaaggccaaccaattgggcaaaagaatggcgagggaggcaaaggttcggaccaaatcgcgaagcgacgaattggaaataatcagagaagcaccgttgaacaaaaaactgttgggattgcctgacagtttgagtaattgcttcaagtaagaagtataaaaaaaattgtttttaattaattaaaatgtttttattcaattaataattggctattttaattgattcaatacccgagaggagcgcatcaagcgtttaa

SEQ ID NO: 9311 - DNA, 3698 bp, Heterodera glycines
  unsure (1)..(3698): unsure at all n locations
gaactgcttcagagccgagaaaattgggttgtgtttcncaagttgcatcagcaacttcaaaacctacccatctaactagccattcatccataccggatgaaaggttagttcggtgggccaaaatattgttgacctaaaacataaaaataaatgatttgctaaaaaatgttttaaaatgtacaaatgttttgttaagttttttgtaaaataaaaataaattactaccaataatatgcaaacatttttttttggataattacctcaaaaatgtcgtccgtacattgcttattctcaacaacatgtccttgtatttgttgtggcgctaaaggaaaagcctccaatggctctgtaatagctggttgattctggatgaatgtgaaacgaaatgaaaaaatataaaaacaaagaaaaatttttgattactgtatataccgtttcaaaataattttccagttcatggaaatcaaatggcaatggacttggcgtctggtgatcaagggtcggctgggccaaaaatggaaaattaaatcataatattgaaaataatttttaatttaaattactgggattgggtcaatttccatttcgttttcgattattttgtctaaattaatcaaaataatttacgtaattgaaaaatttgttttaccaaaagaaagaaattgtaaaattgtaggagaaatggacatctcaagtaaaatttggagtattagattaaagaataggaaagggcctagcattttcggtgcttaaatagggtttaaaatttaatttagttaatgaaaagcctaaaattttcggtaaacatcattttgggaaggcaaaagtgtgaagtgcgcagggaattccatccacaaagggtaaaatgtggttaaaatgagatatttcgtttgttgtcccgctaattatcctttggaaatggcccgcctctctcctaaaggccattttgccggtcagcgcagcacaaaagggcacttcaaccatcaccgcttagcccattttcggctttgttttgcacatttggatgaaaaccctcatcattttcattatttttatttattttatattgtttattctttattttctatttctattaatattttattttcactttttagattttttaaatattttttaaaattttcacctcctcagggatttaattttacttcctccgttttacctctacttgggttttaatatttttatttttaccctttagatgttttttctatttttacctcctctgagattggatatatttattataggtgttttttaaaggtttaaatttggtactgaaacgtccctttccattgggactgaaatggcggggctgaaaattaagggccaaaatctgcatgggtaactactttcgatcgtgcatatcccttaaaattgttcatttacattttttactcattttgttattccttcaattatctagaaatattgcttgtttttacaggtctaatattttatatttgattacacgcttctgataaattttgataatttcaacctttgaattatattatctttttcgttatttttatttggcgggattttgactttttttaacttaggatttcgatattatgatatatttatatatataatatataatatacatgtaaatagatgtacaaaaataaataaatttatattttttaatttgtcgggattatgactcattttggcttagtcgggatttcgacgcatcgggatttcgacgcatcgggattttgacgcgtcgggatttcgacgcatcgggattttgacgcgtcgggattatgacagcgcgccctccctttgtatgtcccacctgagtcattcgttggttcaaaaaattattggtgaccaaatttcccatgctgtgagacaatataaatgccttcttgcccgttgtgttgaacacattttcgattaaatttttcaacttggcagaataggcatccatttcatctaaacgatgaaaaaagggtttaaaccaaccattagatgataatgaataattaagaacatttatattcttcaaatataattattaaattgtcggcactcagttgcggtgccaaacgccaatcgtaaggggcgccgaaaaggttgcatcccttcacatagccaaattgggccaagtgactgataagtgccccaaaatacacatctgtcgacgtggagttctcgttgggattgcagctttggttgctatcagtgagcagacaagtcatcggacacgtgctgaacattgggaaaaggaaagtgccgaaatttcaacgacaaaaaaagtatttaaaattcaaaaaatggtatattatagcagttccctataaatggattggtttggttatgtggtctttaatggaattttaaattttgcttaatcagccaaaatttcaaccaaaaaagccaaaagattcatctatttattttatatattgtataatagcaacaggccaaatgggcgtcttgcggtgaatgtgacattcattccggtccgatttctgtaggctccgctcgcactgtcataggacagtctgaaaaatatacaattccgacacgtatttccaatgtttctttatgtcgtgaagcatcaatttggggttgccccgactttcggggagcaatttcagttcaaccgaaattgttttagattttaagcatatgccaaattacaaagcaaataatttcaatttgacgtacgacatcatataaaggatgcacttttggagatcgaacgggtcggaaatggccaaggcataggccacccacgccttcagtgagaaagtgcccgaatacggcgaagggatggcaccgcaagaagccaaattggacgggaaattcgagccgtggccgtccacgtacattttgctgccggtaatgccatgcactgtgcttttttatattatgccaatgatttgaatttgcaattacaaataattaatggcgacagattctgatttgctgttgagcagtttggagttccgtctccgttaacggcacagtcactcgaatctgagactccttgtcgggaaaggccaatttggcaaaagacaattgccaaagagagggagcaaaggccaagcatttcgaacaaaaggcccttaatcaaaaaattaaattaaataatatttaatataaaaatggaaatacagagccgctgatttaaatgcagtgcaaaattaatggaccatccgatgttttcaaggaagaaaaatgatcaaattttaaaggaattgaaatgataagaaccaaaaatgaatagtcatgagagaattccaacaaattttgcaaggtttttgctttattttattgaatatttgggaaagtattaaagtggcgatttggagatttgcataattatttctcctttttttttgcaaaaattatatttcacggaaatccaaaaatagtaacaaagaaaattttataattaagtttgtgtctatgaaacattttgttttgattcttaacaaaaacattttttacttttcagagctcaacgaattagaatactaagcatttaagagcagatttttccccaaaaatcagagtttacttaaatagtcaaacatttttattcttacaaattagccctgttttaatgggttattttaaaaagagcacaaacagatgttgatattccgctggtgaatttagagcatttagaatgaattttaaaaaattcaaaattctat

SEQ ID NO: 9312 - DNA, 1388 bp, Heterodera glycines
  unsure (1)..(1388): unsure at all n locations
acacatttttttaatttattttttatttttattgtttgtaaaaatacaaatttccgatattgcataagtgcattcggcgcaacccaattaaagtgaacgcaaaaaatgaatgagtatttttcgttttgttcctccgtcgttaaatgcttttaaaataattaattaatttttgaattgcaaatttgaagaaatttaatgcgtattttgttgttgaatcagattttacataaaaaaacatggaaaggacccattaaaaacctaacaaaattttcaaaaaattttccatactttaaaaaattagtaataaatttaggtaactttgaaacagaaaactgggcacaaaaatccaacaataaaattatatgaaaattgcaaaatatgtaccaaaaaacatcgacaaatgaattttttatatttctttcatttcatataatcatccatatcattcttctgatatttcttcaacaaattgttttttccattttaaaatgttttgtctatgaatgttcaataattttgcaataatttcatcactcatttttggattttcactttttattttccaatattttttcattttttccattttttcttcctccgttattctacagcgaatgccaaattgttgcttccattttttaattgtgaattgactaactccaattttcttgccaatttcggcataattatgttgccattcttttttcgaatattttcttttttgtttatatttttttaacatttcaaaaaatgtttgaacaatttctaatttttcttcatcagtttttgatttgtaacttttctttttttgaaataatcataaattagcaaattaaaattttgtacaaatttataatttaataataattttttaaaataaaattttcctggctgcttaaagattgcttacttcatttggcacgcggattggcaggtcaccgtttgtgtgccatatacgatgcagaatgtttggtgatgtttgaagcggcatttcccaacattttttaaatctttcccgatagactcattcaattttaaaataaattcaataaaaattaaaataataaaaattataaaaataattcaatggaaaagactgacaatgctatggaggcgtaaactccaattttcagtagtgcgatttctaatctcttcactttttaaaatttaagcgaggcttagtccttcacctttctttatcagacttcctggcagcgattcgtcactttttggctgagttgacgaattatcgagttaatgaataggaatcgtagttttttttttattaattgacgaatcgtttgcttttagttaagttgacgaatcgtcgagttgacaaatcattgacttccaantcgtaggtttttgacttaggtgacaaatagtcg

SEQ ID NO: 9313 - DNA, 2436 bp, Heterodera glycines
  unsure (1)..(2436): unsure at all n locations
aaatttgtaagaaaattggagttagccataacacagttagaagatggaagaaacaattgggcattctctgtaaaataataacaaaggaacaaagaatggaaaaaatgaaaatatattgggaaataaaaagagaaaatccaaaaatgagtgaaaaggaaattgcaaaaactatgaaaattcaccaaaatagcattagaaaatggaaaaacaatttggaaaagatgaaataatggaagattaattagtaaaaacttaaattttttttaaaaagctatgtatgatgatggattttattgattcgaaaagattaatgtattttttaaattctttttaaaatgtaagggtatatatttccgctaaatttactcatgtttacaatttatatatgtcgatttgttagttgcttctagctagataatatttggccattttttcattatatttattaagaataattcgctttttatatttttattttttcgataattcaaaaacagaagcttaaaaaacatggacaacaaaaaccaaaaaataaaaaattttgaatttagtaattattgtcataatgtcacttttacgagaattttttaatccaggaaaaaacgcaccaatttatataaaaatttagaaaatatttatttttgcaaaattacaataacgatggatttaagcgttatctatagcctgcaaaatttcaaaaaattatattaggttaaaacaaaacacatggtttgcgacgccaaaatggctaaaaaattcaacattgagtttctaggccataagtttaaaattttttgaaattttgtatactaatagggattatcaagcgcttttaaatcataccatgtttatttaatttgggtgacaaatagaaaatgctatagcatttggcgccaaaatggctggcgccaaagtgggcagttccccaaaattgaaccctcccgggacaacttgagggatataagtgtgttctatacatatcctcaaaactaaattcttaaaaaaataaacactcatctcctgaaaacaaaaagaaagattttaaaattttaaatttacacatatacatgatcagtaaattattgataattaaaatcattaatttcattacaggaaatcagtagaaaggcgattgtatacgtatgaataatataaagcaaataataataaaaataaataaaatttaattttttaaattttttttggcgaaaaacggctaaaaatttgtaaaatacacccctcaaaatcgaatttttgacttaatccccccccgaagccaagggtctggctacggcagggcgcgtatctgttctgatttatcagaaatgacctgataaaatctgattttttnggcttgatgttctgattttgaaaaattttcgatacgcgctcctgcgctacgcccttgtttgtttctttttttaacgtatgaaaaccaccccgctatttccaactatttaccaagtcgaacaaacatattttcaaaaagtcttcccaaaaatttttgaggcattaaaaataaataattaaatggcaagaactgtccgatagggtgtcaattatttcttaataaaattcattaatagtccctttatatgcataaatattattttttttaaattttgttttactgtcggattgattgtccatctgtcggattctaagtggacagaccaacccaaaatcaaaccgtatatgactatcactgcagtccctatgttttataccgtaagccaacaacggcgacgatggcaccttcctactgtacccgagtggggtgggggacagaatgcctttcacaaaatctaaattaatgaaataaaaaatttaatatatccgagccgacttaatggaacttgaactcaagggcttttcgaggtcgctgatcataaatgcggcattagtttcgaccaattccatacccctgaactaaattcgaacaaaaagtcgagaaattaaattttcgaattccgtgtttttgggtcgaatcagattaaaatacacgaaaaaagcttaaagtcatctaaactgcaataaaagcgtattttaacgcactttgagtcatacatgtagaaatactaaaatttttaaagataataccctcatgggaatatgcccatgaggatacccttagtactggaagttgtcaattcgctataaaatgagtacatttataggaatctgaaaatgtatgtatgatctgccttgtaaactgtataagtaccgagagaccaacaacgataagtgagcaaagatcagatacgaagagatcaatgatcaagacacacaactgatattttttaaaaaaaaattgagcctattatttactttaattctatttttgaaaatttttgtagttagcagcatttaaatgatatttgtaatatttggtggatttttagtcccattttatatgcccaattttttggacctgca

SEQ ID NO: 9314 - DNA, 4534 bp, Heterodera glycines
  unsure (1)..(4534): unsure at all n locations
tttcttcaaaaaggggggcaaccantcggcagtattaccgaaaattaatgctttttgccttttaaaatttgtcaaaaaatggtatttccctcggattagtgttgtcttagatttcattttttcgcggtgtggtcgagtaatccctattagccagtctccggtgcattgcaatttttaccgattttggtgatttttttttaaaacctaattttcaaattgtccagggaccgccttaactgatcggtggtgctgatcactgattaatcggcacgccacgcgctgtttggtgattttggagagaaaagtgatcggttctatcaaacgctattcaaatcattaattttcacctaatattgtttttttaatttattcaaaaaacaaacgtcatttctccacacttttaaagcttaagaacaacggcaaaataagcatcaattttggtcactttttataaatgtaaatagcatggaaaaatgtgtaatcagtcgaacaaacaattagcatttaattagataaataagctttccttttttcaattttttaatgagtttcatcaatttttcgtcatgtcaaaaagtttagactttcgaaataaaaatatctgctttatttgttgaatttagcatactttgatgaattaatgtattaaaagaaatcattcctttccatcatttttgttaattaaacaacaattatttattttcccccaacccaaaatatgtacccttataataatggtaaatgtacgttccttcaacttgtccagtggcgcagtggttagcgcgtttggttggtgtcatgtgttgacacacggagggccgtcggttcggttccgcttgcctgtggtcgatcactttgcaatagttaagccccgcatttatgtgggtggccgtgttcggggttcacggcttaaaacgtcccccagtgatcgccgcggagagcggggcttgttccgacgtgcttttcgttcagccaagggctttccatacagtcatatggagttcgtactgggaacttgtctcatggtggtatggtcgacataccaatcggctcgctttgggaggtttggtcagattggtggccacagataaagccccgtggtccaggccatgggggggttctgaagcaacttgggggttgtcaaacagtcggagtcgcttcggtgacgctgtttcctcccatcgcctccacagggagtccgtgcggggccacccgaactttttgcattttctttttttattttgtcatttttgtggatgttttttttaagtttccaaccatataaggagacacggaaaggggacaaaaattacaagttttaattgtcggcacaattgaaattcacaaaaacaaaagaaaagagatatgtagagaataataacactaacaacaaataaaacaaatacatataataattcaagtaatggattaatttgatcaatttgtccaagtattttgctgctcgccaatataacttggcacaaataattgaaattaatttacctatgtgtgataaatttgctgccttatcaaaaaaatgatgcttttccttgcgcaccaccaactcggagattatttcatcctaacatccaactttttactacacgtttcgctttaattaaatttacatccgaaaagtggaggctacgctatattggtattttagtaaaaccacactcattttgtgacggtttttttttttgcatgcttaagttttctggggctttcttattcaagtgaagaaccaaattgcaaatgaaggaaaaagactgattgatgccttcccaaaaaatgtctcccaattatccttcgtctctccatttgtcgccccgggggataaatgtaaattgtatgacaccattttttacaaaacaaaatgaacagtagaaaactgccattaaatgaaaaatgcatcgcgtcatctccggactccattctgcgctcgctacatcagctggacgacggcttctgacaatcatcagttgatgtcttgttgcgcagcacaaaatcatgcctcctcaggaatttctgcagccatccaactgaggcctgaacaaacaaaaattttcttttattacagttttttagcgtctatcagtgaccatcctcagtgatcttaggccaaaactttttgttttcttactcggtaatccaaacattcttggtatcaatcgaaagcttaaagtttagggaatttataaataaatacaagaaaagtgaaaatatttgcattcggaaaaaaattacgtcgagaaacccgactgaaattcatcatttggattgatcaagaaaaaagctatggcgtttaagaaactgaggatgctttactgatgggacgcttaaattgcgggaatagaaccgccgtttttcaccttggtgccagtgtccatgaacagttcagctgctcttctttgaatgatgctccttgacacgggctgttgatttttttgtctttcggtgacccattcggccagtgcattgtcaatgtccgggcgctgaactggacgaccggctccgccaagtctcatgcgcttgcccccattcggtgtcatgcttaaatttgagtcggggtcactttggcgcagtcaactttaaagtgctctaacttttttgttccgcaaccaaataaaataatcgtgatatctaacgatagggctaagtagtctctattagcctgacaaatttcaaaaaattattttaggctgaaaaaatatggcgtgctgcgccaaaatggccagaaaaattcacttttttgaggttttttggccatatctattcaagtgtaaactaaattttttgaaattttgtaggttaatcgggactgtcatgcgcttcaagaccatatcaagattatttaatttggatgacaaataaaaatgttatagcgctttgagccaaaaaaggctccaagatgggcggttcccaaaaattgttggcataaaaatgttaaaatgccaagtacatctgctctctcagtttgtcttcctgtgccatccattctctgattgctttcctgtccacatcgaacttcgttgctgctgcacgtatcgaattctttcgcgcccactcgacagcctccagttttttcgccgaatcgttgttcctgtgccgcttcttgccttttgccggcatgccttcattctcgttgttactgttttgcggttcgtgctcaacattttctgaggcttctgctgtcgatgcatttacgtccttgtttacgcagttgtggcacacgacctttgcgccgaagccttcgtcttcaactccaccagcagaattgccacagaatgtgtggcacggcaatttgcacacagaacagctgtggcttcctccgtaaattgccaaacaaacgcagcaaaacgaatccattgataaaattgaaaaaaacgtgctaaaacagtttatgtcattaaaaatttgtcgaaaaataatcccacccggggggataattagagaaaatacggtataaattgcataaaatgcgattttattgtagctgttattatttattgtgtgattgattatgtgttaaaagctttaatgatgatgcgctgggaaacaatttgctgttggatttgatcaattgatgagaaatgaaatgcataaaatgaaactcgcaattatcaaaaatatcatcattaaatcaacaaccattcaatgtgtgtgcgatggaattgctttgattttgaatgcaaaaaggcaatgggcgcaaaaaatgtcctgattataatgggccaatttattttaatgacggcaccaaaaagccatgaacaatttgattcacatccagatttttcattacaattaatcccgccctgcttaattaatttaaaaaaaaaatacgccaatcgccaaaaaaaaaacggggtggaaattgtgtacaccaaaattgtaatgagatatgagtgaaaaaatcaaaatcatcaagaacggaacacacaaaaatattcggtaacaaaatgcaacaaaatgtgtgatggacggagaaaggatggaaggagtcaagtgtctcatcagtcatcaatgatgaatgtgataaaaatgaacaaaaatcaaaaaaaaaaattggggtcaaagtgtgtgccaacggacggacgaaatatgcatattaaaacattgggtttttttattgtgcaaaccatttcagcagaagagagattctcaccatacaacacagacacaataaatttattacacgttttttttgttgttgaattatttgtctgtctgttgttttttgctcgccaaatcaattatgtaaccccatcaatttcggggtgagggcacatcaattaattatggtaattagagagtgtaaggcgccccctttctcagtcagcgtctcaaatggtgattgttgctgctgttgttgtagcggtggtggtgctggttgtgctgctgcggatagtgctgatcctcctccacctcgtcacccctcttttgttggtgatgtgccatcgctgccgccgcggcaccggaagccgtactcgcagcagccgctgatgacgaggacgccgccgccgttgcggccgtg

SEQ ID NO: 9315 - DNA, 1107 bp, Heterodera glycines
agcggctgagtcagtaccttggtcgcaagaaaaaaaaacagcccaaaaatttaagcttatctttttagtgaaaatcaatcactcataattttacgagtagtgatcagaaatgcaccagattttgcagggtaacagctgagaagaatgcttattcatataattatttatctatcccataatgtttatttaaaaagtttaaacactgcaattttgcgtacttttccaattttttgaaaaattaattcataattatttttttcagaaaatgctctgaaacgcacctaattttatttacatattaataaggctctctgatgctttttctatcaaaaaggaagatgaattaaatttttaattcctttttaaacaggccaaaatgtttaggcttaactttttagtgaaaattcaatcactcatttttcgagtagtgctcagaagcgtaccaggttttgcaggggcctaaaaaggtcaaggaaaggcgtctctgcgttgatttagcagtagtacctatgaatttaaattttctaagaatttttaaagtttcactatttatttatttttgcaaaattaattcatgaatattttttcagaaagtgctctgaaacgcacctaattttatttacatattaataaggctctctgatgctttttctatcaaaaaggaagatgaattaaatttttaattcctttttaaacaggccaaaatgtttaggcttaactttttagtgaaaattcaatcactcatttttcgagtagtgctcagaagcgtacgaggttttgcaggggcctaaaaaggtcaaggaaaggcgtctctgcgttgatttagcagtagtacctatgaatttaaattttctaagaatttttaaagtttcactatttatttatttttgcaaaattaattcatgaatattttttcagaaagtgctctgaaacgcacctaattttatttacatattaataaggctctctgatgctttttctatcaaaaaggaagatgaattaaatttttaattcctttttaacaggccaaaatgtttaggcttaactttttagtgaaaatcaatcactcatttttcgagtagtgctcagaagcgtacgaggttttgc

SEQ ID NO: 9316 - DNA, 977 bp, Heterodera glycines
ctaattttatttacatgttaataaggctatctgttgctttttctatcaaaaaggaagatgaattaaatttttaattcctttttaaacaggccaaaaagttgcggggggccgaaggccccgcgggcgggggggggggggggttccacaggcgagtcgtcatattggcgagtattcggccatcggccatcggcaacggtgctttgtattgaatccgcagttcacattttacttttatatttcacattttacttttatattaaaataaaaataaatgccaaaaacatgttaggtatgccaattaccaggactgtcaaaatatgtttcctgggttctacgtagtctaattagtagggatgccaaaaacatgcaaatgcatatattttttcctggcttctccatgctctaaatagtaggataaaacactttcttttttgtgtttgcgtgtaaaagtcgagacttttatttgcatatttttgcatattttgggtttttttgaatatttaatgcatattttgccatttttgtacatatttttttagatttttttgcatattttgccatttttcgtcaaatatgttccgatttgaatatctcttaggataaaatattgaaaatgcctaaaattaaatccaaatctgaattgatgcgcgagtgggtcaacagcgagtttcactgccgaaacccttgagaaatttttgatttacaattacaaaaacaaccgatataatttctgaggaataaaatttatttttattattttgcaccccgaattttcaagtttttttgtgtatatttggtgcatattttgcgatttttgtgcatatttggcaattttatttgcatatttatgtgcatattttggtcacttttcgtgcatattttttgaagccctgataattaccagccctaaaaatacctaaaatcattgaataatttttcaagcaaaatattcaaaataaccaaaaacattttttgaa

SEQ ID NO: 9317 - DNA, 1183 bp, Heterodera glycines
tatgaatatgcattcttctcggctattatccgccaacgtcaggtgcatttctgctcactactcgtaagattaggaggcatgatattttcactaaaaagataagcttaaattttttggctgtttttttttcttgcgaccagggtactgactcagcctcttctcggcctcggggggggccgaaggccccccacgaggccaagaagcggctgagtcagtaccttggtcgcaagaaaaaaaaacagcccaaaaatttaggcttatctttttagtgaaaattcaatcactcataattttacgagtagtgatcagaaatgcaccagattttgcagggtaacagctgagaagaatgcttattcatataattatttatctatcccataatgtttatttaaaaagtttaaacactgcaattttgcgtacttttccaattttttgaaaaattaattcataattatttttttcagaaaatgctctgaaacgcacctaattttatttacatattaataaggctctctgatgctttttctatcaaaaaggaagatgaattaaatttttaattcctttttaaacaggccaaaatgtttaggcttaactttttagtgaaaattcaatcactcatttttcgagtagtgctcagaagcgtacgaggttttgcaggggcctaaaaaggtcaaggaaaggcgtctctgcgttgatttagcagtagtacctatgaatttaaattttctaagaatttttaaagtttcactatttatttatttttgcaaaattaattcataattatttttttcagaaaatgctctgaaacgcaccaaattctatttacaagttaaataaggctctctgatgctttttctatcaaaaaggaagatgaattaaatttttaattcctttttaaacaggccaaaatgtttaggcttaactttttagtgaaaattcaatcactcatttttcgagtagtgctcagaagcgtaccaggttttgcaggggcctaaaaaggtcaaggaaaggcgtctctgcgttgatttagcagtagtacctatgaatttaaattttctaagaatttttaaagtttcactatttatttatttttgcaaaattaattcatgaatattttttcagaaagtgctctgaaacgcaccaaattttatttacatgttaataaggctatctgatgcttttt

SEQ ID NO: 9318 - DNA, 1477 bp, Heterodera glycines
  unsure (1)..(1477): unsure at all n locations
cgtaaatataggagatggttgtggtgaccgaccaccacgacagttccacggtgccctgtttgagcagggcaatttcccgaaagtcgaacagtctgtcgtccctctccgtcgtgctgaccatcgctctctccgccgtttccgccccttccgccgtttctctcacataaattacgccctccttaaactttcgctctttcgcttcgttttccctttttaattgccttttcttcgccgtttgctttgaaccaaatgtgaaaaacgctgtccacgcgaatttcaataaacacaaaatggtccttttgtggtgttggcggtggccgtgcggtggtcgaatttgggccgggggtcgtcggaaaaggggcggcggtgggctcaatgggagagggcacggcacagtcgcagttgccacccccaaaggaaagagaaaattaaataatttaatcaattttaatgaaaaaatcagaaaataaatttaattgtgccgcccaattatggcgcatttacttactttgttaagagccaaattatgactaacagaagggctgtcagaagacctgtgcaaatcaccgaaattgccaattttatagtgtttttatttttgtcacccattttctggaaaaatcataaaatgtcataaaaaaggcaaatattaattcaatttggccaaattgcgtagcaatgggcgaagagttcaaaaagtcactgaacgaatggggccacctctgctgctaatgagtgaatgagtgaatgaatgaatgaatgggcccaaccgccaaatgatcgccgcttttacccttttggccatggggagggtcacccccgcccccccccccccaattcgtttcatttttcctttcatttttcgtcggctcttcgcttttccatcccaaaatttctctcctttttttcatttcgttggttatcattcattctttcattctttctcaaccatcaaaatgtgtgctacggatgtcataaacaatggaatttgacttatcggagaattacatgcattttatggccaaatttctcatttttttttgttaaggttcgatccttacaaagcaatcacaaaaacaattgttttgctgtaaagagggcaattttataaaaattaattgatattttgatcaattctaatgatgagtaatggcatccaataattacataatacttaatgaatgtgagaagactattaataatagtccgtttcttgagacgaatttaagggtaaaaataaaaaatgataagaattgtttattttcttaaaatatttttataaaattaaatttatttttaatataattatccttctatccttctcatcagctaagatcaaattggccaaaagtctgtttagtcatttccatctcgtttttgttcgttaattaaacgtgcattttaaaggcaacaacttcgttagttttaggccaattcgttcgactcgcgcngggcggtgcgaaagtgccgcaatttg

SEQ ID NO: 9319 - DNA, 2473 bp, Heterodera glycines
aaaggatcgttaaatctgtatatttctcctgactaatggaatacattttgagagggcaattttctatgatctctccgtatctttttcaattgaaatgattgcctttttgttcaattgttctccttttccttctgcttctccgtttacactcctaaaatatatatattttaaattaaattatttaaatgtttttttgttcacttttcggctattccgtcgttgtcatttgctgttgctgctgtccttggatgttcgtactgaatgcggttgagcttgggaatttgctgtggttcgtccgttccacaaatgccccggttgaaacgcgaacatcggcacgacggcgcaaaatgaacgcgagaacggcacgacgatacggcttcacgagaagaatggtggccaacgggttcagaacctttgacaaaatgggaaagcttttggcatttatgggcataaaaagcgaaccgaccggcgcaaaataaagagggatggcaatgaaaaggatgatgaatactgtagtgtctttggggtacagtatgggcaggaaaatttgggtgagcattgcagcggcctcgaaggtgggcagaacggcctgccattgtcacttccattttgggaatgttccttttggttggcaacgcacctggacaatcagtgcgcgtgtaatttcattattatattcgcgcattttctgctttcgcagcgaagtcgtggcacaaattccgcccgtggcattttcctgttggccctgggcgaaagtattgccgacgtaacgacggattttgacggcacaaatctgtaaatggacaaaatatttgttcgattggcatagcaaatgcaccccaatgacaatgtaacaggaggagaaaaggacaaccataatgaccacgtggcaaagccatgggaaagaacgctgaaagggtgaaaacggcactttttgacgggggagggaaatggcaaaaggacggcgcatttacagcccaagtgaacgaagtgaatttgacagcggtgacccccgtctcctgctgaacacgaagcgccaattcgaccatcgcctggttgtaatgttcacgcgggtaatcggaccaggtcagcaaaacgatgtggaaaaggttaagccaaaaagcgaagattgccataagccacatcgctttggccggaattcggccgtctctgtggggcacggaattggcaacggatgattgaaatggcatttaaatgccaaagaatggaccgggagaggagaaaatagcggaaaatgaattgggtggtggtggagaccatgaagaagagcagcagttgaatccaaagaacattcatctgaaaagcgcactgcgcaaattggggagaagccaagtgctcaccatataagcgtacggttggggaatgtttcgaaaaatctaagcaaaataattacaaaagtgtgtttggaatgttgcttattaaaggtgaccccattttggaacaccgcacgataaccatggtcgacaaccttagggaaagtcggacaattggaaaaaaacaaacggaaaaggaccagaattggttggacagcagtcgagacgattacgatcagaatgtcctgaaacggggtgacgaaataatcagccccatttcgaagccgaatgatcggaattttgaattggccaacgatataagccccaatttgaggccgagtgatcggaattttgaattgaccaacgatataagccccaatttgaggccgagtgatcggaattttgaatcggccgaagaatggcctcaccataaagcacgaatggagcagcagacgagaataaatgcgcattgccttcaccgttttggtgtaaatcaaatacatgaggaggacgtttagaaacattccaagcaaaaagctaatcgcggcactgacagagtaaacgaaacgcacaaaatctgccgaaagggcgacaaattggccaaggggggggggacacccaccaaaacggtcactttcctccatttgcgacgcattcatttcgaatttttaaattttttttatttgcagcaattattaaaagaaatgaacaaaaccgaactgtctgtttttatatgaactttaaagggggtcttattttgcctaagattcgcctcggttgtgacacttaaattgcataattacaggaaacttttagcccggcaaagggtcattaaatataaaaatggccaaatgttcggttcattggtagttggatttacacattcataaaaacagatttaactatgacaattaacggattaaagtggggcaattggccaacaatttgttttaaatgcaacgagcgcattttgagaaaattcattaaatgccgccgttttgtgccaacaaaatgagtccaaaataatttctaaatttatgtttacagttgaaaaacttttgtcccgggagaccaattatcaaaagacaacgtaaaaaaaagagaattaaatttataaaaaagtgaataaatgcgtagtg

SEQ ID NO: 9320 - DNA, 1077 bp, Heterodera glycines
gaggatgataagcgatatgatcatttgcgttgccgaggccgtaaaccattttgaaattaaagcagaaatataaaaatgtaaaaaaaggaatttaaatagtccaaaaaatatttcaccagagaaaaataaagaaaacgtaatattaaatcaaataagaaaataattgataacagcaataaatgagtaaataaagataaacagaacagcataaatcgaccgtcgttaaaaaaatatttaaagttaataaatccgataacatttggcattggcacaattcgtccattcgccatggcatcctttgttcgggttcggcacctctctctctctctcagacaaattctggtcgttgggtcccttctctggcagttggctgttcctcttccacttcttctccttcgtcgtcatcctcaaaaatattgccaccgttttcgctgtaacccatctgatgggagcgagcgaattcggaagaaccttaaagagcggagaatggcaccgatcagtggagaaaagtgccgaaaaaggacccccaagaaaatggggcggacgaacgtctccgccgtatttggccacgtaacgacggcgcgcatagacaaggccaacggccaccaaagaagcgaagagaatctgagggtaatgggcaaattgggacaattttaagggcggagagaaggaccatggaaaccaaaaaaacgacaaatttggaaattgaagacggagtcgggtcgcaaagatcgctcaatcggttggcatcggacagactgagactctcgagttcagaggggtatttgcagcttaacggtgtcattttcaaaatgtcattattggaaatgccagtttttccaatttgacaaaggcttttattacgtcggttcgtccgctttgtaaacgatgcgcatcgcttctttcatgtccaccatccatttcaatttgcaatcgcacaactgaacagccaacaagcatttgtgatgctttatccgtccaatgcttacaaaaggatttccgttcagttttaacacgtccaaactcttccaataaaaagaggcaaagttttggcactcaaagtgctgaaattgcact

SEQ ID NO: 9321 - DNA, 2828 bp, Heterodera glycines
tacatcttttcgttgctttttttctacccgaatttttctagttcggtttcaatgactataaaaataatacagaaaagaaaatgttgcttattgtttagagaaagacaattattattcagcatttttgtgacatcgatcagttgtaaaacggcaaattgttgtgctaattgaaccgcaaaaaatgaacagacggtgaagaattttttgaaaaaaaaaaaaaaaaatttcttataactttgctctaaagcaaccaaatttttcattcgtaatatcattcgataggcctaaaggttctctattgcctgaaaaattcaaaaaaaaaaattttttgttaactcaaaaaagttatggccaaaaataaataatgactccgcccccgttaatttgtttgactcaataaaagtcgattggacgcatagaatgagttcattatagccatttttcccatgtttcagctggatttgtaacgacgtgtggatggacattctgccatcctttgaccatgctcaactcggactcaaaatcgcattgctttcgccccgttttgatgcgctggtggacacgcattttgatggcaaaagcgagttgacgacttggaaatggatcagaatttgcaaggatgaagcccaaccaccaaaagcgaaagtgtctgtgccggtcggtgccaattttgtgcagcaatctccgtgggagccgatggatgccaattttgtggattttccgttgccggaccttccgctgccaaacaaactccgaattcgtttcatgattgagtaagttatgttttttttcaaaagacatgaaatcatatttccgagcgttttcgggatcactggtcacgaatctccgggtcggggcgaatttgatcgaaattaatgtcaaaatcggattaattcctaagaatttttttaggaaaaatttctaggtttgaaaattaaaaaaaaattttcggaggggaaacgacgggggaaatgaagtgcaccccctaagacaaccttagttcaagaaaaaaaaattttttttttttaaaggggaggggggtaccatcgacagtattaccattttttaaataaaaacttttgtatgtaccgtattgtctctaattatcgcccggggggataaatggagacggagggataattagagatattatacggtattgtgtgtttgttcatcacaggtacattgaccattccgtcattgcatttctccatgcaaacaagcaactttgggacaccaaaggcaccaccgtgtatttttgtgtggactcggatggcaccgaaagtgacgcacatcagctgcagcatcagcagaattgggatgtgttggcccgcgaaatttggcccatcttttcggcaaatatgtgtaatttgatgttaaacaatgcacaccacttggaccaattgtgccgtcgcatttcgccaacgctgctcactgatcttgacaaattgaattggatttattcgggacgtctgttcccggatgtgtgtgctgctgatggctcaaatgcatctggtgctcgccaagtgctgtacaaatggttgcacacgccgacaaaagatggcacgccaaagaaattgtattgccgtgagacgattggttttccaaataaccaatgggtccacaatttcaaagaggtgtggtggtccgcaatattggtacttgtacagaatttagaccagggatggcattacgaggccccaaaaatttttggaaaatcagaattccgggggtcaaaaattttcggaaatcgaaattccgtgccatccctggcttaccacacaaaaaatttgtttttaatgataaaaacgtatttccaaggatattctcggggtcgctgatcatgaatatgacatccattccgatcaatttcgaatcccgtgcccgaattcgaacaaaattccaaaattcttttcaccaaaatccacctttattgtccaaaatcattcaaatatactgaattattgggatggctattccaagcatttgaatggattttgaacaataaaggcggattatggtaaaattgaattttcgcttttttcgaattcgggtccggggtttgaaattggtagaaatggatgtcatattcttgatcaatgaccccgaatacccctggaaatacgtttttatcattaaaaataccaacaaaaaaaaaagaaaaaaagtttttttaaatattttttatgtggtctaatcttaatctgtacaagtaccgccatatttttcgtgtcaaattgttgtttttgttttgccaattttgtgttgttttttaggaatttccccgtgccaccacttcggccagttacaccatcaatttcaatttgtatttggtcaaaatgcgaatttggccatttgagttggtcaacgaacggacgaatgagaggatgacgctgatcaaggagccggatcgtggtgctcagctcggtgattggctgctgaatcggtgcccattggccatggcggatcagcagcagcagcagcagcagaaagtcgaaaattcggatgccaaattgaactcagtgtacttccgtcttcgtggtgattgcattgggtgagccaacagcagcagaagagatgacagtaaaattttggaaaaatttgcgacgatttttttttttttgaaattataatgaattagaaagttttcgaaaatttttcaaaagtcgccaaaaaaatttttaccttataatctcttcatataaaaaatttttttaaattaaaaattaaaaaaaaattcgtcagcgaaattatgtcccggcgaaaagagtacagtaccctttgtacaatagtactttcttggcagggcgcccatttcgaggcttgga

SEQ ID NO: 9322 - DNA, 1518 bp, Heterodera glycines
tatacaatacaacaatggaaatggacgaatttgcgagcaagcaaacgtcaaatacttaacacaacaatattgaaatggcatagtgccaacatcatttcggtcatataaacatcaatcaaccaattaatcattcatttctgcttctgttgctgatcagtgatcactcggcccgggtgaagcggtgtcgagaagactaaaaaatgatgatttaattgaatgacacccatttcgatcaatttcgaaccccggacccgaatacgaacaaaaggtcgaaagttcaaattttgaatttatttttgaaaaagatgtcatatcaagctaaactattaccaaaaaagcattgatcattttaattaaattgttcacccctcgtcaaatccatcgtccttgatccaaatgataatctgtttcggtcgagcagcactcacttcctcccacacattgtcccatttgatctcatcccatccaattggacaacgcgtgagccaacaatggtttgtatcatgatgttccagtgtcaattgctccccagtcacttcgttgatcagatcaaatggcataacaaagtcaattaaagtggatgaaagcgtcaagaaaatgcagaaagtcactggtgaagaagcattggaaaatgccttaaaaagggacaaaaaactcataaaaagtggtgaataatccaccgatttgaattgttccatcgttgatgaccattgttccaccgatgaattaacagagcatttgagccacttcggcacaccgtccggatgaggcgtgaacagccattttgccagcacttgaacatccgacgccatggcactgtcatcgatcggaaattcggacactatgccgtcattgaagacgacagcgcaaagggatggacaatcggtgagcattgacggcgccaattgacgcaaacagcgaaaagcgatggcgttcaaaaacaagcgacgaattgaatcgcggaacattggccaaatgttgtgcaacacaaattccaaaatgcgaccattttcaatgacaatgtccaaatccattgcagaagtggcgaaaaaacggtgaaaatggccgagaaaagtgagcacattttgatcgatgtaactgaaaagcatagaaaatgatggtcacaaatcagtctcaatctaatcagtttttacatgatctgaatgcgtccgctgaatccgatcactttgttcggcaaaggcttttgcgggattggcaatgtttcttttctgtcggcatcgataatttgcattttcttcgtgccattttcttcaatgtcccatgtaattagcaattgtttgttcaacatccatttgcgtgtcttgaagtgttcatcaacgtagaagtcaaatcgacggctgatcagtgcaattccgaggccaagttgagaaggcgcaaggaaatcgaacaccaaaagccaacaatcggcgcagataaagctgaaaaaatgaagaatttcaagaaattttttgtttattttttttacatttcttttttgggagggagtcgtttttttga

SEQ ID NO: 9323 - DNA, 921 bp, Heterodera glycines
aattagcgataaatttatccttttttctttgaccgacaatttaaaaattaattatatatattttcttttcactaggttgtcctcccctggtgtatttgctgctcaatcaacgaattcgaaatgattgtgccaactatggccgtgccattttccgttttttgcgcaatcgcaacaataattcggtgtcaaacgggctagttgccgtggcatggtccacacaaaatgatgccggaaacaatgccaacaacagaatgagagacgataacaatgtgcaacagcagtgaagcctagcgggagaaaagatgaggcgaatatttataaactcaatattaaatcatttcggttatcaatatattgcttttttttaattgtattcctcaaaatgcctgttggacaaaattcatttgttgcaacaaaataatcccaatttaatggcctaacaaaatggaaaaatggctcttggttaacttataaaaaattttttaaatgagatagaattaggggtaggtcgggacactaaaatttatgttgactacaataaaacgacacttctaagaattacaaagaataaagcgtatgggtgctgaaaaatttcaaaatattatttcaatgaaaatttacagtatgatccagaatcattctaccgtgctctaataaattatttttatgaaaaattcttttatttcacgttttggtgccgaacttcttcttccatccgattaagctggttcggttgacacccaaattttcggcaattttcttatcactcatcgttagatttttcttagtttcatttcctcacttcttttcacatatttcaatttcctcaccatatgtaagaattttcaatttgccttaaacaaataaaataaaaattaaatgaatattaatttaattaaaaaaaactttattacgtttatt

SEQ ID NO: 9324 - DNA, 4172 bp, Heterodera glycines
  unsure (1)..(4172): unsure at all n locations
ttctgcttccggaccagtcaccaatcactatgctgataattcgagaccatcacgaaaaaatgcgacactcaggagtagaagccacgctcacttcattcctggagaaattttggtgccctaaagctaggggcacagtgaccagagaggtcaagaaatcacacaaggcctggatcgtgctgtaacctgcctggctactcgtgacgtctatcttgagccggtccgggacctaacggcctcgtcatttcttctcattctgcgccgcttcacatgccgacgagcggtcggggtcgttttcgcgtggccgttttcgcgtggccattttcgcgtggccgttttcgcgtggggacgttttcgcgtggctggggtacgttttcgcgtggccgttttcgcgtggggtacgttttcgcgtgagtagctgtttaggactgaaattggtcggatttgtgcaaaacatccatgtttcgaatccgaacccgcattcggacaaatttcttaactttttaatttttttatttcttgcggctaatatcttctacaataatttgtcagtttggcggatgtgcgtcaaacggaaaaaataattaaaattttataaaaatataacaaaaaataacaaatttcagaacaaactaaggtcgcatttcatagtttcgggaaacaccagtgagaaaattgataatgttttcgggattcacattggcattggcataattgtgatcattttgggggaggtgaatgttattgatgtcgttatagagtgcgccgtcatgttctaacttaactttgtttcgttttgttatttgtcctttttcattcttttggcctttctttcgtcgcatttggcgacactccccgcgcagagaccaggtggaccagcgctcgaggaggcggacttcactgagaggacttcttcttgtgtcggtggcctcctctatactgcggcgcatggaccgaaaggcgaccgcctgctcatttaggagttgtcgttgaatgtcgatggagtcgacgatcacttccttcagccctttaagcactcgttccgcttcctcagcaatttcgcgctttcggcgctctgtccattgggcggcagcctcttgatcagtggcgaggcgagcaaattgtcgatggagtatggcccgcaaatcgtccggtgctgcttccgtggcattgcgattggcgagggcgggtttttggatggggaagggcaaatggcagccaaagaaaggggtcgtccagcaggggccggagtcgggcggcggttggtcctttctgcctcggctaactcttcttgggcccgtttaagggcagcacgtttttgggagagcaggtcggacatgttgttggcaaggcaaggcgttagggcgatgacagaattgggggaaaaaggaatttggcaaatgatggtgataagtgctggctggcagtatttaagtagtagatcggaaggcagcggcaaatgaatcacaccaactcgaggaacattggattgtgtagaagggcagtgggtgaataagaaaaaattgagtcgaagtgaattggttggagggaaccaaattgtcgtttgcaaaggtcgtgtggcagttgattggtagatgcgacgaatgtcgccaaaaaatgcaaaaggcaaacgaggagaagggcagggtagacacgcaaggtgatcgggccatgaatagttaatgtttgtccacgtgaaagtcggcgctcaattcccggctccccaattggcacgtcatcggtgctgaggttaacgaaaagatgatcgggagtagtataagacgtcaaaagcgcacggttgcgcacgggtgtttaccgcacaaacccgtgcctatgggaggggcgcagccctttgatattaccgcccggggacattttcccgcacaatcccaagcctataggaggggtgcgtgccaaccgaaccctatgtgaggggttgtttctttgaagtctgccgccttgtagatttaatttcctcaaatccgcactggcgatttttttttcactccccctctccgcgccgcgcagcgccgcggaaggtcatcaatcatccacctgtcaccaaagtggcaggtgaaggaaattcaatttttctttgaaaatttaaaattttgaccccaaaccttttagcattttattttcacaaatcctgagatttttatgatgggttttcggatcctgaaatttcatttttgaaaatgtgccaaaacagtgcgggtttttttttgcatttcctccccgctcgccccgcgccgcgatgccgccgccgcgaaaaaaaaatcgataacggaatttggaagaagtgcaaattaattgatattggcagcaaataatatcaattataaattggacaataaaattaattatttaaattgtgtttaaaaataaaaatcgaaaatgaataaataaatcggatgaaaaaccttttcaaaagtaggtcacctgtcaaccaaaattgattgatgggtttttatttctcttccattattccgcaatctgcacgtgactttttgttccaattatttcgcagtgtggaccattaattaggtcaactgtcaataaaatgggattgattggtttcttattgaaatttctccatatttttagtttttttgttccaattatttcgcaatagggcccctaattttgcaaacctgtcacaaaaaatgattgatgactttcgaaataaagaatatccagacgatttttttttttgcagttttgaataaaatgtgacagttgtctacggaaatgattgattaccctcaaaattaaggcagacccagacagtcacgtgactagcccctcctcttttttacccatttcgtacacccggcccaaatcgaaaatcattcaactaaatagttggatttcattaaactctctcttcacgctctaattttatttctctccgctctatttttatttgcattaattaaatctattactatttacctacgtctttttcttttcaaatctctgctctctttaattcttctgtttcaatttcttgttttaaaatgtcttttaaacgcgtgaactccttccaacccgccgtgccaatggccaaaaaatgggatttccgatcaatcgggtaagtattacatgcgttacaatgcccaatggagaagggccaagaaatgcccataaattcgactttggattcaaggaacaccagcggatagggtaagtgtttttaataaaatagaattaaaatagaaaaaaaaactaaaataaaaaaatcaataaataaatttaaaataaatacattaaatttatttaatgaagcaaaaaattctttaaagagaaaatgaaaagcaacaaaaaaaaccgaaaaataaattaaaaatattttaaaaataataatttaatgagccaaaaataaataataattaaattttaaaaaatcaaaaaaaataaataataaagaaaaaaataattaattaaaaaatattaaataaataaaaaataaaatttaaaaaatcaaaaataaattaaaaataaaataaataaaataataattaaagtaaagaaaaaaaataatttaattataataataattttattaaggattacaaatgcggataaattttgcctgttttacgcgcttgtggcgtctaaattttatttggaagtgcatcgaaacatttttaatcgatttatgaacaatattatgagacagagggacgcagctattgagcttttacataattgtggaattgatattaacgaatatagctatggtgtggagcaattgccgaatgttcagaaatattgggtgggtttaaatgaaaaaatgcaaaattaataaatttttcaggatgagatttaccccggaaagtaccgggttgtggcatttgagaagtcagctgatccgcggaaatcgatccgtgttttgtggaagggccagatggggcgagagaaggtcgtaccgatatttttggagaatggtcactggaatggtctgaagaattacgcttgcttttttaatcgagggaaaaaattttgtgttgaatgtgaatgcttttacgatcaggatgtaaaacatactttcgattgccgggcaaggtgttattattgcaaacagagtgngaggngtgccgtgtcaaanggagagtgnagtgaagattgaatgcccgaagtgccaccgtacttttataattgggagtgtacac

SEQ ID NO: 9325 - DNA, 4369 bp, Heterodera glycines
tatcattcaaaaggaaatcagatgatgaagtcgaactgactccgtctgacaatgagaggttttgagccggttctaaacccgaagaaaattggtgcagctaacgaacttcgcatgcttcttttgcatttttctgcttttgcttctacgatttttcatgacagacatatcataaaaaataaaatggagccaagcgggcgcgaatcccgtctcatatgacccccagaggattaataattaaatttcaaaaaatcgtaaaaaactcaaattaacttttccagacattcaatagctcctcaacaacatctgcgtgtgagttttttacgcccgactaatttcttaaaatggaaaaaatcaagtacttgattaaaaatcagataaaatcaataattttgtaaaatccgagctcagattcctgatcagtgcatcttaaattttaaacaaaactttaccattgccgaacttttgaatgataccaaattttcggggtttgattttactgatgcacaattgtcttcattttcgggttttaatcaagttcaaaagattaaacacaattccgcaactagagacctatttttaattttcagtttttttagaaacttgaactatttaaataatagttctgatgaggagagttttagtatatcatttatgccattttttgtgatggattgctatacttccgccaaatccaatttatataaacattcttcttcttcaagggtttattgattgccattggtgtcgatgaagtgattgccccgtcttcctcagcttcaaatttaccttcccaagatacgactcttctaaaagtttggagcttaaaccaatggaatgacgccatttctccgccatgcaaattttctgctcaattgaattttggcaggaaaatagacgcttcgctggccaactttgttgccatcagcgaaaagcttaatgtgattgttattggtaggcaatcaattcgcttattgataaatgattatttgtttaggactttcaaactcatcacttttttaccatttattgttggctgacccaagacaagatcgctttatttctccaaaatgggtccaacttcgtgaaagcacaaacccagccaaagatggccaattggcgggtgttgtaattggcgaagtccgcaattttacacttgtctcgtgtattacggacaaaacagtgcattcatacattttgaattccgaaggaaatcttctgaagacggtgccaaactttgataaatgacaaaatgcactttttggcacagatagtgcacgatgtgaagggttgtgaacggaaatgttggcattattcgaagacgaccaatcagctcattgtcgcgagtcgggaggtgggcaaatggcacaaacgaaggtcattggttggtaatttgcgagttgctaagatggtctacttctatgacattaatgactgcttggaaatgggtggcgaaaacggacgatgtcacgccctggggagaggaagtgaaaaagtgcaactgctggagaaagatgggcaaatcgcactggtcactgagcaggaaacgcaaattcagtgagttttgtcaaaataaatgcatttaattgagaaacaacgcgaccaacgagctggaaaaatctttgggttataccatgaaaaaatttcatatagggctactcttttttttctttgccttattacacttttatctgatggcacaatttgttgtcttttaaatgattttattttaaaatttcttaaaagttttaattgtttgctttccattttcactattcccatgccattcatttttcatagatcagacaacaacaaaatgaatgttctctatctgtttgacatcgaatcgcgttacatttcatttttctgctcaatgccttcgccctgtcatatttttacattgggcggtgaaatttatctgcgcaattccgagggagtgcttagcaaattggtagaagagagtgtggagaccaaattggacattctgttgaagaagaatctgttcgatttggccattaggtttggtcgagttttgcgtttccaattgctttttttcattttttaagcattgcgcggcgtggcaaatccgaggaactgctcaaaagcattttcatgaaatacggtgactatttgtataaggtaaagagagttatttttactctcatttttgtgtttattttcagaagggggactttgacaattcgattaagcaatacacaaacactttcggatttgtcgagccgtcgaatgtcatcaaaaaggttttgtttatttttaccaaattgttcatgtcaattgctttctgttgacagtttcttggcggcgctcgaatttcacaactttgtcaatatttggaaggttttttttaatgagaattgccaaatttaagtcccacttgctttagcgttgcatgccaataatttggccactggtcaccacacgactctattaattagtgcttatgttaagcttcacaatgttaggaagttggaagaatggttaaaggacggagctgcacaattcggacccgattttgatgtcgattccgcgataaaggcacctaaatcgaagcgataaaaggccaaagagtacatttttaagctgttacgatccgctgaactttttcacttggcctcaaaattagcagcaaaatccgatcgaccattcacatttttggacattctttgtcaggacactcgcgaatggggaaaagccgtcaaatttataagtgaaaggccgctgtcagtttcatgcgaattactggaaacttatggcccgattttgcttgaacatgtcgaggaacaaaccctcgcgcttatcggacgattgatttggtcggaaggtgagaaggtgttgaatccagttctttatggattaaatttgttagcaaatcggagggttggtgggttttaatgggtacctttttgtgttcacaatcaaccttttttcagtgcaatttttcaaattcaacgtaccgcagaaaaatattatttttaacagattttgcccaaaaaggcgatttatgttttctagaaaattttgctctgaataggaacgcaagcaaattttaatagcattttttacgcgttaaggagtgaaccttaaaaatctgacgaaaatattgacaaataaaccgaaaagaatggaggaactgttcagcgagcttaatttggctggcgaactgaaagacccgcaagtgaggagtcttttgcttgagcaacgcctgaaaactctccaagagagtgccacggttagtgcatttggacgccatactcccaaatggtcattttcattcagaacccttcgaaggcacagttcgcggaattggtctctctggttgattcggcctctccccaccactcccttctcttagcttatcagtacaattgttcgccgttggtcattcacattttgagacttttgaacaggtttaaatcgactttttgcttggcattgaggcctatgcacaaatcgttgtcagttattttaggtccaaaatataaaaatggccactttagattttgagcagcaaatcacattttatatactgactgacaagggaaccacccgaattgtaagtcaaaaatgcatatttattatataccattggatagaaccttgccccatactttgatttttttcacacaccgctaaaattaaaaattcaaaaacaagtcaactctgtcagtccaatggaaataatacaaatgcatttttcggcttaccgttcgggtggttcccttgcaagtttcaagttattccaagttaagcagtttgggtgtaattagtattctaatttccttgaccagcccatttaaaaagattttgggcatgggagtaatgtctgggcgcaaatgtttatttgttgttttcacacaaaggatcgaagaactcttccgttatttgctcactgagggcgacgtggtggcagcgatcgaattgtgtgaaggcaaatcactcgaggacatgtgggtcgaactgatcagtttcggaacgaagagcaaaagcgccacaaaaaaagaggatttgatcgcgcttctacgaaagttgcagagatttgcttcttttattaatttttacaatttcagaatttcggaatccgactctttaaaccctttaatcgttttggaaattttgtctcgggacgagtcgctccaagtgggcgatattcgcgagtttatcatcggatggttggaacgacagaacgagtcactcaaggacaatgaacacagaatcgcggagcaagagcgtcaattgcaaaaaatgagcaaagaaattgcggacctcgagaataagttgcttttcggggtaaaaggcggaagggaaagaaagggttgtcaattttccatgacaattcgtcatcggcggtgct

SEQ ID NO: 9326 - DNA, 769 bp, Heterodera glycines
  unsure (1)..(769): unsure at all n locations
ttgagaattttgaaaatttcagatttccgacttttttcgaagatttcgaaattggccaaaatgagtgtcagatttgtgttcagcgaccccgaaaccccttagaaacttactttcagtgacttttaaaaagttaatatttttaaaaaaagggggtcctaccatcggtagtattacccgatttctggaaggtttaactgttgtccctttgcagtgtccaagtgtaccaagtggcgaagtgcacggtcggttctccaagtgacccatcaacggtaacttttcttctgcctcttcaggtgtgtaacaaccatctccaagtgcccgccattcatttcctctgccgacattcctaccatgcaaattgtttcgagtcgtacagcggaaacagaccagacgaatgccccgcctgtgcaatgaacgaaagaaagggaggacagagcgaaggcagcggaagtgaacagagccaaacccaaccgatgaattatcagcagttccgaaaaacggttttacgcccagggtgggaagggagttgaattgacatgcactttagttggcgggaagtacggatattatggcatttatttctgattgtctgacgaatggacaatttggtgtcagccagaaaggcccggaaagaccacgagaaggaacgccttttaatccgttcaacgaagatgaaacgagttaaattgatatacctatatacacaaccattgacaaaattttaaaccctcaaaatgtaacgccttattctcaaaantgtgtatatgca

SEQ ID NO: 9327 - DNA, 609 bp, Heterodera glycines
  unsure (1)..(609): unsure at all n locations
tttattttttntatgacacttgatgaaaatcagacacaatgaaggttcatgcatagtcagagcttagattcgtgatcagagtatttttttaacccaaattcattgctaaactttttttaaaaaataactttaaaaatcgaaaaaaatcaagtagttgacaaaaaatcttagataaaaatcaatgattttcaaaatctgagctgattcgtgatcagcgcattttttaagcctagaaaaaataccagacaaatttttaacattttttttcgtcgggacaccaattcttaatgattgccttacttttggcaaagttttaatatgttttcagaaacaatttaaaaagaaacttttaaattctttaaccttttccgtaaaaattgcttaaaaaatacggcgctactttaaaagtggccgtttttggaaattttttcaaaaggggggacccttttgttttgcaaaatttttttgtgagtcataaaaatttattcatcttaggtttttggggtccccgatcacgaatctttcaattattttgatcaattccgatttcctaatctacatatgaacaaaacaacgtaatttgatgaaactcaaaatttccatttttat

SEQ ID NO: 9328 - DNA, 1655 bp, Heterodera glycines
cctggacctggacctggattccatgttggacctggcttccgatttcctggacaaaaatccaggaaaatccaggtccagctaaaatccaggctcctcgagacctggatccaggcctggacctggatttttttaaactcattttaaaaatcaaaaaaatgtttgaaaaattcaattaattacttggcaacatctaaaaatatctaatttacaataataatttgtttttaaatatatttaatcattttttgaaaacttgaaaaaatatcggtcacttgaaataataaattctaaaattttgtccaggaaaatccaggttttttcctgttttgcctggacctggacctggattttttttcacatttggcctggacctggatttcctggacaaaaatccaggtccaggaaaaatccaggttgtcaaaaaatgacctggacctggacctggatccaggaaaaatccaggcctggatccaggtccaggccgagctctatttgttatacataaatcccaacttttcaaaattttgcgctatcggcaccgcctgaccaatttcaaccaaaatgaaaaaacactactaacaaatatgaacttcacatttttttcaaaaatgacccaaaattactttttcttgcttttttcagaccaaaattaatttgctccctctctaaatgccgaaggtttgtgcttttcctgttaactctgatttgggcactttttcactattctacaggaagaagtgcccgaaggagttgaccagctgacttattttcgtgagcaatgcgagcataaggttgcccatttgaagtccattttggaggaatgcaacgagcgcgtgcggtccaagccgaagaccactgaaatttgtcacatggttcgatttaagtattatcattacaaaaagaatagacttgcgactttttgattggaatgttgcaaaattgggagacggtcacaaatagagattatctacgggccgggtccgtatacgggtttttagcccgtaacccgtatcgatgtcaaacccgtaacccttacccgtacaattacgatacgggttatttttctgacgttcttctaaggtgaaatggagtaaatttttaaattttgtgcagtcaattcgccaaaacattgaaatttggcggttacttttgtaaaattttctgtgaaaatcgaaaaagcactggtaaatgttggaaaattttatggaattggaaaaaaaaatcaacataaatttttatgttattcaatagcacttcgttgaatttatgaaattctctttcattttttccaattcttaaatttcttaagaaattggtttattcttcaaaattatagatcattttagtgaaaaactgtcagcaaaattcacgaaatcgtttaaaatcgcaaagttgggcattttttctataaaatctttgcactctaattttaaaaatttttcccagcggcgcctaccggcaccgccggactctcctccccatgttcctaaaaagttttttgagaacgcgcgccgcaaaaaaaagtagggtgaaaagtggtcgttaaaaatttttgagcatatttttatttcgtaaaataaagtcttttagcttaaaatattcaagacttgtatttgtaaactaatttttatcaaaatgaaaaaaacccttacccg

SEQ ID NO: 9329 - DNA, 2728 bp, Heterodera glycines
  unsure (1)..(2728): unsure at all n locations
ccttacccgaatacgggcccgtatttttactggataccgttttttacggactacgggttttacggggttttagcccgtctcccgtattgatgtcacccgtaattattaggcgaatcactcgcttttgttcactaatatctatgtctgcctacaggagatgatcgactacgtggagggcctcgatcattgtgccaaaccgaaggcattcaaagcactgaaatgatgcccttcaccgccggatgattactttaggttttttgtctgttaatgtttttcggatttatgacgacgatatcagcaagcttttcgaatggatattaatcaactggtaaaatatgtaattaaactcattggtgcatttttgcgaatgtgaattttgctggttcattttcggttgctttgtaatttcaatttgccttcttatgctttttctttgttatgaccatagagcactcgcttctctttttctcgtaaaatttccttttcaagaacagaaaacgggtggaaagtcacttcattaggagacactttcgaaggcgcaatttgccatttcgaggagcgctgcctttaaccgtccatcattcacttctctttgtccattattcattttgcacattctgcggttggtaattccccccccccgcttttgaaaggatttgtgtgatcgataaatgaagggagaggtgagtgaggagcactttcgaccccgtccgatgggccctcccccgcccttttgccctgtgtacgcaaatacaattgaatggcgactgaggggactcgggtgggtgttgaggaagagaagaggattctgagaaaggaaagtcctttggatgttgaagaactctcattttctcctcctcaaaagcataataataatgtgtaacggcacgcacttttttgcccttcaatggatggacggactgtttttgcattttgctcctttctttttttgtgtgttatgaaaaaatcattttggtgcgatttgttgccctttgaagggccattcccactgaccattgttgttttattggatcattaattataataattaattgtctgacacccgtcaactttcaaatgaattggtttcctttctgtttccctttgccccaatctttcgtccatttattgtctcctcccccctaattactctttcttttgcattttaatgaaacggttaaaagggcatatgttcttcctttcatttagcagagggaacccctcgccaattgagtgcgttttttggcattgccatggcttttccccccctccccttcttttttctgtttccgcttgccctcgtccctctccaaaggacagctgcggttcatccaccgctgttcaaccgaattgtccccaccagcgaacggacagtgaatctgactttgacgcgggattttggcgaggcaaaagcggtgaattttggctggaaaagcgaaattttagaggacattcgttttggaggattatccaaaaaatgaacggaaaaatttatttattaggaaataattatgcctttaattaggccgcatcaaaaaatgagcttaaggggaacgatgaaagcgcaaataattcaaatttgaccgcatcaccggtggaggcgaaaattcatcgactgaaagagctgagaaacgaaatgcgtgcattgacggcgatgatcaaagaagaacgacgacgaagtgggatggcgggggctcaaacgaaacttaggcgactcgaaaacattcaggcaaatccaaagacattcggcaccggcaccgatcaatcgcggagaaaatgcgcaccgaaatcagtgggacaattaaaaatgaaattgaaaagcataatttccccatttgtttttcgcaggcagacaatttcgaaaatggcgcaaaaaagtgctaagcaaaattcacttggttatgcaacgattggaccaattggagggcgaaatgcacaggacaaaggataatttgcaaaaagtgatgcacgacaacggccgggaggaagggggcaaatggggcgggggcagcaaaaagcggcgggtgagggaaagcattaaaattggaaaagagaaagccgacttagccaccgccttcgcattccgccgaatcattgtcagcagtgcgccgcgtgcaaatgaatcggcgcggcgaattgggcaatgtgtgccaaaaccacggggagtgcaagcccggtacaatgggatgagcaatgccaccaataaatgaacgatcttacctcaccccaaggccattgctgtctccgggatgccccaatgtctacagtacccctgccgattggacgaggcatcggacactgtgtacggtacgcgcttgaggaaggcgtcgactgccaacactcgtgcgcatgcgcagcacaacttttgtgcttcagggagcaccaacagcagcagcaaaaggtgggcaagagagaggaagagcatttggagaaaagagcataaaaattaaattagaaattttgactttttaagacaaatgccaacagttcttcgctgatggctgtctgtaaaagggcttcatcttcggatttgctgaacggagtgtacgaaaatgcattggattccgtgttcgagcataccaaaagagtgcttaatgccaatagtttttgagaactgaaaaccaaattcaaaagaaatcaacaaaatccgagtctcttttttatttatttattttcctctanttgtccatgccattcccatctcatttaacaaccctctcatttgact

SEQ ID NO: 9330 - DNA, 1306 bp, Heterodera glycines
cgggtttaaaaacaaagaataaaaaaaatggtaatttaggaataattcccacccagaaaaacacaggaaaacgcgaaaaaccgaatcgattatttataatttaaaaaggacaaattcgaaactaagaaattctaacaatcggcgaacagttttctgaatcaaattctttgcacaagaatggcagtcgcttctccgcctccgttgcaaattgcagcgataccaaattcccctgattaataaatttggtggctttttcgcggtgtattacactgacctgactcgagttgatgcaccaaagtgaccacaatccgtgctcccgaacatccaatgggatggcccagcgccaccgctccgccgagtgcgtttacccgtgccgggtccaagtcgagctgacgaatgaaagccaaggcagtgacggagaacgcctcattgacctcccaacgcgcaatttgatcgatcgaaatgttcaccgattgtaacaactgaatttttacattaacccttcctttgaaatataaacaagactttttggattgctataagtaatttaataaatcaaatttaatggatttataagtcgaaacgaatgtaaaagtgggcgttggtcaagcatttaatttccaagaataccgttttgaccgcgtcaacgggcgccactgtgaagtcgacgggcgctctgccagcctcggcgtaggcgataaccttagccaacggttttgccccttcaacttggcctgatgcgatcacaagcgatgccgctccgtcattctgaaaatactcaaaaattacaaaaatgctcaacattgagtgccaaaaccgctaaccaatgagctggcgttagccgccgtgatggtaccagtgccgtccttgacaaacgccggctgcagcgaaggcactttgtcgggcattagtcgccgatactcttcgtcctctgccaccattaactcggtgcccttccgctgtttgactttcaccggcacaatttccgcaccaaatgcgccgcccgcccacgcgcgagtcgcacgagcataggaggcgagtgcatacgcgtcctgctgctcacgcgtgaagccaaattcagcaaccgttttctcagcacaaacacccatcggttggccgagcattgcgtccgaaatgccatcgcgttggatggaatccttacaattagcaacatttgctcagtaaaagccaattataaatttaaacaaccaaaagtttgatatccccagtagttgttgtcaccacgcgccaagtaaaatggtgccccatgaaaggtttcaacgccaaccaccaaaaccatggaacg

SEQ ID NO: 9331 - DNA, 2724 bp, Heterodera glycines
atgaaaacgaaaaaacaacagttgactcacgtacaattgaaaaaaatggacgaaaaatggttacaatggccactgacttttgcaacagattgccaactgaagggtacaattaaaaaattaaattttatttagccggggtgccaattttatgaaaaacgataacccaaacgctagcccattttgattagaccttacaaattttatggctttaaaattcaatttccgaaacatattggttggtgccttctctcaattcatatgcgcacatataattcgtggccaattttttgccaagcgatgaaaaagctgacaaatatggccaaatgatgctcccctcttacaattagcacaaaaattaactctaaagccgaccatgactggttaatgctttgaccttttttgtctgctcttagccggaaattttgttattaaacacaaaagtttatgttatgttaattctatgctttttaaatttttagtggtttttaggcccgttgttttttcgcgcataggtgatgagaaaagaaaccctaaattggctcgaattaggaaaaatttttcaaccaggccgccattacccaatcgcaaatgccgaacccgcaaatatcggttaaaccattcattatattaaattattatggaataattaccgctttttcactattttatgccaaaaatccgggcccattttttatttaatgccctacaaaatgccaattttagtgaaaatgtttcatctggatacttgcattgtgtgcagtttttgctttaccatcatatgcaaaagctggtgtggcgccttgagaacaaatggggcattatttctgatcaaaataatgacaaaaatttggaagcaaaaaatcatttattgcaaatttacacggagaaaaaaatgatcgcatgggaacaaatggtgaaaatctatgggaaagagttgaaggatctgacagaggtgaacgaactgattcggaggaaattcgaattttgtctgatcattgagggcgaaacgcgtgagtttttttttgatgagatttgtcacaaggaatagttttgtcttatgtgccatttatttttcggggtccggacaatccgtcagtggtcaatccgtcagtggacaatccgtcagtgaaggacaatccgtcagtaatggacaatccgtcagtaatggacaatccgtcagtaatggacaatccgtctcagcggataatccgtcagtggacaattcgtcagtaaatttttttttgagcaatcattaaaaatcttgcaaaaatgatcgttaaatttaataacgtaatttcttatagattcataacatttctagttactttataattcaattaattgaccatctcaagaaattatcatttaattcttttaaaatgattatttcataatttttataaaaattattaattcacatttttagcgacttaaattaattttcacatggttacaaataaatctgggtgttttaaaaataaatttgcttatggattagttactgacggattgtccactgacggattgtctacttactgacggattgtccactgacggactgaccactgacggattgtccgggagccttatttttctatgttatgtttttgtcgcattagtcttttttttttgaaaaattcgccatttttacattgaattttttattaatttctcctggctgtgactattggtgccgccggccgttcccttaaaatattcagtatttgacctaaaaaagctacaagtaattcctgaagaatattttttaacaatgcacataataattccaaattttcccgctgcgcctttcagcgccggcgacaaaccagtaataaattaaaattttatcacggcaattccacaagttgttcataaaagttaaaacagtcacagacatatatgagggcaaacaacttttaaaggattttaacagtttgaaaaaagtttagatattttttgatatttgggtagaagtaccaattttagtcatgttttttttttaatttatctttgtatagatattgttacaataagactatcagattcagaaagctataaaatcataaattaagaattgaaatgcaatgcaattggtgccgaaaatgcgcatttgttcctcaaaaatttccacaaaattgtgtttgagccagaatatgaacggaactggtcaaaaaaagcagaattaattggaacaaacattttcaattcgctgagaaaagaattgcggaagaacgaacaattgaagcagaacaaagggaatgaggaccaaaaagaaaaggccaaaattatggccaaaaattggaaattggccgaaacatcgatgcgtgtacgagtccaagtgttggtgaacacagcggagagaaagtgccgaacattaccgaaaaaaccgtttcgacagatccaaaaattgggaagaaatttatcgaaacgactcgaaaggtcatggagttcgaaaaatagggaaattaaccaaaatgaaagtggaggagataaatttgatgagttgacgttggaaagtgaaaattatacaaaaaatccttttcgaaatggagagagaaagtcaattaataggacgacacgaagggaaaatgaaaataccacgaaaaatccccttcgaaattttcaagaatttggtagaagcatttcaaaacgattggaacggtcttggagttttaaaaataatgaagagaatgtaagcaaaacggaggaaagtgccaaaaacgg

SEQ ID NO: 9332 - DNA, 1849 bp, Heterodera glycines
aaaattcggtgcttatgggttttgccaaccctctagaaatatatttatagaatattttatggtataattttaagcgcggatcacgaacgtcacgtttatttttaaccatgatatgtttccagtgagttaagtgaaattttagtttttttttgatgagattttacgaaatttgttgcctttatgtaaaaaaaattcagaaggggtggcaaaacccataagtaccgaaaactcttctatagttttttggtatgccatttctgtgtctaggcctcgcatagtactctaatcaaataacgcgatattggaattccattgatttatttgaaattttcaggcggcttaatggacaaaagctttgatgagtttttgttccaatgtgctggacaattcattgaggccgttgccgaggaacaattcagttataaattgtttgtcaatcttaacacaatgcaattggacaccgaaatggactttccgccatccatgaaagatgaaataatggtatcaaaaaatgttggaaaaaatgccaggggcaaatggttcatgatgcggtcgatatcctaaataaatttactaataaaaattttaataaatcaattatcatttaatttgtaagcgtttcatttccctttaatcacagtgaactgttaaaatcgctgaacaaaaatttggcgcatcgtctgaactttgagaaaatcacaagcagaaaggaaaaggaacgctggataatgctgcaccaaaaattggagaatttacggctcgaaaacattgacaaccgatggatgcacagaacgggcacaaaactgtcgcacagttaccaaaactttgtgcgcgactttcgcaaatggaaagccaaaggcacactttaccatccgataagggacggaattcgaaaggttcggcacgacatgggcagtcagaggaagcactcggcggagaggaagctgtacaaggcacagacaatgcgccggaggagacgaaaacggacagacgacaacgaaatttttgggggacaaaaaacgttgggtgaattaatgagtgaggaacggcagctacgaaaaagcgaattcaccggtgagagtttagctcgatgaaatgaaaaagtgaatttaacgggccaaatttaatgaccatttaacgttaaaatttatttaaaaaattttaaacaattaaaataaacggatagcataagttttaacacatgagccttaatgggtattgtaaacataaattagaaaatgaaaaaattaaaaacatttatataaaataacacaaaaagccctaaaaaattattaatagcgccgccatggaaattttaatttataagtgagatttgttaataatttttattaaaaaggaagaaatgtagatattaatttattagatgattaaaaaaaacatttatagccctccagtcaaaaattttgaaaatctatttctgtaaacatgcagatttttaaattcctgtctcgaacataaaatttttttttgaaaataataaaataaaataatttatgttatacacaatggaatttagacacaattgttgcgatccgatgcttacaagaagaagacgaaaccagctcaagtgaacagcagcagacaaaaacattgggagaattatttgacgaagaccattttgaagcaccggaaattgtaatggaaaaaattgagcggaaaatggagaaaatcagacaaaaaattgcacaagaatcattgggaaaacggttaaaggattacgaaatgtttatccgcgctttttacatcgctttggcatttgaactgtttgagcgaatgcacggcgaggagggcgcaatgacaacaaattggcactttgtgtgggaagcgg

SEQ ID NO: 9333 - DNA, 971 bp, Heterodera glycines
aaaagaagaagcaaaaaaaattgggggagggagaaaaagaagagaaggataaaagcagcggagggattgggtacgaactgcgctatttgggctacacaacggagaaggacggcgagcaattgctggagtcgttgcaggacgagatgaagctgaacctggaccagttcactatgagctacgatggtacgttcccttcattagtgcttttgttcaagagtcttggtctcgcgttaaagaatgcgggtttttaaggagcctcctcggtacctaatctcagtctcgatgctaaatcttgaccggattcttgggaaatgaacaatcaaacagcaccaaaatcatcaactcattttaataaattagctaacgttgcaataaaaggatcggtcatttgctaaatgatccacctacaaattcatacaattcaaaaaatacaaaaacaaattaaactttcaaagaatattatatatatctaaaatttaacaattaaaggacagtgcgatttgaccaatgatttaaacgattgttttgttgcgtcggatggcattgactttgatgcccaagttgaaaaagtgtcgctatttggcaaggaaaccagtgaaatgagcacattagaaaaggcagcggaaagtctgttcaaaaagttgaaccgatggagctacaaatttgggcagagaggcaaacggcaccgaaatatactgaagcggtatttcagcggcaaaatgaaagacattttgggagtcattcccgaaatgatgactgacaaagtgtcaccatttgaggtgatttggtcgagtcaggacatttcaaccccatgaacattttacatttcataaatgatttcttagtcaagcattttattgcttaaatttgtatggcaatttacaaatatttaaaaaaagttttcgttttaaattttagaactcattcaaaaaattgaggcatatacacaattgaatatttatttaattaaa

SEQ ID NO: 9334 - DNA, 3528 bp, Heterodera glycines
aaagagatcaaaattcttcaggtccgttacttttttatcggtggttaatgaaaattaaaaaaaaagaaaataatgtctccattttacaataattgttttcctaggaattgaaagggttacaacatgaaaatttggtgtcactgttgcgctgtgttgagaccagtacccacgtgtacttggtgatggaatattgcaaccacggggacttggccgagtatctgttcagcagacagtcgctcaacgaactcaccattcagcacttttttacacaaattgcgcgggcgttggaggctctgaatagaaaagcgattgtccacagagatttgaagtaaggcaattaaaatctgtattaatggggctatatttgcgctattcccattctttccttactgaaaatcgttcgcaggccccaaaacattttgttgtgcaatccgcgacatcccctcgtcccgctgccttctcagctggtcgtgaagttggccgacttcggcttcgcccgttctctacccgaagggataatggccggcactctctgcggctctccgatgtacatggcaccggaagtgatcatgtctcacaattacggagccaaggcagacctttggtctattggcaccatcatttaccagtgtctaaccggaaaggcgccatttgtggtatgttcagcagaaatatttggactaattagagaaaacgtgatgtacacatcgaattaaggcacaaacgccacaggcactaagaaattattacgaaagacacgcggagttgaagccaaacatcccggatttctgttcagccttgttgtccgatttactaatgagtcttttgaaaaagaatccattggatcggattgaattcagtaagtctgtgccttcctgtcactttcactcttaatcagctaatctttgcaatttatcagactctttcttcaatcatccgtttttcaccaccgaattgccaacttcgaatgtttcaccttcgcgtcatttggtgcgtcgcccatccgctgaagttcaagcccaacccacccaaaatcggcctaaattttccgggagtcccacacaaacgcaaaatgggcccaattgcaagtcaccacaacgatacgcaacttcgcaccaacgaattccttctgcggatggccacagacatttagtaagttggcctttcgttgatttctttttatgcggttggccttacgagaacatttgcttttactcattcattggcttttcagcctcagtccgtgcgaaatgcgcacgccccgggcgttttgcggcgccaagtgccgccaccctcccactcacgtgccccctcctttcccctggcgaggccgacttcgcttgaccggtcccaaaacgcagccgcgatgaatgaatcgactgacttcacttttcttccgcctctgcaagagacccgtcatcaatttaaccaaatccaacggacaaaagcgaattccccgcaaagccttcaacagtcgggcggttcttcgaccggttcattggaaaacccggtcaaacaagtgcaagttagctactgatgcattgaatttattgtttgaattgcatctcccaggttcacagcagcattcctcgccaaaaaccaaatatcgcaaaggctgtccctgtgccgaacaaacggcacgcttttgccaaaatggaagaaagacgaaatgcgtcaaacagaagtcagcagtcaatagagcgacagacgagtttagaggagcagcaacggctcgggaagggaacggatgtatttggggaagagaagaagctcaaagaaccgattgcattgattccttcggtggaagagattgaattgcctgaaagtgggaattgaaatttagagacaaaacctttttaaggcatgtttagcccgtttcattgtctatgaccagcaaaagacgagtggtgctgctgcttcacgttcctctcttccggtctctggccgattacgtcgcaatacgactgcaattgatgagccgtccacttcgaatgctccttctcaaacaacagacggaaatgacaaattcccaatgatggcaattccaaagtctgccaccttcgttatgacttcgattggaggccaacaacaaaaagaggcggagaagacggctaaggagttggacaacatccgatttcagaacacaacgccaccacccaccgtttccggattaaatgcgcacaatcagaagaaaatagaattcaaagtgatcaatgagacgaacgggacagaaaggcattccaatttttcaaattgtagttaatccgtttattttaagtgaaatggacgaagatgaagtcggaatggaagacccgatccaattgccgttcacggaagaatacatgggtaaaaaagcaacggcgtaaggtcaactcgtttttttcgtgtttcagaagaatctgatgttatttcgcaaatggccgaaagcacatgtgctggcgaaagggaaaagcgaattgaaagtgtcggcgatggtccgtcaccgtctatcaccgacaacagcgaaatgattatccaaaatgcagatacgaatgacaaggcgccgtccaccacagatcgttcccctgacaattttctattcgatgcacccgacccgccccccgaattggagcaggagacactcctcggggccggacacaaacaaaccctggctaaattgcgcttcgtgttggacctaattgaagcaattgcgagcgtagcggagaacaaaacgaatccgatggcaattgcgatggagggaaacaagcggaaatcggtgccctttcacggaattatcacactgacaaacctttactcgaacagcgccaacatcagtcggatgcctaccgccgggcggagcaattggtgctttatgtcagagctttgcatgtcctttcttccgcactcgtaatggcacaaaaacaaagtacaaacgaaaatgcaaaaatgtggccaactttcacaatttcttttagttaacgcgagcattttgcacccatcgtccgccgttcaaaatgtgttaaatcaactcaatgagaaataccactatgtataaatgatacatcacaaaatttgcaataattattctgccctagtgtttggcccggtcacaagagttggcttcgttgggaattcccggccaagacccccaggcgatggttgtttctgcggaacgcattatgtaccaacatgccatcgacttgtgccaatcggcggcgctcgacgaactgtttggaaacccgcatttatgtccaaaacggtaccaaactgcttatatgatgttgcacactcttctttacacagtcagtttttggatatttttcatttatcatattacgttaattttaaggtgcaaaatgagcaggacaaaactgttttgttaaagtacaaaaatgcagtggaaaaacgacttcgcattctcggtttcatattgggaaatattatactgataactaactattaaattgcttacaattagtttttctaagtcggaaaactttagagcgccaaggcctatgtgcatctgtgatcaatgatagaactttttga

SEQ ID NO: 9335 - DNA, 4829 bp, Heterodera glycines
  unsure (1)..(4829): unsure at all n locations
tttcagaaaaaaattcatacccgggttttgaaaagatattctgaaaaaataaaatactacaaaaatccgcagtttttgctctattatataatttttatttggcatttttatcatttttttaagaatttttataaaaataaaagtgattttgagatccagaccaaagggtgagcataggatttttgagttgaaaaattttttcaccaaaaatcttccaaaaacatgtctttaggggttatttgggccgctgatcacgaatacgtgatcagattttacttttgacatcgataagacctcagaatccctgtgtgattggggattctgaggcatcattttttgggggggggggcaaagttcgaatccggacggtgtaacattatttttctgtgcatttttgggttattttgactgtttttaattaatttaaagatttcttttaaattatttaaatttattttttttaaattaaagaatttcattattttttttgaatttgtaaaaaaaaataatttaatttcaaattaaataaatattcaattaataatttccaacgttgtttttaattaataactaccatttttttcgtgttttcattgttttattcatttaaaatattttttattttattaataataaattacatttttttgaattaaatgtttataaaaacttttcattatttatttaattttaaaccatgttgtacctcttctaatcactgttgtacctcttctgattactgttggactcatcttaagacctcagaatccctgtgtgattggggattctgagacatcattttgaagggggggggagttcggatccgggcggtgtacattaatttactatgcattttttgcttacttttacattttttaattaatttgttttgtttgtattattaataataaataaaaatttttaatttaaattaaattattttggtgaacaaatgttttaatttaaattatttaattttttatttaatttaatattgttttattaattattttaaattattttctgatgaataaatgttttatttaatttgaattttcgagaaattaattcctttcaatttcaataaatattctatattataaatttctaactttatttttaataagtaaaaggatttttttaatttgataaatttataatacatccattaatataattttcttatttatttcattttaaaccatgattgtacctcttctaatcactttcgttcaaattttaatcactgttgtacctcttctaatcacttttgtacctcttttatcacttttgtacctctttaaatcacttttgcacctctttaaatcacatttgtacctcttcatcaaatttgtacctcttctatcacttttgtacctcttctaatctctgttgtacctcttcatcaaatttgtacctcttctatcacttttgtacctcttctaatcattgtttgtacctcttctaatctctgttgtacctcttcatcaaatttacacctcttctatcacttttgtacctcttctaatcattgttgtacctcttctaatcaccattttacctcttctaatcaccgttgtaacgggcgcgaatcgcccgttcgaggccgcgaagcggcctaaaaatccctgaaaaaaccgtagttgtatctcttctgatcacaattgtaccttcccacccgtggttgtacctcttcccccgtaacagcctaggtagcgaagctccgaaagcgcgaagcgctttttcccagctaaatatccgacggttcacgcacccgctagtttctactctatatacaataatgttgggtttcgtttctaaaaccaaaatctcgagaacgggcgccgggaggggcgcgggagtgtgacatcacttaaccaacttttgacggcgcatctgggaaaaatacgggttttccggtccggtggccaactgagcgccagcggcgctgaaacggcccaaaaatttttttgtccgtttttgccggcctgtatctttgcgggaagaagcgggagcgaaaaacgcttggtgggaggattttaagttggagtgtttgggaaaacttggcgtttatttggcaggcctacctgcaaaagcctggcctgtacacgttggcaaaatttgaaaaccatttttggcgtttttcgattttcgcgaataactcgctgggggttaagcggagcgggttgacgccgcttgagcatttgtgtagtttttaaagctgcatccgatggcgttttcagattttgaaaattttgaaaatttttcgagctaggccccctcgaaaatttttcgtttttgaattttattattttttgccgatttttcccaagaaaacggagaccactttcaagcaaccgtttttcgagctctatcgattggtggcatttttgaaaaaatttcaaaattttccggaaatagaaaaattttccggaattgagctccccatttccgtttgaggcttataactcgtcaggcgttgattttagcggaaatttgtcttagagcatttttgtagagaattttaagctctatctaatgtgctttatctcatgtttttaccatgagtttaaaaaaagttataaaattaattgtgattttgaaactcaaaaccataggggggaccccatggttttgcatttatgaaaaatttttttactcctaaattagccaaaatgcatttttatggcataatttgaggtgctgaatacgtatatacgctttatattgcgttttggattttttggagggtggtaaaaaaattttgaaaaatcaataatttttggcccttgaaaattcaacctaaattttaaaaattcataactcgcctcaaaattgtccaattcagctcatttaaagcaataaaaatcgagaaaaatatggagaattttaagttattttttgagtttccatattttaaaaattcacaaacttaggcctggatttctcaaaaattttaaattttcagaaataaatttataactcatttcaaaaaaggcgctaaagaatatttaaatattcatataatccgcaatttttttctctataaagagaattttatttgacctttttatcacatttttaaaaaaagatataaaaataaaagtgattttgggattcgggaccaaaggggggtgaccagtatttttgagtggaaaaattttttcacccaaaatcttccaaaaacatgtcattaggcgttatttgggccgctgatcacgaatacgtgatcagattttacttttgacatcgtcaagacctcagaatccctgtgtgattggggtttctgaggcatcttttttgggggggggagttcggatccggacggtgttcattaattttctatatattttttgcttatttttacatgtttttaattaatttaaaatagtttgatatataaattaataaaaaaataattttaaattaaaaattttcattatttatttattgaatttgcaaaaaaaattaatttcatttcaaattaaataaatattcaattattaattttcaacgttgtttttaattaataaaacgagtattttattataaaaaattttaaattaaaatgtatgtgatttttaatctttaattaaaaaattttccttagttatttaatattagttttttaggggttatttatgacgctgatcacgaatctgaaatcagaaaaaattaaaagacgggcgcgaagcgctcgtcctgaggcagtgaagcggccggattccccgcacaaaattaaaaaacgggcgcgaagcgcccgtcctgaggtcgtaacggacgaatgttctcaaaaaattaaaagtcgattaaggcagccgcgcatgcactagcaacgaagtcctttgcgcgaagcgctcatgtaatgcatattcttttcatctctcacaagccaactgtctacaccgagcaattactgtgcaaagcatactgtctacaccgagcaattactgcgccacacgctagtttatatatatatagaataatgttgcagttcgtagaaaaaattataagtccccgtggtttgcccggaggctcctgaaagtgcggcattgcttaagcaactttttgaggcgcatctgggaaaaataaggatttttcggtccggcggccagttgagcgccagcggcgctgaaacggccaaataaaaaaaatcgtcgcggttttcgggctgtaacttttctcagggaaccgggagcggaaaaagtccgctgagagggcacaccccagacatgttggctacaactttgtcactgatcactttttgatcagatcaaatgccgagcctgtagaaattggcgactgaacggcgctcaaaatgccggttttggcttttcgtgaataactcgctgggggttaagcggagcgggttggcgccgcttgcgcatttgtgtagttttttaagctgcatcaaatgacgtttttcagatttttgaaaaatttcaaaaattttcgagcatggcccccctcgaaaatnnntttcgtttttgaaattttattanntttttgcagaatttttcccanngaaacggagaccactttcaagcaaccgtttttcgagctctatcgattggtggcatttttgaaaaaatttcaaaattttccggaaatagaaaanattttccggaattgagctccccatttccgttcaaggcttataactcgtcaggcgttgatcttagcgaaaatttgtcttagagcatttntgtagagaattttaagctctatctaaatgtgcttatctcatgtttttaccatgagttnaaaaaaagtataaaattaattgtgatttaaaactcaaaaccataggggggaccccatggttttgc

SEQ ID NO: 9336 - DNA, 1829 bp, Heterodera glycines
  unsure (1)..(1829): unsure at all n locations
catcgatttaaatataataaagctttaaaaatagcgaaaaatcaggcgaatntaatgaactttatttgggatttctatcttctaaagaaaaaaagttattccagaatttctggaaattttcgatttttcagaaaaaaaatcctaactccattctgaaaaagtattttataaaaataatatactcaaaaaatccacaattttttgctctattttataaattttaatttagctttttatcatttttttgaaaaaaattatacaaataaaagtgattttgtaattgggaccacagggggtgcacatggtttttaagtggaaaattttgatttcacaaaattcttccaaaaatatgtctttaggggttatttgggccgctgatcacgaatatgcaatcagatttcacttctgacatcgttaagacctcagcatccctgtgtgattggggattctgaggcatcttttttggggggggggggtacgaattcggatccggacggtgttattcttttctatgcacttttaggttattttaaatcttttaaataatttaaatttttttgtttaattaataataaataaatttcttaattaaattaaattattttttgatgaataaaagtaaatcatttcacattattaattattattttatatttattcaaagtttatttaaaagttgcgttgattttatgcttcagataaaattacacgggagtcctgaatccaaaagggttaataaattatgctatttgctaataatttaaaagttcaaaaattattagtatttaattaaaaataatatatttaacaaaaattttataaacagtaaatcctttgttggcattaataaaatgcgcaacatggaaaaaaatgaaataaatagtagtaatgaataaaaaaaaattgaatatcaacaataaaatggggtaaaaaacaccatggaaaataaggaaaaagaattgcctgaaaaagacaataaatataatttttttttgtctaaattttattttaatcttgagaatttaaacatgcctgttcttgaattttatagtttaaaatcaaaaatgataatatttgacaaatagggagcaaaagaatattgcaaaatgataagatgaataaataaacaattgataaaaaaaatgaggttaaatatcaacaataaaatggaaaaacaattgtaaataaggaaaaatgaattgcgcgaaaacggcgttaaataataattttttttaatataaaaatttttaaattatttgaaattgttgttgttgttaaacgttttcacatcggtcataaaaaattgaccgtctgagacggatcggccaataatcagcaaaacaagagacgggcgagatgaacaaaattaataaataaattaatgttactggcctatttttctgcattgtatattcaatttttttgatttcctcttcttttgatactttccaaatttaaactatattttttgacattaaattttgttcttgacttttatgccttaaaatcaatttgacttaatttaaaaaattgaaaaattttcatttttatgcccttggcaattgagcgaatttttaaaaattcataacatactttgtggtgtctattttctacaataaagctctaaaaatagagaaaatcgtgagaattttatgtattttatttggtttttctagcctcaaatcgaaaaaagttattcgataaattatgggaaaattcaaattttgataaaaatttcttaactcccttcaggaacggttttttaataaaaagaataagtttataagataataataattagagataaaattaattgttcttttcaagcc

SEQ ID NO: 9337 - DNA, 5796 bp, Heterodera glycines
caaaggatccgtccatgctttctaaagcttcttcaatttcgcgctgggggtctgtctcgtccaaatcctcttactataagacatcatcaaaccataaagggaaagtcgacccttgtccacttaattatttgcataactattttccagtgagcaactcgatttccagtcgcttttgcccaggagatggagaacgtgaaaagttggaacgtgagcggctccgacgtttctcgcgccggcgaggagagcgactgcttttccgcgagcgagaccgggaggaagcgcttgaagcattgcgagaatcattagacatatgtcgcttatcaaatctaaaaactaagagaaagtttgaatcggtgaaatggaaaatcgtcttagaaagagttgggagtcaaattggaagaatatgatatgaactcctttcctggtaaagaatttatagagaggactggagaaaattgaatgtaaattaagagcatccatcaatctagcgccttgctctccttcacagaagatctgtaaatatcggcggactattctgcaattccgttggaaacgtcatctcaaaattttctcaatgcatttttgtagagatataagatgcatctaatcttctttgctttatttggtttattaatctttaatataaaaacatctataaaactaaactagaatttctaaaagctgtttctaaattgtcactccgagtggatgacccttcagtaagggatctgcctcctgttacagatgacacagtgtcggttttaatctagggttgttccccgacccctcggggggcaaaatgtcgggggccggggacctcgggggcgacatgtcgggggtcggggcggggaggagctcaattgtcggggatcggggaccccgatcggggaatggccaaattttttttaacccaaaaaaaccattttttcttttttaactgctcgtaaatcttctttttttcactttaatcatctgatttcgttagcgccagtaagcgtgagtccaagttggcctttaaacctggggtttccatttgttcttatttataagaatattctgattttttgggggggggggtagcgactaaaattattctgattttttaaatatacttataattttgaaattttatggcataatgtcagaatttttcaagaaattttaaggtctgccgcaaaacttttttgatcttttgatcccgaatttactgaaatttataattttgcattttcctcaaaataactgattggaaaaatgttgctaaatgttcatatttttgacactaaaatcttattttggacttggtgtttatattttgaaaaattttcaatggaagccctgttttgaaaatacgtagaaaggagtggggttaaacagaaattttgcgaacccgtctcaacatcgaatttgaccatcattttttgcggcgctctttttcagaaaaacttttgaggaacaaaggggtgatgagggcggtggtgttaggagccgcgaggaaaatttttttttgaaaatttgaaatttgttaacagatttttcctaaaaataccaatttttgcagacattttttgcaaaaaaaaaaaattgaattttggggggccggcggtgccgataggcggcgccgaaaagtttttcggaatttttaataattaatattaagaaaattgttcaaaatttcataaattttcaacctttccccccttcgttgttgaattaattttttgtattttcacaacgcttggagtcctcaattccccgaattagtgtcggggagtcgggggcaaaaagtcaggggccggggacctcggggagcgacatgtcgggggtcggggcggggaataggcccaaaaatgtcggggatcggggtcggggaccggggagctcggggacggggagcaaccatagtttaattcttacttttgcaatctgatttcttcccttatcatattcctccatcagttcaaatccccaaaatcccctcaaagttgcgtttcggtcgtaatccccttccctcccacaacactgcaaaaacccattacggtctcacttaagaataattccgcttccaacagaacaactggacataattctattattatgtgctaaacacgccattttataaaaatgggtttttcttttattcttcgtatgaattgtaaaacaatttatgtccaatttacaagattttcatgcgatatttgatgatagacaaacataaagcaccaagcgaaaatgaaaagcacctgcatctctttcatttaactaatgagcggcaaatggcaaatgggttttccattaacggtagtaaaaattagaaattacctttaaggtgtccattaaaattatggtcaaacgaatcgatgaattctactgtaattacagcagcctattttctgatcagcggtgtgtcgcttattcactttgccacactaacaattttcgtcctttaatctaattgtgttgggctcgatcaaactgcttcatccgaatttgaaatttgttttgatgtgtcaaagtgtggccgtgtttttgttgaattctttcgcataatggagatattcgaaaagtttttgtcaaaggacatttcaatccatgcttcgtgttttttcaggtcaaaaagatttcaaataacttatcaaattgactttgaaatggtctccggccggagattaggaattttttaacactcaaatattattttaatattcaatttgctcaaatttattctatcattttcaatctttccgtgattaatccttcttcaacagaattttttgagagagttatgaagcattgaatttatcatgcatttttaaaattgttttaattaagtactaaagaaaatgttctcaaaatattgttttgtatttgtttattttactttttctcagcctaaagataagccccaacattaaatatcaaacggtaccaaatttttaactttgttaggaaaagcagcccgtgaagacgagttggacccaagccattcgacaatattttctaacaaaaagtcattattaaaaaacaataattcgtagaattttactttttgaaaaagcctgaacctggatctgcatttttggactaaataggaaaatacaggtatttgtgcgtaacattactggacttggattttttggacaaaaatacaagaaaaccaaggtaccgaaaaatggcctgaacctgggcctggattaggaaaaagttaggcatgggtccaggttgctgcagattgaactttattaattcctattcattatcggttcattatgccatttagatgtccctgcttttctttggcatgtttcggatattaacaattcacgttttgtttattgagcggctgatggccatcattttcttggacaaatataaatttacaagaaaattatattcagcatttgctggtttatatttgcggtaataataaaataaaacacatttcacttgacttttattagaccgttttatgcagtttaatgtcatcacaaatggacaatcgtggacatcaacaattttaaatttgatcacattctcttttacattatccctgagtcttgtggaatgtatttattgtacgcaaaattttaataaactatttgtaaatttatttattcaatttaataattagtttatcgcaatcattggcatttattgcagagaaaaataccacagcaaatggataatgtctacagcaattaaacaattttcttggagcaagatatcaggtagtaatattttaaattttgaattagcctattttttactgcatacaaaaaactatgatgtaaattaatattttgtggtatcactcaataaatttaattgttctctatcagaatattattttccaaaaagccaatcacatgtattttagtcgtttaaaaattttaaagccattaaaatgcaactgaaccataatattaatttaaatattaattaggttgattttgagccaatttatgaatttttatgtgttacatatttttgttttcgaacctattggcgtatttaagaaacgcgcaaacccattttgtcggatttaagaaacgcactagcaccaccacgaacctacgaatttttaaacccgacccaaaatttccaaaaatgccatgtatgaaaaaatatgttatcaagtctcagttgaattcactaacttcttccagaaattgtggaattgttaggcctaaaatagttggcgaatgatttataatttgcgaactcaattaaagcaaaaaagttagaaaatttatcattgctaattgcaaaaatattttattttaagaataaaatttaatttcaattaattgcctaattaatatcagatgaccgaaaacataaagaccagcaaacaactgcttcccgtatttttttttgcaattctttaaatacaatattttcgtcggaatgtttcctgcgctaaattttatttgtaaatggacaacggatgcgaaattaataagcatgatcattgcagtagacttggtctttattctgttttaaacgcaatcgctgaagcagtgataatcaagtaaaataattttatttttataaatttgaaattaaaaaaattgtctcttatttttgaattttttcgacggtaatgttaaataataatttttcaaaactcagccatcatcttgcactcaaaaaacgcttcgtctttttgttcgagagatttttccgttgccatggtggccaagtgtcgaatacacagtacaaattttgacatcattcatgattttaattagggtaggccgggtccgggtacccgaccgggtcccagaccccgatacccggttttttcactacgcggacccggtttttggaaaatccaatacccggtaccccacccgatgggtccgggtccaaccgggtattaaaatagactggtaaaaatgggggtcagggtcaaaatgttgacaaaagttcgaggaaattttttcaatttaattaatattactttagaaaggggctaaatttatgctcatatggcttagtggttagtctcttggattttgtgcgttatttctcaggttcaattcttccccatttcactcttttttttattgaaaattgatattttatcattacgtaaatccagatcccatgaaaacattttctcaatattttttgtattgttccatttagtaaattatttttggatttttcccattaaatatcgatccctagttttgcatttggaaatggcttttccttacgaaaaatttatttttcattaacatttatttattcgtttcattgagaaaattttagggaattgtcaaaatattcgttaacaaaatcaattcgttcaaggtgaacacgcacaaattcacttctgcagttgatcatttgagctggaaattgtgtcgagaagtcttaaaacaaaagtcgaattaaaaattcgaaaaaataaaaatgtaaatccatgtgagtacggaccgcttttccagaaaattttcagaattccgcttttggaacccttccatttttgggcattggtgcgcattgctggtgaattaagtgacaaaaatatcagtgttaataataattaaatttaattgttatttcaattttatttgcaaaataataagcataacttagcttaaacttaatcaaatttattcatcttggtattagaatgtagctaaattcaaaaaaatatatatatatatattctctactatttttataatttttaaaaaattagcaaaaatttacaaaagttgtgaccaaaaacttgcaaaaaaaatatagactcaacaattttgaccatactttttgaaattcaat

SEQ ID NO: 9338 - DNA, 6033 bp, Heterodera glycines
  unsure (1)..(6033): unsure at all n locations
aagttttagaaacttttatttcaaaacgaatttttttatactcttaaaaatttcacttttaaacattttttccctcttattatttttaccgtttttttaaatattaaattttgtataagtatttcaagagttttatctcacatttaacgcagtaaactaatttttgagaaatttccggtatttattcgaggcgtgaaatatttgtcttttcacgaggttgtcatcttttcaccggtgtgaaaagttttctacaaaagattatattttttcaaaaaaaattactttgaatcttaatatttttcgcgccctccctagagaaggcgcagttccaaaaatttgtacacagtgatacccaaccctgggccaaaaaaaaagccgaaatgggcatatattactaattaaatcaattttatgattagttacaaatgaggaaaggcagagaaacattcctttacaatctcttttgttttttcttttgtatgtcttcttttccctcatgtgtctcttgtgcttataaatttattcactttctcttttgtctctcctctaattgtaagagagtaaggtgcgagagaagagaatgggtaaagaaatatgcgtaagagaaatagcacagggaaagacaatgaagagggagggaaagagtgtgggggttttccctccccttctttcttctttttcaacccatcataaaaatatcatttcattttcctcttctttcactctttcccctgtttctttagccttgcgctcgggcaatacagcgagcaatgaggcctagccgagctgctgttattgctgattgaaaacttttaccaattacccgccttggcctgcgcaagcggtgacatgtgcaatttttggacgccctccggggcttaaaaaagcgtttctacatatttagattttttggttcagcttttcatacttaacctctgttttgcgctttttttcgaatttattggattttttttaaaactacaaaagtttttaaagaggtactccctaaaaactggtttttcaaaaaaaaagataccaaaaataaattgcatttttgttctattttatgcttctctacgaatttaatgtctagaaatgatagactcactattcaaaaggcaattctgtagagaattttgtcctctttctgataggcctactcaaattttcctaaccccctaggaattttttcgaaaattccccgatttcaagccatttttggcttttcagatcaccatgaaggagtgatctgatcaagttggcgaaaagactcttttgatcagtatcaaaagttagcttacaaattagcaggaattttttcagaattttctgccgaattggaattgaatttttggcgattaactattttgttcatttacttttgcaccgccaaaaattgggtcaatttgttgggcactcgtaaatttttgatggattgactgatcggaatgtcttttgccgttttttacgagtaatattgggggtttgttttggcatagataaagatttccatccaatcacgcatctcatggaaaaccgggtttaaaaaaaattttttttttttttgttcatatacttttgcacctgactgtattttatgcttttctacgaatttaatgtctagaatagcataatataaacttatatttgcatattttgtacctatttgggatattttttatatttcatataaatttgccatttttattcggttttttttcataaaaatttcaaattgaccatttttcatcaaataattacaaattttgctcccttcagttacaacgttttccttatgttctctctgttggacattaaacggcgccgcgatggaaaacagcacaatttcggcgcctccgttcgctattttccctccccccgggggctgtcaaaggatgggcccccaattttggcatttccttatttggttttggtggacgacgacgcaaatgcaaaatatttggaataaacattttctatcgctttcactgatgattaattatatgtattgatttgtcggatttgctttttttggccaattaataatgtaaaaagcctgcagaataatatttgctcttttcttgtatttatttataaattcctgcgatctttaatttgattttatttttgctttatcatgaaaattatatgacacaaattgacatgaaaaccctaattggacggaaaaaactttttttcttttaaacatattttgagatatttgaatttgaaatacattataaaaattcattttttttgaaaatgtccttaaaccggttttttcaaaaagataccaaaaatcaattttatcctaaacctaattaggtaaccttgtttttattcacttgtccaaaaaatatttaaaattttttatttaggtatgtaatacttatattggggttttgagtatttttcttacatatttcatgatttttttttcattcatattttatgtatatattttgtgtattttcttacatataattcccatcaaaaaaatacacgctagaaataatatttttaaaatcataaaataaaatgcattaatacaaatggaatggaatcatttgcggaaaatcacactgaaaagcacagtgtcatcgcgaatcagaaaggcacagaacggacggtcggcgacaaaacggtattctttgctcgaaccacactccacttctacttctgtgactgccgcagcgacagtgccatcctcattcacctaaatttcgttgtttaaattagttttttttttgagnattgagctaaaactggtcaaaaatatataaattttctctggaccggctggtgacttttttttattttgcaattcgatggtggcaaatttgtataaatggaatccacaaaaataagggcactaattgtgggcaatcaccgtacctcaatgaccgccttctgcaccacttcgctgagcagcaacgttttcttgccggaaatgccctcaaaattggcgttgtcggtgaacgcggtgggcatgcccatgttggtcaacggtttgttcaatccgtgcgtggcctccaatttgaacttgggcaacaccacctgggaaaagaaggggctcggctgggatagggaccaacaatttctccctttttcattctcatggaaaggatcacagattagggccgactgctgagagttacagaaaaaatatacaaaaatataatcatggtaaatattcgttgataaattggcagacggtttagaggtgaatcgcaaaaaacaaggaataaatcatttcatttgccacatctaaagaaggctttcttattcataatccttggaaaaaaataaataaagtcgcccagttgacccccactgttttcttccccctcccgccaaatcaacgtccccatatcgtttcacggattaagaaaggtttttttaaattttcgtgggtatacatgcctaacgaacaattgtaacacaatgtcaactttcgccgtttcagggtcaccgaactaagccatggcacattggcactgattggcatttgttcgtttggcatacccacgctaactcttgaattagattaagccatgaataaaattacgtcgacgttctgtcctgctccagggttttttaccttcacggtctctttgtcccgctttttgatcagtttcatcagctttttgccgtccaattgagccaacaattcggtcagtccaaagcgttccttgggcaacagcacgaacatgaactcttctccacctttgtatggcatgccgaggagtttgagctgtacaagcaagcaaaaaattggcaaatcgatcgaaacaaaaattcatgaaaatgtctaaacgacctgagcgttcttgtagtaaatgaaataggcctccaaatgcatcatttccagctaaaaaattggtcgtttacggacaaaatgaaaatgaagctaggattttaaaatgtgtttgtctccgccacctctttgaagtttttcgcgtccacatgaaatttcgcttttttggtgaattttgagtcgaatttgtccgcccatgtgcctttgaagtaaagcgcgttgatcagcaccaaactgcaaaaaaataaataactattttcaaacttttacaatttttttgttgttgctatttccatcaaataacatttaaaaaaaaataaatattcggacttttgaaattgccgcagaaggccgaagacagcctaattcaaaaactttatgatttttttttacgtttttttctttttttttttttgatatttttttgcggaacgatgttttgtccggcgacgttttcgggccaaaagtatgttatccattgaataagattagatttgccacagaattttagaaacaaaatttaaaaacttttaccgagtgttctcgtcaaaattgtcgggcgtgaccaaatcgcggattttcttatgagtcgcttctttcacgaacttgttgattttctgaaggcgaaaaataatgtttcccaacttttaatgaaacaaaaaaattttgcaccaaaaggattcaccactgtccgtatgccttttaagaaatttcaaaaacgggcactttgaagtagcgcagaatttatttcaaaaagaatttaaaaaaaaaccccaaaatttgacttttatgaagagttattattctaacggaatggaatggcttaaaaatgaagcaatttttgacatttttagctgaaattttcctatttttgggactgatttcgcattacgccaataaaacatttcccacctccgccgtccctttgccgtcctcaaattccaccgtctcaaactgtccaccgtaatttccctcaatttgctctttgaacgcgtccttcactttgatgcctttcttcacgtacactttgttggccgtctccaaagtgttgctgctgttcgttccacttgtgatcgatttgagcaaagcgccgaagtatttgtgcacctccgactcgggcgcacctagggggcaattaggaatagggaggggattaaaaacgggggattggtgggggagggtaattaaaaggggaaggggatgattattgtccctcattactttaggtgaggcatttttcaaaggcactgaaaagaagagaaattgttgttttcaaaagtaggaggataatgtttctgggggttttctaagtttttgataacgaatctgccatttattccggccaaattcgaattcaagacccaaatttaaacaaaaaaccgaaattctaaaaatgatttacataattttcagtttatgaaatttcgaaactttccaccatttgccagcagttggcccatttcttcgccggtcttttccttggcgcccgcgtaaaccatggacaaagtgacggcggcagaaaacggcgaaacaatgcacgaacggtcgtccgtggacacttcacgcagcaaattcaacgcaaaatcggcctgtgcctccaaaatgagggggacatttggcgatgggggagaagacattaattaatggcggataatgaggcaatttgaaggaaatcaaagagattgcttaaaacgaaaatgagacaaaagctaaagaataataaaatatgcataacatacatacataaatcatatataatactttacgaaaagttggcatttttatgattttttcatgagttttaggaatttccagtaatttgattaacaaaaaaaatatattaaaaagagaaaaaacggctctattccaatttatttacgcgtctggctcaaaataattggcgtaataaacataatgccaatgtattcaaaaacgttacaaagtatcttaatgtttgatcaagttcctaatcagagttcagtgcttccaattcacttaaaatatgtcaaatcagatgttttttagagataataaaataaaaaattaacttataacatttaagaaagtttcagtgtcttatttttgttgtttagttttgatcacatttgatcagtcataactcgattcattcccccactaaatcgaaataaatttactattattcgaaagatattgaaaagaagaatctttttctaagcgaaggttaagaaatttga

SEQ ID NO: 9339 - DNA, 808 bp, Heterodera glycines
taatttttgcactattttggcgtttcgtcattatttttgccactacactattttggcatttttggaaaacttcccaaaattgcaataaaaacgaaaaatacacccctaagaatcgacctaaaaaattttcaaggaaaaatttcacaaaaattcttccccaaatatttttttcttgttcaatatttgctaagaaaatattttgtaactgcaatcagtgaacaaaattgtttgccttaattttaaattattttcaaattaaaaatagctatttaaaaaattacacccctaaatttggacctttttcgccactatttttgccactattttggcattttttggtcctatttagttaattattttgggattttttatcactaaaaatcccatccctaaacataatcctctttgccattattctggaaacaattaaaagattcatttacaaatatgttgaaaatcggtttttagcttttaaatttacctcatcataaatctttttgccatcagataaattctggaattaaaatgaacattaaattattcatttacaaatattattgaacttcaatcagctccggcgcagcatattgttcagtacaatgcatgaaattttcctttttattttgttggtcccccattctcttccatttgttcatcccttcttgttgttgatcttccaccatctcttcttctcttctcttctcctctctctctctctctctctctctctctctctctctctctctctctctctctctctctctctctctctctctctctctctctctctctctctctctctctctct

SEQ ID NO: 9340 - DNA, 3186 bp, Heterodera glycines
aaaaattaaagatggtgtctacaaaaacctctaatcttcctcaaaaaattagctcgaaatctcaaaatttggacattttttggtgaaaatttgttaaccaatcactccaaaattttcaaaaattttctcgccgcaaaaaagctcattcaatcataaattggatcagatcggttgataatgctttttaactgtttttacaaagtaaaaagtcattttttcaaaaaatcttattttggtttctcaggctgtagtgtcagaagaatattcatactatttttgagagaatgatagagtcggagtaccaacggtcgcgcgaattgtctgcccggcgcatggttgattttgttagttgcctgcaaaactaccacaagcaggtggttgcgctatgaattgcgcgtgattaatgggcttattggccggaagataattatttaaaacgttaggtgtttaaaaaattttaaaattacatttttccaaaattgatatattttcaaatttttgtatggtgaagagcggcattattttcggacgaattaatgatcagtgagaggaaggaaaatttcgaattccactgtggaaaagttgaaattaacaaattttaccgggattaatatcgagaatatcactcatatttccaactactaatatttatgatatcatgaattgctgccatttagctgctccgtgagattgagctgcacgagaagcagttcaacgacgtgcataacctgggcgccgttctgatcaaacagggccacccggcgggcgaagtgatcgaggtgtacctgcgcaccatgcagaaccagtgggattggatactgaacctgaacaagtgcctggagggccacctgcgcgacgcgtgcaatgccaaggcttttgtggaggagtcggagcaggtggagcagcagatgcaaaaacaattggtcagtttggcgtggcgtatgactgcatagggggaggggggtactgtttgtttccggctcaggaattttcgaaattacgaaattatttaaattttttaaatgttaaaaaatgattatttaattttttagaaaataaaaattattattacaagacttcccttctttcaattaaccatctagaatttccaggaaaataaaaatggtttttatttattttttttgaaatatcttttggtgagtttttttattgattgaaaaactaagcccatggaaatctcaacacgcttttggctctattcctgaccgctccaactgttttcaaatcttcattaagctggctatacgagaaaatgccaaaatccaaatcattcgaatgccaaagttgttgttggcatgcatttttttagtatgccaccactaattttggcacacattttttgggacgggggagggggagtggaccattaatgctgcgcttctgaacgttaattaaaggccatgccatatattcaggcttccttcccatcggtggtgttcggcattcctccgcctgacccgcggttggcctcgttcctcagccgactgcacaaccaattcgagaagttgcgcaaattgtgggaccgcacccatcatttggtgggtgttgtacaaatggggaggcaattaagggtcattagcgacggttatcaaactacgtaaatatcaccgaattagcttcgtgaccaccaaatatagtattgtataaatcctcttttgaccgtatacatctcagcacaattattctctgtcagtctcctcatccccgacattacaatcctactgtatcaaatccgctccgattgcttttccaattcttactgtatttgtctgtttacaggtccgttacaacatggtgctgaacacaatgcgcacagtgcgtgcatgggacttggacactttcctgtgtattctatccgatcaacgggacgagatcatcaaaacattgaatgaggacgtgaacaagctgctgtcagagatggaccccaacgatcccttggccaagcggctcaaggacgagctgcggatgaccaacgaacacttctacgatttgttggcacgagctcagaaagagccgggtaattaatgcctgactaattgggaattaattgattcattttttgccattgatttggtcgtttttgtgatgcgttaggaccagttgattgcgaattatttggcacataagtgattcagacaaaattgatttactacgagtaatagaccatttctgattaagcgagtaattaacacagctcaagctaataatcaaattaattaattatcgaacgcacttttttgactagtaaacataaccaaaacctaatgaactgatcagcgatcactttttccattccatttgaacttgccatgatctgtgtattgaatcagatctgatcgtgatcactcccgtccttttctgatcactatcaccctctctcttttcagagcccgactactccaaccagttcgatgcggcatgtgccgagttgttgtgcaagttcaaggagggcgggaagcagctgaaccaccgggtgcagaaacgaatggccaccaatgtgcgacgcttttccttccgtcgatcgtgtgccatccttttgtttctttttctgcttgtgtgcaagtttccgcacacaaacagtagagaaataacaattgaatatggcatgtgttggatcgaacggaatacggagacacgaaccgggatgtgcccttcgacaccaacaccgacgaccagcgacagcacaacaccgacgaccagcgacagcacaaccacaaccaccacaatgaccaccactccgccaacaaccacccaaaaaaaacaacctgacgatggaaaaaagccaaaaaagtcggatttttggaccgtgaacaagatcatttccatcggtgttccgctctgcatcctcgttctgcttgctctttcggcgccttggtggttgccaaaacttaaaaaatgggggtcaaagaggcaaaaaaatgtgaagctgccccgcagccgcgaccccggagaagaggtgcaataattttttgggacaaaaaatttgggcctttgggtcgcactcgtcatattgaagaaatgaaaaaacaaaaaaagttatggtcaaagtgtttaagccgttttgaaccggccaaagctcagtaaatggacaaaattgggcactcctaagccaggataattttaaacgtttgagtattttttatgagttaacaataaatcgaaaaa

SEQ ID NO: 9341 - DNA, 947 bp, Heterodera glycines
  unsure (1)..(947): unsure at all n locations
gagtatttttatgagttacnaataatcgaaaaaaacatttgaaattatagtgcatcatttgtctattttttcggtctgaaccagatcaaaatcggctataaatgatttgccaaaacttttttttgaatttttctattattttaagcgcctaaaaaatcctgcctctgaaattttgtttttttggctatgtgcatttggctatgtgccatatggccaatagtttcaaacaaaataactttttgaaattactctgattatttttttattaatttattttaatacattttttgcatttttcagattttaagtttgtatttttaacgggttttttttgtttgaaattattttagctactttatgcgaatttagttttttgagttttctaatttttaggaaataggtattttccacacaaatattttatgttaattttttttaattaaataggaacgcggaaagccaatcaatgagaaaaatgcttccaaaaaaaagttggtggttcaataagattaaataaatttatgattaaataatattttctaataaaataaatttattccttatcattcatcaattcaccttaccacactcggttaaggcttaaggattttaaaaaatcaatcactgatatgggacagaaaattgaaaaaaagccgctgtccctggacgagaaatcggtgctggacgaacagacgcaacttggcaatttgcgggaagaatttgatcagaaaaggaagaattttgaggagttgaccaaatctttgacgagtcaagacgaaaaggggcgaatcaatgaaatgaataagctctggaaaaatcttaaccagcagatcgttgacaggggcaatttgctgagcagtgtaagtttttaattaagatagaaatattgaattagtattgttcgacagaaattattttttcccaatcaccaatggacatgaaaatag

SEQ ID NO: 9342 - DNA, 2013 bp, Heterodera glycines
  unsure (1)..(2013): unsure at all n locations
tcccntttgtttctagttgtgccacctcttctaatgcgtcttttgctctcccacagatcactttctccaaaatgttctgtccttcctcggccaattccctctccattctcttcttctccgtttcgtccatttccaccacaacattaagccggcttttccacacggagttggcatctgaaggtcattttcactaattaaaaagtgatctccgctaaaaccgttcgattcgaaagatcgccgacccctaaaagggagaagaagctgatcagatcgatggtgatcaacagagggcacttatccccatgcttttcacttgcctgtgggtgccttagcgaggacacattcattaacaaagtgacatccgtgaccacaaatttcgcagtgccctttttgtcggcggcgaaattcgttccattggcggaccgactgatcagcttggccttgcaactgcgtgtgttttgtttgccatttccattaccattcattcagcagaatggctttagcacccatttttttttcttggcttttcccatttgccaatgtttccttcacaattcactcttccactttctgtctcacttttcgccttgtctctcttcccccacccctccattttccatgtttttcttacatttatctgtctttcttgggtttgatttcctattttatctatccctacattctctctctttcactccctctttctcttgcaccctccctctcgctcctccactgtctctctcccccttgcttcactttccctcctctccctcaaattggccgacccacgtaaaggcattgcccggcaattctacgatggcctgccgtggtgcctccgctcgtgcctttaccgttcgtggccttttctgcacgacaatgttaaattcgctgagccgtgcctttccctgcaaatggtcaaaattgttgctcctccttttggtcttatttataagagacaaagcacataattaaactatgaaaatgctaacgcatcgtaaccaataaaaaaagttggcttttggggattctgatcgattactgcctaaccgcggattggagtgatcctttctcccattaagcggttggaatgatcaactgaagttccaatcaatcccaacttgccaaattgcgtgccctcccctgggttcacctgttctacagcttcttccgccgtgttgctagcaaattttgcgccaaatccgagcacatcttcgaccagcaaatccgtgaacagattggcaatgtaagagatccctttctgggacagtcgcgcccttacgccgactttctgaatgccaaatttattcgagactctcgacctttccctcctttttcccccatttcttttcttacattgccaatgccttcgcccgccaattccttcggcacattttgttgagcattgtttagccaaaagcttgcggagaagcagaagaagaagaagtgtaaaaaggacatcatccgaatggggaggaagaagccttgggtcaatggcctaagaaaatgttgaggagaaatgaaagggaaaggggcgaaaagggaggggagagagggggggggggacacggacactgatcagtgcgattggaaatggaatgggcgacgggtggggtgggccggggcaactgatcaaactgatcggacagaaggacggggggtggacgaagtgctggcgatgatgaagtgtgatggtgaaacaaaaagcagaagatgatgatgattggtgatcagagggaggctgggaaaaggtgctaaaatgaagggcggagaggggggggggcgaagggggaaagaggggggagaaacgggtcccacaccgccggggtatggaagaagaaagccttgcttccttttatgctttttgtcattggggcaaaatgagggaaaaacggacggaagaaacaaatatttatgtagaacaaagagaggggacgggggagaaacaacggaagaaagggaagggcccccgggggacgaaggggggggggcgagaatgggcgcgggggggggggg

SEQ ID NO: 9343 - DNA, 3843 bp, Heterodera glycines
aatgggtttgtagaaattatgaaatagaatattgaattcatttccatagtttgtagattcgccgaatatttgctctgccttttctccgtaaagaagaaatttcaaaaatgtggccacatttgccaaaattcagaaatgattttgaaggaattcttagagaagatatggattcttttgtagattatatgaataatcaatggatcaaaaaagttggactaagcggggaggggttccagacggaccgcgcgatgcaatgaaataactaaccgcttacaaatacgattgacaatgacgatgatgatgctgcgggaggaggaaaagccaccccgaggaatggtcgaagaggcaaagtcaaagtttgaggaaaagcatctgcccaagaaaaagcctcccaacggcacccgccttatgaaagtgaggaaaaaccggggaccaaacagtaaatttttaatctatattataaatcacggcaaccgttttttaaatattagcttttctctcggcatgagtccaacgatagctcagttggctttagtgcgttaagccctccctgccccagctcctctgggcatgagtccatttgatcggaatggtggtaggaacggatcggcttcatccggtcatcccccgttgggtggcagttgcgtaacagataatccattcacattctttctgctcccacatgctgtgttgctgctgttacccatcccaaatcgcccaccgttgggttagcttttgtgtgcattccgtccccccccccccctccccccccccgcgtcccccgttcccttttttgtctcctccataactcgtttttgggtgcgtccgtccaccaaatccttccaggcgccgcttcatcttttgctgcttttcctgcctggtacaccaattagcgcattggacctctttgataagcaaaacaacaacaacaaacagacaaaaaacggaggaggaaaagcaaaagcaaaatgaaactcaatttgatcaatttgaacggaatgcgcagaggcggaccaagaaattaatgaggcaataaatgtaaattagccaattaaggggtcaatcgcatcgtcccctttggaatgagcggcgtttagtgccgccgaatcaaatgggcgatttttaatggtgcgcgattggatgatgttcacttttctgcttatactttgctgcttccgctgatcagttcagtgttttataatcactttcacctttctcttttaattataaaaagtgaaacaaattaaaagggaaataaaggcgaaaaacagaaaaatataaaataaaaactaaaataacttaatatgtcaatgattaatcatcaaaacattaacaaaatgaattgcccgctgtaaaattattcttcatttttaaaagcaaaatttgaaaaaaacaaaaacaaaatttggtataattaaaatatatttaattatcaattttgattttgtttcctttttgtgttaaattaattcgtctgtatttcatccgttttcccattggcttcttttcttctttctctcccatcactttttgttctcttcatcatcacccttttacctgctgatcatcacattctgttctcaacaaaagcattgtgggaatgaatggataaatgcgatcagtcgacccaaaagacaaaaagtggcgaaaggtgccacgaggggggggggggaggacggagtgatcagaagcaaaagtcaaagtcgggcggaagaagaagcagcaaacgaattgatcggaatttgctaccggtgaaagaaaatgggggcggatggactattttaagaagcattgggaccacagacagcagaagcaacacagcaaaggccaacacagctgccgacggatggccccgagaaatgggaaatattgggggaggggaaggaatgattcattggcagtgctttctgcgtacacccaatttttgctgactttcactgccgatcgatccatttttgtttttgaggatgaaaatggcacaaatttaggaaatgacacttttggcctaatcccccaaaagtgccaacatttacaaatgcattttcagaccttggcagtgcaacaagttctctttgccctcctccaccaaactgcgttgtactgcttgaacgtgtcctccccacaccgtttcttctcctcgcaccccagcaaaatgtaccgctccccgtcctcctcctcctccctctccttctctgccccaaacccgttcctgtcctctgctgaccagcagctgatcagtgaccgtacctttgacccgacccgcgtctaccgtaacgaaattgctggcggaaaaatgagcgaaacgtacgagtcgctggtgcgaaacattttccggcccgaacaaagtcgccaggagagctccgtctttctgccgccctcatttgcgccgccgagtgcgcatctcagccagcaacagtttggcaagcatcggcaaaacaccgtcaacgggcagcaatcgacgctgggcggagtgccgtcgccatcaacgaacggcagagaacggccgcgcatcagcgcagcggcgatgaagcgcatcgaggatcggttgggcgaggacgtgttggacgattcgcgtaagcggacggagggaacgggcgcggaggggaattcgaaaaacacgcgttttgctggcccttaactttttgaagactgtgaattgaatttcgccgaatcaggcttgggcattggcattttggcccattaattctcgaaagtaaaaatccattggcaaaatcaggcaaaatttagtgccgaaggcaatcacaaatttctgttcttttgggcagatgatgacgagctgtggaagtcgccgttggatgagatttacgccgagttgggcattgactcgtcctccgcctcttctccgttcgcgccggcgcccttccattccgcgctttcctccgcttacacttcgccctcctcctcagacgcgtcgcgacgtcgtcgccccgcgcccggcctcgtgtccgaatattccgtctacgtgcccaagtgttccgcggaatatgcccaattggccaactcgtcgcctccggcacaaccatcgtaccgcagctcaacattgggcgcgtatcgcgtaattactcatgcattttcaccaaatagacctcattaaaagcattgaattgggtgagttctggcgggcaaacgccggtttcagattctgagttttgaaattggtcctttcttatctttttttcgcgctgagactcacaccgagaagtcttccattaattaggctaattgggaatgcacaaatggcctttgttttgccgatgccgagatgctcttgcccttattctttcccgagactctcctcccatcgtccgtttggtctctcatattttctttccattcaaattcgggtacctttctcccccgactctttgatgggtttttcctgttcacagctcggaatgccttcgtcaatgcgttcgtcctcttcggcatttgaccgttccggacgaaaatcggactcacagcggacgctggtggacttcaaggagttctccaggtttgtgctctgattagccagaaaacaaaaggcaaaagtggaccatacgaaagtgattttatctgattaacatttcttttaatcagcaaaacggcgaatcgaaaattagatcaaaagaagtgcaatctgatcagaaaagtagacaatatttagaaggattttaattagctgaacagacttttcaaatttatcacttcgatctgaccaaagcaaatcagcagaagaagaagcaaattgttggttgttttgatcattgatttcccaccattttcagttcatccctttccaagtcaatgtatcgaataaacggacaaaattcttcatatgat

SEQ ID NO: 9344 - DNA, 5049 bp, Heterodera glycines
cgtatcgcttgtgctgctcgtcaaatggcacaggtgtcttacagtcgaacagtatggcaaatgtatgaaatgtggccaaacagtcggcaagtgcaaacgaaaacaggcccatggcttggcaaattccctaaacaaaatcaacaattagcataagccaaaatggaaaaattaaaaaatttaaataattcaaaacaaaacccactccttgtgacagacgatccaacatctcaagcagcaccggtgcttcatcttccacaaactcattgcgctcttgggccagcgggtacggtccatcgagtacaggtggctgcgagttttcgtcacggttttggctcatgatttgtttttgtgtctaaaattttaaaaattaattctttaaatttgaacaaatatttattttgttgaaaaaacacaaaatggtaaaaattgggacaataaaaaaaatttttttttttaacaaaatttggagtgatagatgcaaaataattcgtaataaatggacaaataataaataaattttggcgaaattattatcagactggtgtcaaattacataaatgaatggcacagcggtttggcgcaagacaaattccagacaatctttttaatttttaacgaaaagataaaagaaacggtgtcaaattacacaaatgagcaggtgtgagggaggggcaacgtaaagatgtgaaattaaaaattattggtcaaataaacaaacgcccaacacctgaaagggtgctgtaattatttttgaggagataaaaaattaacagacaaatcaataattaaacttaaatgtatttgttaattcactgaaaatatttatattattttagaagtaataaaaaatttatttggaaaataattaattaattaaccttttaattattttaatttctaaattatattttattatacgggcccccatttctttttgcttttaaaagagaaaattgtgaattcaataattgatttgtttatttgaccccctcccccattctcgccgcctgctcttgccccccttccgccgctggtgacgtcaatttttccctttatgagagcaaattaatgtttatcatcaattgccaatgtggccgagtggttagtgcgtcagtctggccgcccccctggggttcggatccgcttggtgcggggaatttttggacaattttaaatgaatttaaattcaacgtctttgacctttaagacgtttaaaataatttaaaattaaataaatttaattaaaataatttgcataaagtcgcgcagtcaaaaaagtcgcgcaccccccctgcaataggtttgggtttgcaagaaaaagtcgcgcaataggtttgggtttgcaaaaaaaagtcgcgcaataggttttggcttcagtactgaaaagtctggcgctcaaatggcccgcgctcacttggcggcgctcaaatggctggcgctcagttggccatgcacccctcccacacctatggggggctaccgtaatccggtgaaaatggatgcactaactacttataatattattttgttgctaaatttatttaaagaattttaaccttttcttttttatagaagataagattcaaaaaattattaaaataaaatttactcttatttatcatataataaaaccagaaagttcaattaagaatcatcttttaaccatgtccaatacaagataaaataatgcttgaataaaaggtaccaaattaattaaataaattagtgcaaattcttcttataacgaacgattaagtaatctaagaatttcactatcgaaaaaactgaataatttattaacaatccaaacttttagtattaaattattcattggagcatgattttaatattaaatggaaaaatatatataattgtaatacctgtaataagaaacctaaatctgttgtcattgggacagaggaatcactgttaaatatctattttataataggttaaattggttattttttcatattaatataaagtcctaatttgaatttatcataatattttatgctatagaattaaaaaacgaaagacttgatgaactcgagacaattactttaaataaatatggtaagaaaggcctgactatataaaataaggtattaaaaggctaaataattgttacaattatatgttactaaataattactttaatgaaaatatgagttagtaataaaatttaaaaaataatttttaactccatactataatacctgttgtgtcgtttatcaacaacaacaaatataatcaataacaaataataagtcagaggagaagagagagataaaatgtgttgggtcaaatgcaaaagagaaatggtaaatgaatgaagtccgaagcgaggaagcagggaagacagcggtatttatgggcgatgatttggtgacgtgtcaataaacataatgccaagaaaatatgaaatgacaataatacaacaatacctatttattaagaaacattgaaatatgaaaaatttagatattaaataataattcaaaacatataaattacatatttgtaacttaagcaattaaaagatttatttaccaaaaaataaataaagctaattaaatattaatgattatagaaaaaacgtcatcatagcagttggtatttaatatttttaattacaaatgcaaatctaagtatatgagcaataaaataaaccctctataagttcgtttatctgcaatttaaaaaatttaatattgttaccatgagcaataataaagaaattggccatgttttaatcggtgcatgcgctaagtgaatattagttctgttattcaaaactgcaattggggtggaacggtatgacaaaagtgatttttttaaccaatccttatctccattgcatttcttcaattgccttttgaagaaatccacataccgttcagctgctccgtttgattgcgggtggtacggaggtgaaaaaatgtgcttgattgaattcctggaacaaatatttttgaaatttgtgaaaagaattggggcacattgtccgaaacaatcgtgtttggaactaccaaacctatcaaataaccactgaagtgatcaaatgatggcccgtgacgatgtgtgacggagaagaaaaacttttggtcatttcgaaaatgtgtcgatgaccaccaggtaaatgttgccatccctgcatggaccaaccaggtcaatgtgaatgcgttcgaacacggaagtcgttgttggccaaggttggagtggctgtttgggtgattgtttggctgcttgttgacattggctacacccgcgaacaatcgtttcgatgtcggtgtccattgatggccaatagacgaacgatcgtgctaaatttttatgcgaactatgcctgggtgagccaagtgcagcgccttcagtgtgcgacttcgaagtgacggggggatgacagaacgtccgttgaacactagacaacctgtgatcaatgaaaagttgtgcctgcctgaaaaatacagcttcatttcggcattaaccccttgattaggccatttggtctgtgtgaatttgattacttccttaatcaactcatcctcctgttgtgccgctttgatctttttcaatttgcgagtaggcctgttctgtctttgtcaatgtgcgggccgcgtgctgaaaaactttctcctttccatcgggaaaacgatgtgaatgacaacaaaatttgtttagccttttcaaaagcttgtcggtgtttttcggtccaatctcacttaatccctttctttaacaactcgtccaacggtccacggagttggtgaatgtttttgatgtacttcccgtagtagtttattgcgcagagaaatgaacgcaaagtggtgatgtcatgtggtggcggcatttgttgtaaggcaagcgttctgcatggatcgggacgaattccatcagccgagacaatctgacccaaaaatttgatttccttcaccaagaacttgcacttttccatttgaacgtgaaaaccaaactgttgaattctctgaaagaatttgaaaatttgttgaaaatgttcggtgattgttttggacgcaataataaaatcatccatatagcctaaaactcctgaaattcctgccgccaattgatccatgatccactggaaaatgtcaggtgcgcttttgatgccaaatgctaaacttgacattggtacaagcctcggtgcgtgttcacgcccaaaagctgacgtgattgctcatcaacacaaatttgaagataagcatccttaaaatcaatttgtgagaagaatttggcaccactgagtttggcaaaaagttcatcgggacgtggaagtgggtggtggtgcggttccaatgcgttgtttaatccggtgctgaagtcgaagcactgccggactttgccattggcttttctgaccgcgacgattggtgctgcccatttgctatagtcgactttttgcagaaatcccaactcaatcattctgtccaattcggcgtccacttcactttgaacaccaaggggaacaggccgagagccgcaaaagactgggcttgaattttctttagcttaaggtgtgcctcaaatttcgtacacaagcccaaactatcagaaagaacatttggaaactgagcctgtaactctgctttgagttgtgtcggcgtgcactccgtccctttgatctgaacactgtgcgtcggttggtcaaacttcaatgtcgttgccactggtttgctgtatgcttgttcaaaagctcgaatccatgccaatccgagaaggtcgaatgaacctttttcaacaacataaaaatccaataaaattcccttttcgccgtttaaggctgccttgattgtgcatttgcctgtaaatttgaaaatgtccccggtgtatgatcgacctaacaaattagtgttggaaagctttggcatgcccaacttacgccacgtttccattctcaaaattgtcagctttgatcctgtatcggcgacaagcggaattcattttgttccaatttggacatacacaataatgtttggttccttctcaaaacctgccggggtgacgttgagacattcaactatattt

SEQ ID NO: 9345 - DNA, 1344 bp, Heterodera glycines
aggtccaggtcccaatgtgaaaaaaatccaggtccaggtccaggcaaaacaggaaaaaacctggattttcctggacaaaattttagaatttattttttcaagtgaccgatgttttttcaagttttcaaaaacagattaaataaatttaaaaatacattattattattattaattagatatttttaggtgtttctaagcaattaattaattttttcaaacctttttttgatttttaagatgagtttcaaaaaatccaggtccaggcctggatccaggtctcgaagagcctggatttttcctggacctggattttcctggatttttgtccaggaaatccaggtccagacccaacatggaatccaggtccaggtccaggcttttttcaaaataccgatctctaatagactcaaagcctctgcatgataatattatttattgttttaatattgatttattttatttttatgtaatgaatttaaatttaaattttcttaatcgtatttaattttttattgaagaatttcatattttcttatagacatcaaatataattattacagaaaaactttaactaattcacttaaatttagtatcttttagcatctttaatctttgttcacattttgttaataatgaaagtttaggcttggttctcattttgttttactttgagtcccattaaataaactttttattatatcatatttctccagattctttatacagtcatacctataattttttatatatgtattttgttttatatttatttcgaaaacagtttataattcaattaatcaacatagggttttatcaagcaaaccacttttttaaatatgcttttagctattaggatttgcattcttcattcggaaacgcttaaaatataaattttcaaaacaattattttaaatttgatctcatgtatttaaatatttgaacgaatagaacaattatttttatattaattcaattaaaaaaattataatagttttgttttgacgaaaatatctattaattaagttgtgaattcatatgaaaatgataataaatattttatctttaataaattatattgagaactaatcttacataattcatcaataagattttataagaatgggttttggaattttcatatattttaattatttatctcaatattttaaaagtattaaatgatttttaatactcaagtattcgaatgaattatgattgatctttcagaatcagtggtctttattttgccgtaacatttcaatttataaccccagtaatatacatgttttcatctatataaactaaatattatcgaaattttcttaagcatttaaagccttcaat

SEQ ID NO: 9346 - DNA, 1216 bp, Heterodera glycines
cataaatggcatatccatttttccactggcattgttacccatcttggttccaacaaaagattaattcttctccgtgcgcgtacaacaaatgccagacgggattttcagtgctccacacgcgcaaacataaatggcatatccatttatccactggcattgttacccatctttggttccaacaaaagattaatttcaatgttctccgtgcgcgtacaacaaatgccagaacggattttcagtgctccacacgcgcaaacataaatggcatatccatttatccactggcattgttacccatctttggttccaacaaaagattaatttcaatgttctccgtgcgcgtacaacaaatgccagaacggattttcagtgctccacacgcgcaaacataaatggcatatccatttatccactggcattgttacccatctttggttccaacaaaagattaatttcaatgttctccgtgcgcgtacaacaaatgccagaacggattttcagtgctccacacgcgcaaacataaatggcatatccatttatccactggcattgttacccatctttggttccaacaaaagattaatttcaatgttctccgtgcgcgtacaacaaatgccagaacggattttcagtgctccacacgcgcaaacataaatggcatatccatttatccactggcattgttacccatctttggttccaacaaaagattaatttcaatgttctccgtgcgcgtacaacaaatgccagaacggattttcagtgctccacacgcgcaaacataaatggcatatccatttatccactggcattgttacccatctttggttccaacaaaagattaatttcaatgttctccgtgcgcgtacaacaaatgccagaacggattttcagtgctccacacgcgcaaacataaatggcatatccatttatccactggcattgttacccatctttggttccaacaaaagattaatttcaatattctccgtgagcgtacaacaaatgccagaacggattttcagtgctccacacgcgcaaacataaatggcatatccatttatccactggcattgttacccatctttggttccaacaaaagattaatttcaatattctccgtgcgcgtacaacaaatgccagaacggattttcagtgctccacacgcgcaaacataaatggcatatccatttatccactggcattgttacccatc

SEQ ID NO: 9347 - DNA, 1238 bp, Heterodera glycines
aagattaatttcaatgttctccgtgcgcgtacaacaaatgccagaacggattttcagtgctccacacgcgcaaacataaatggcatatccatttatccactggcattgttacccatctgtggttccaaaaaagattaatttcaatgttctccgtgagcgtacaacaaatgccagaacggattttcagtgctccacacgcgcaaacataaatggcatatccatttatccactggcattgttacccatctttggttccaacaaaagattaatttcaatattctccgtgcgcgtacaacaaatgccagaacggattttcagtgctccacacgcgcaaacataaatggcatatccatttatccactggcattgttacccatctttggttccaacaaaagattaatttcaatattctccgtgagcgtacaacaaatgccagaacggattttcagtgctccacacgcgcaaacataaatggcatatccatttatccactggcattgttacccatctttggttccaacaaaagattaatttcaatattctccgtgcgcgtacaacaaatgccagaacggattttcagtgctccacacgcgcaaacataaatggcatatccatttatccactggcattgttacccatctttggttccaacaaaagattaatttcaatgttctccgtgcgcgtacaacaaatgccagaacggattttcagtgctccacacgcgcaaacataaatggcatatccatttatccactggcattgttacccatctttggttccaacaaaagattaatttcaatattctccgtgcgcgtacaacaaatgccagaacggattttcagtgctccacacgcgcaaacataaatggcatatccatttatccactggcattgttacccatctttggttccaacaaaagattaatttcaatattctccgtgagcgtacaacaaatgccagaacggattttcagtgctccacacgcgcaaacataaatggcatatccatttatccactggcattgttacccatctttggttccaacaaaagattaatttcaatgttctccgtgcgcgtacaacaaatgccagaacggattttcagtgctccacacgcgcaaacataaatggcatatccatttatccactggcattgttacccatctttggttccaacaaaagattaatttcaatgttctccgtgcgcgtaccacaaatgccagaacggattttcagtgc

SEQ ID NO: 9348 - DNA, 3237 bp, Heterodera glycines
  unsure (1)..(3237): unsure at all n locations
atttggcagaaggaaaggatttgcccccgggggagcgaaagagaaatgttgaccataattaaggaagagataagggcaacaaattggaaagaacattttaggagaatggcaaagtgaaagaaaattaaatgagtggcaacaaatgaaaaggaaaagtcagtgaatgacggcggaccattcattgtcaatccaataaacaaatgcttttggttgttcgtgttttatcgtcaaaaaagtgccaaactgtccatttcaattggcacttccgctggcacctctcttccttcggcctcagactcgctcagttcggcagcttctcccgctgaatttgtgccatcgtcgccaattgcgagtccatcccccgctgactgttgccaggtctgtaccaatggcaccacttctttctgctgaattggcttatctgtccggcatttcgctgctgtttgggcccacttcgtctcttaggcccgcttcgcagtccaaacattcttccacgcacaattcgttgatcgaagtgatcaaaaaagcataacgcaatcaatgggtcaacccagagaaaacccttggactatctcttcgtttctcatttctttcgaaccctctcatttttgtgtactattttcatttctaattttatttaattttggttcttttgaattggcgcttttcttttgcgcttctcaccttancaacgttgcaaaaggccaatcgaatggtggcgcattgccttttcagctcaactngaagaaaaatttgaatttgaaaatgggacaanaaagaaagaaatgacttcaattttctgcggcatttccgaagaattttggcgtttcgtttgagcgaaaagttgagcaaaagttgcattcgattggacaaatttgctcaacacttttgtggtcacaatgggaacagaaagcgccttttaagtcggggcaaaggcgttggaggtcctcttcagaaaaagcaacaattaaaatggttggaggggggggggggggggaaatgccaatcgactcacccaattcggcactttgatggagagaaaaacgaaccaaaactaacagaagataaattgagtagcggaactgcctagcgattgccatggcaagaacaaatgaaacaattggcaaagattggcgcgaactcacaccgaatgaatcattaagcgctaattataccggagatgcaatggccaaaccccaacaaatggcaaaattttaaaactcagtatttaagccaattcgtggaaaatgtaaaaatcacaagggttgcttataagcactgataattaaatttagaagaaagggtccggagcgacaggacgccgccgggaaaaattttggccctattttaaatctgattacaccaaaaaatatgttttgattaaatttaaataaattgaatggaaatattcatacggaaatggataatctgtcacaaaccccatggatttgcttattctttcttctgtttgtccccctttttatgcctttttcattgtccctttgtctgttttttctcttttgtgtgctcaaatgctttttaattaatcgaaaacaaatcaaaatcatttaaaaaacgaataaagaatggtaattgttttttacttttaaaaatgccaacataaaaacagagaataaataaataataaccttggaattgcaataaataaaaatcaaaaacaaataaataaaaatgatcaaaaacgggctaaaaaatttatggtccgtttcttagttccaatttctgcaaaatcctttaggattcttataattgtcttaatcaaataatagtattgtttgattttgactcttaaaaagaaccatttttacaaaaacagctgataaaatgataaccgaatcaccaaaccctttcagtaataccctaataataaataatatgccaaaagagaaatggtccattagtgtcatcaaaggatgtgccgaattgtggcccctttgtcccgtcgcccttttgtcttccccttttctacagttcgtccctattttcttgcttcttgaaactcgccaccgcatgcttcttcacgaacttggccagatcctccaagtctctgtttccgccgtactttatcggcttgtcctttttcccggaaggcacaaaataaatcgttggaaatccttcgacggcatatccctcgggcacgtcattttcgctcgcatcgaatttggccacgattaaattcggctcctctttggagtgtttggtcgcgaattgtttgtactttggctcaaatgctttgcagtgaccgcaccttttaaagttttttgcctatttaaaatgtttttcgattgctgaaccgaccacggggcgtaaaattcgaccagcgcatcgttggcctcgtcgttcacaatttttgcgaaattttccgccaccaaaattcgcaccggcgccccctttttgtcgccttttggcacgggctgcgacttgacaaatggcttcaccttgcctaaacggacgcagtgcttttcgcttgttcatctgctgttcacctttgccaatgtcctctaggaaattggccaaattctcctccaaattctcgtcgtatttttccgggtccatcggatactttttgccgtccaccccaaaaacaatgacattttgttcaagtccactggtgccgaggccaaccgcatttaattcagttgaaaactcctcctcatcggccaccgcaaaatgataattttgtttgctgtactgaaattcgtcggtgagtatttgtttggccacaaatggcatttggcggtcacctttttggcaatggccaacactttcttctgccaaaattgcgtcccatctctgtaggccaaggagaagtcgacgttgtaataaacggccacctgcgaatgtccaattgggacagcaaatgattttttggtgcttttaccaatgggcggcggtggtaccgcgtggccgaattggcacgggtcatttggccaaccaacggaatggcattgtcgcgccagaaggaaaccaactcttcgcttgtggccgtctctcgtgggaaaatcttccgtttgggctcgtactccgaatggaatatctgcgaatgctttcgcgttgcttgagatttcttttggctaatggcccatttatcatctcacctctggccagaagagtactacttcgccaaattttgcgccaaaaaggtgcgcaatggaaccgtccaaggcgacccaacggcaaaatcaccgcgcgtcctttcccgccgcgcagcaaaag

SEQ ID NO: 9349 - DNA, 2647 bp, Heterodera glycines
tggaaatgaatgagttggtcggcccatcattagccaactttggaattaaactgaccgtcggcttctctcggcccattataatcgaaccttcggccatttcggagtattttgagagttggaaatcctttcacagcgtattcatctgacagcttcttttcaacggtcgaatcgacttttgtcaaaggaatgccatgtttcttaaacaaagcatttgctaattgtcttttgagtgataagcggaaggaccgatcggtcattagccaaaattatttcaaggccaatgatcaatcggagagacttcgaccagtgaccgaaatcagtcgaattccatcgaaacacttttgatcatcaccgatcataactgaaattggttggttctaaccttcaaacgttttgctgcttcttcgtattcgggtgccaattgcttgcaatggccgcacctttaagcaattattaattttgggaacttggattttgtgccaccatggggcgtaaaactcgacgagaacgagcggtttgtcgccgacaaattcatcgaatgtttcgcgagtgagtgcgaccacttcttccggcggtggtttgtaattggggtcagtcttcagctttatccatcgcacaattcctgcaaattattcagctaatccagtcagccattttccttattcaatatttctttgtcatttggccaattcctcccccccccccccctcttacaccttcggcgtctctctccccgtcaaagtccgtcggttccgtctgtccatccttccacagtttaatcgtcggatagccttggattttaaaacgctcagcaagctaaaattaatttgggcacttaatatgcaggggttttcctgctgtggcccacttttgtctccacggtcgcgtccactttggcaaatggcactgaatcggccaattgggcggctgcctttgcatattcgggggtcaattgtttgcagtggccacaccttcaattagcaagtgaccctttgccaaatgatcatttaagacagctgctgaccatggcgcgtaaaactcgaccagcaccgttgggttttgggaaagaaaagaatcgaaagtgccgtctctgagcataaaaatgccgtcctcctgtgggaattgcccactctctctttgcccattcgcttcactttccgtcgcttcatttccaaagtccccccgggcgctgtttaacctcaccaaaaggaaaagagcggagaaagtgacggcaattaaaggggagcaaaaggagggggaggaaacatttgggacgacagaccgtcgccgaatcattgcctttggaaagaaacggggtttaatgatcaatcaattataaattaattaataattaggcaattaattaattacactaaatataaaaaatattattaatgcgttatataaacgagcattattatttttattctttctcatttgtcagcacagtcactgctgacgtgcccattcgatcgattcgttgggatggaattgtaagggaaagaaagaaaaattggaatgggcgatggattattggcgaggggactaaaggaattttaaatttaacaaaatttaattcatgttaaatgaaaatgatatgccagtggtaataaaatgaaagatgagaaggaaagggggacaaatgccaaaacaaaaagtattttctttgacaattcgcactaaacaactcttaagaacaatttggatggaaaagcctaaaaaatccaaataattcggcaaaaaaataattgaatttccaattcatcacgacccgacggagatgagcaattagaacgattgatgagaccagtgatcacagctttggtttcctttgctttgtctgatcagagaaacgcgtcgcattggctgttggtcagtgtcgaagagactgaacttcgtttggccatctccgactgtttgcgactgcaattgccctccgtcccctcaatttggcccacatttatggcattggtccatgcccttttatccgccgcttttattggcgccattgggcaaatgccgacgggagagaagggaattgagtcttgtgaagtgacagtttccgtcatattctctccttcaaagtgatgcttctatggttcaaaaataatcttgagaaagtgtcgttaccttcacaagacttttcgactggagaagttttgctttctccgtccgccaatttttgttgcaggaaacgtttggccaacgaaaaattggcaaattttgaaaatgtcgccgtgtcgcccgtcggctgctgctgctgcaaattggaatgtgtgctgctcttcttcgacgaatgacctttggatttccatttggcattatcagtctgtgccatccatcactcacccgactgtgccatttgttgctccgtttgttcctttggttgcggttgctcctttgccgctgccgtggttggcattgccgttgtgtttgtcagcaccgtcgccactcctccgccgttggcattgcctccgttcgcgtcgcccgtcgtttggaccaccaaaatgcgtttgttgtcgcatttcgtgccgttcacattcgtctgctgttggcacccgtggcattggctgccatttcgtggcgagttgttcttgctggtcatcgtgaccatttgggagtgcgttacgcttgagttgggcattgg

SEQ ID NO: 9350 - DNA, 1915 bp, Heterodera glycines
aaaaacaaattcccggaagaagtcgtgaaccaaatactgcagttgccttctcatttgccgcccgagtcattctcagcatagtgtaaaacattgaaaaaccttgaattaatttaaattcattcgtttgccaagggcttctttctatggcataataacgcacgtgcacacaatgccaaacaatgactgatggacggcattaatatgggccatggcacaagcagaagccatcattctaaaaaattatttgcataaagccaaatacatttcttaagcaattcttaaaatgtatgtagcatagaacctattcaaaatcaagctaataacttagaaattttttaagaggtgcagctaaaagtttcaaatgtaatcaggagaagtctttaaaggttttaaatttttttgcagataattttcaagcaaaaacaatttttttgatgtttttgaagatttttagcgcatatttttagggttttggctatattttgtgtaaaatttttttctttttttgtttagtgcttaatttagaatttttgatatagataattaagtgcttaattcacctttttggtgcttaaaaatcctgtcccaacatatgtagattattaataaaagaatttagaaaaaaacgcaagcaaaatatcattttttaattagaatttagaaaaatgcaaccaaatttccattttctaattgttctgattttattcggtgtttccatttgtacggcttcatcttacacttggaaatcagagcctaatttggccaacaatgtacaaacgtttgccaaatttatggatgatctttatgtggaatacaagaagactgtaaaaatgggtcagttcaatgcaaaatgtaaaataaaaaatatattttagtgaaatttaccagcaaaaaattattatttttttggatttggtttttttagatgtaaatacactttcagacacaattctaagaaatccgtcaacgatattattgactaattactcagacaagcagaaaaggacagtgttcaatttgacatttgtaaaatgtgtggcggaaattgcctatttccgagtgattaacaaaaatgcaaattcgaatttttcatatcaaaaatttaaaatagtgcctggattagatgctaaagatgaatttgttggttttttgcattttgaccaaacacttggccaacaaattgctgaaaaattcaaagacgaaattttttctgagaaaaaacaaattcccgaagaagttgtgaaccaaattctgcagttggccttctcatttgccgcccgagtcattctcagcatagtgtaaaacattgaaaaaccttgaattaatttaaattatctaaataataaaaaatttttttttttttggattttgaattctttatttatattctatataaaaaatgtttttgttggggtaatgacattttttggtgaagtgtggcataacggaaaagtgctaaattattattttttcattttagaaataaaaaattatatttactttttaataaaaaataaaatttagtaatgacgaatactttcaaatgtttcgtgacatcggcggatggcagctaaaaacccttttgagtgcctttaaaaaattgtcagaaaatagaggcaacagtagcgaaaatgggtagaaaatcgggttgttattaaccaggggtggagcgtgcacagaaaaaaaaccgcagtcgcgcattcaaattgccgcggccgcgaccgcggatcgcacaaaaaaagaaaccgcggtcgcgcattcgaattgccgcggccgcgaccgcggatcgcacaaaaaaagaaaccgcggtcgcgcattcgaattgccgcggccgcgaccgcggatcgcacaaaaaaagaaaccgcggtcgcgcattcgaattgccgcggccgcgaccgcggatcgcacaaaaaaa

SEQ ID NO: 9351 - DNA, 4066 bp, Heterodera glycines
  unsure (1)..(4066): unsure at all n locations
aattgatcataaagcactcttgattttccacgtaacaaagctgttgccaatggaacacaatgcgtttgtgcaataaatccaaatactcggtaaatctggatgagcatattgaattaatcaaatatattcacattaaacttgataaatgcctcgcggtgccattttgaaagtgccatcacaaacaatcgtttccgttcgtttaaaaagcgccaactgacggggcgaagaaaagagtgccatcacgtccgtacactctagcaaaaaaagttcttggaagtgatcgctttcctcgtgtgcaattcttccacgataagtcagccatagaggcttgcttatttcttgctgaagttcctgtaatgtccggattttcatcgtcctctttgattgggcatagtacaacgcctattgagatttaaacgagcatattattaaaaattaaatggacttaaaatgagttcctaccttctttgttgccactgcattaccacaagcgctgtccctgatttccgctttttcctgagtaggtaaaagtttgtaattttcttccactatgcattcaatgcgcactttcgccgatgcaatgttttctctggacccaagtgccagttctgcttgcactttccgtcgttcctaaaattcaagtcaaatcattctctacatattatttacacctcaactccaagaacttctgtttttcgaatcggttcgcaaaagtgagggtactttgcaccatcgctggcccatgatccattttcaagcacttttctggttggtaattttctgtcgcttggaacatctttccggtccttgattttccggcaaccagcacatacaaagcgttgaccgtcatcttttttgactcctgcagatgtccatttgtagcaataattcggattttcggagcaatcagttgtcataactgttttagaaccaatacgcttgctatataatttcattatggcactaaatataattgtttacgttttttataatcaagaaattatgaattagaaaattgcaggcaaaaaacgaatcgggataataaaaactagggctaggatttttatgtgctaaaaatcctgaaatatgtaataaaatatgtgctaaaaaatgctgaaatatgtgctaaaaacccccaaaaatgccaaaatatgtgctaaaatatgtgttaaaaattgaaaaaataagtgtgtttttgcataaaaattcccaaaaatctcattctttatcatttttagcccatacaacgcaaatcaaatacatttcgaagtgtttggggtaaaattgtctttttttgataaatcatttctataaattgaaagttccagcagagaacttcgaaatccaatgacgaattaatgaattcgagatttcattagtttctacaatcgaagaaaaaattttttaatttgaaaattatgttaataattaggaaaaaagtcgatttttagggggtgtatttttcaattttcttgtatttttattgcaatttttctcaaaaatgccaaaatatgtgcaaaatatgtgccaaaccccaaaatatgtgctaacatattttatgtgccaaaacgccaaaatatgtgtttttatgtgtttataagtcgctctaaatcaaaaattgttcggagataatgctatttttgggcttctctcgccataactaagccgcaaaaaaagtatgttaaaacataaaaatcctagccctaataatcatgcataccaattgtcattcatttttaaatagaattttcccatttcgaattattgatgcaaaaacatatttttggactcagaagttcttaagtggaggagaaaattcaaggaacaaccaaactatagaggtaaataattttaaataagttttctaataaataaaattgagaaaaattttatatttattttttcattcaaataatttttttgtttatttaaaagtttaatttttcttctttaatattaatgttatggccaaaaaatattataaaaaaatgatttaccttttttaaaacgctacaaaatattctttatttctaaaaataaacggaaagaaaaaatatataaattaaaatacaaaaaataaaacaacaatattgttgttgtttttttttaattttatttttttggttgttctcctaatagcctatttaattaaatctattattaaacaatgcttatgctttataaaacttcaaatttattctccgtttgtctaattacacattgacacaatacgaaatttcgaatttcttgagggtaattatgaacacaaaatcccaagagaaaccacctgctgaaatctacacatttctccatgatcattttgtctcattggcatcaaaacaacaatcatcatcaacatggatatggaggtattatggcgttactcaaaaacaatcaaaatgggttactcaaaaacccattcaaaataaaaatatttatattaactgatcggaagcaatcaaagttttaatatttgatttcattcgatagtgctaaattttctctattagcctttaaaatttaaaaaaattttgttgactttcaaaaaagttgtggtcagaaggacgcaaaaaacaatgtttttcaaacacattggtcaaaaaatttttttaaacttaacaaaaattttttgaaattatttaggctaacagaaaaaattaaggcaatcggaaaataaaaatcaaaaatttggttgtttcttaacaaaattatagtcaactatttttatttggatggtttttgagtaacgcccaatttggaggtttatgagaatgacctattaaatacagacacggacacggtggatatgaattgtcggaacaataaaagccacggcttctctaggccaaaattctcataaattttcttaattattttacagtgaaaaaaaagcgcgaaataaactgtgcatttgtcaattttggacgagtgttggcaaaacgtttgaaatttgttcatgaaaagtttaacacatttgctgatggtaaagaaaaagaatgtggtggcagagaccctcacacaacaaattattatgattataagcatcatcatgctttcatcagtgataacaatacaccggcggaagggtaattaatagggacgcgacttttagtgacgaaaaagtgccaaaatagttgactaaaatagttacgaaaaagtgccaaaatagttgactaaaatagttacgaaaaagtgccaaaaaagtgacaaaatagtgaaaaaagtccgcaatagtgacataatttttagccaaaaattgagcaaaaaataatttttattcactgattgcagttgcaagtgagctacatttcctttataaaattctcttagcaaatattcacattttttaaattaaaaattttgtcaagaaaaaaaaatttggtggaagaatttttgaaaaaattttccaattcttagtggtgtatttttaaaaaattgttttgtcgattcttaggggtgtatttttttgaaatttttttagatcgattcttaggggtatattttttgattttattgcatttttgttaacaaattttccaaaaaatgtagaaatagtgaaaaatagtgacaaaacgccaaaaaagtgaattttcatttaagtgacgaaacgccaaaatagtgatttctctagtgacgaaaaatgacgtccaaattaaaaaattttaatgcataaatgcgttttttgagcacctttcttcaaatcaatcgagcaaaaaaaagtttttccactagaaatcgcgtccctagtaattaaattgataattaattaatttgcagacaaggattagggttcatatcttttggcccggaccaggccgttttcgcgtgggcccagtttttgaactgtaatttttttattgtcaactaaacccacgaacttgatacattcgaaagccctaagtgccctctattagccatcatttcaaaaaatttcgtttggttttaaaaaagttaggcaaaaaatggtcgaacaaccagttttttgaagggccatgacttttttgaactttaacaaaatttagaacagatttcagactagaatgagggtnnattttttctttttagt

SEQ ID NO: 9352 - DNA, 1424 bp, Heterodera glycines
  unsure (1)..(1424): unsure at all n locations
ccttgcaaaatatggtgcgaatctgatcagtttaattaaaaatagttaagcgtaaattgtatggcatgtttaaaaagaatcaggttcgaggaagtattggtaagccaaaaaacatttcaaacatttcaaaatctataaacaatttaaaaatgagaattcatgtgagattttctggaaataagcttaatagggcctagttaagctgtaaaaaaaatgtggggcgatttgaaagagaatagaaagaacccggttcgatgaagtgctggtatagccaaaacacatgcaaacatctaaaaatgtattataaatttaaaaatgagaattcacgcgagattttcaagaaataagctcaataggtcctagttaagctgtaaaaataattcgcaacgcattgaaagagaatagaaagacactggttagaacaagtttcagcaagacaaaaaaaatccacccatttacacatatattcagaaaataaaacactaaacttttaacaactaataacaatttttaaacaaacagccccccccccctgccncacgcccttgcccagcaggtgtctgtgggatttccgaataaaatttggttgatggaaaagtgtttatttcccgagtgccaagttatgacgtgccaaagtttttagttaccattgcttattttcccctgttcccggtttccacacattctttttatcagaaaatcaaaaattctttccagtactcttcaaagtaaacagatagtgttcaggattagtttaaaacccgatctatttaagaagcaatcagattgagatgctaatgtttgaagagccgttgtggaactatggccaagtaattggaattgatgccaacgaagcacagggtaaagaattgaacataattaaaactttaattaataaaattcattaattaattccagatgttgtgaaattctgtgaagaccttcagcagaatgttgtcagtgcagcactgaattcacccatacgaaaagctatgacagttatgaaacttacagaattggaggaatttcaatatttgaactccattatcaatagcttaagagatgaggaaaatatggatgaattgaacatttttgctgaaaattatgacaaaaaattaatgattgacaagcaacaatcattaaaggaactgttggcaattttaatgaaaatctacgcggactatagcaatgccagcaaaagagaaataagcaaaaatgccattcggttgacacattctggaaacgaaattttacgatttggacaaattttatatgaaacgttagagaatttggaaaatttgccggaagaccgcgtgaaatatgatgaaaatgaacaattgctaaccattccattattatttgtcaatcatttgcttgagcgactcaatgaattcattgaaaggtttgtaaattagcctatggcg

SEQ ID NO: 9353 - DNA, 1663 bp, Heterodera glycines
tgtgactgatcagggaagacagttcaattctggaatttttaatgatttggcaaaaatatacggttttgagcatgtcactacaacaccatatcatcagcagtctaatggaatggctgaaggggctatgcgaatcatggcaaatattatttctcaaatggtaaatgaaaaagggaataattgggatgaaattctgccgcacgctattttttcatacaatatttcaatacattcagctaccaaattttcgccattttttatcattaatttacgacagccaaaattgccaactgatcggttacttaaactcccatcccccgatgagcttgtgtccgatatttcggtctatacaagaattcagactgaaaaagcagctaaagcgtgggaaattgtgcgaaatgaaattctaaaagcgcaggaaaggaacaaagaagagaatgatcaaataaggaaagcacatgaaagagaatttgaaatcggtgatttagtgttggttaaaaaagaagttttgggccataaatttgatcaacgttggttgggaccaatgcgttgtgtgggagttgaaaaggagaaaaaaaatgttgttttacagtcaattgatggaagcgctaaattaagaaaagtacatcaagaaaaagtgaaacattttaatggaccagcaattcttcctctaaggcagtcagacgaaccattaaattgggaaaagtacgtagatgatccgaatttagaacaggaagaaatcgaaggtgaaagttgcgaaagtgactgtgaggaaacgcaagaaaatgaaaatgcgcagtcaaaaaacaaaatgggattaaaagtttaaaaatatggctttgagagttctgacgatgagaatgattggagtattgttgcgtttgtaagagaaaaccaaaattctgaggatgatgaaggcccggaagttataatggacagaaacccccgaaatcgaaataatgccaattttcacaatactcgaagtccttattgagggttcatttactgaagtatacaccggatggagagaccccgtaacaatctcattaatctcaagcatatctgaaaacctagtaagggaaaattgggaaatttatgttaatggaaatggctcaagatttgttatggcatggatttttggcgaaagtttcgaaattttcattgtcaacgaatttgatcaaataatgttgggaattgatgcgcaaatgttgttgggtgaaagatggcgaataaaaactgaaaatgaaattgagacatattgggaaatctacttcgatgaaaatgggcacgaatttgaaattcccagaattcctgaaatccttttttcagaaaaggaaaatttggaaattgggtatgggccaaactttgtaactctccgagattcagaaggaatgataagtgatcaggatgatttagaggaagtaaatgatttttcaagaacagacattaatgtgataaattatgtaaaaccgtttaaaagtttattggatttttcaaacgaaattgatgaagatgaaggaaatgaagaattagtggaaaatgccggagaaagggagagaaatatgaataattctctagaaattttagggagaatggaaaacgaacagttgaatgaaaaagggcggctaaataaatcggataaaaatcaaaataaaaaatatgcgag

SEQ ID NO: 9354 - DNA, 3845 bp, Heterodera glycines
ttttcattgtcaacgaatttgatcaaattatgttgggaattgatgcgcaaatgttgttgggtgaaagatggcgaataaaaactgaaaatgaaattgagacatattgggaaatttacttcgatgaaaatgggcacgaatttgaaattcccagaattcctgaaatccttttttcagaaaaggaaaacttggaattgggtatgggtcaaactttacaactctccgaaattcagaaggaatgataagtgatcaggatgatttagaggaaggaaatgatttttcaacaacagacattaatgtgataaattatgtaaaaccgtttaaaagtttattggatttttcaaaccaagttgatgaagatgaaggaaatgaagaattagtggaaaataccggagaaagagagagaaatataaataattctctagaaattttagggagaatggaaaacgaacagttgaatgaaaaagggcggctgaataaattggataaaaaacaaaataaaaggtatgagagccattcgtttttcaaggaattggaccgaatgacatcaccggctccattacatttcgagtctttgactgaggacgaagaagaatcgctgagacgtttggaaagacgtctgcaggaacagctgaacaaagtgaggcaaacattggcccaagaacaactagaggagagccacgtgaaggcaagggaagaaaaatgccttgagcaactgaagcaacaaacggttggagtacggtaaaccaaaaaggaacggcggaaaaggaagaaaaaagtggagaattatgtaaaaaaagagaaagtgagaccaaaaaagccgaaccggaagcaaaagaccgaaaaacggatgaggaaggacttgtacaagcaaaaatggagaaagagaaaagtacggtggaggatgtgttgtctttaggagatgaagaagaagactctccttatgaagcagcgaaggtattcgagatggggacgtccttttttgagagcgcgggggtgcgagtgaattcacgtcgggaacttgaggaattgacaaaatcccgaaatgaagcaaaaataaaagccaaaaatgagttagagccgccggcgctgttagacatgccaaaagaaggacaaagtgcccgaaaacgattgcgagagggatcgccaaacaaaggcgaattgtttacgaacaatcgttgggatgagaagatgcgcgagatcgaagaagtgaacaaaaactcaaaagaagtgcgtaatgccttgaatagacttttgacgatgcgtcaaaaaatctttgaaatacaggacgaagcccaagtggcgacgaaggaattgcaaaaagtgttaagaaaaatggagggaaaggaaaaaagtggaaatgaactggaggatgaagttgggttgccgggaaatttgcgtgaagctcggtgctttaaatgcggacgttctggacattttgctcgtgaatgccgtgatggtggagacgggaaccgtggaagcagagtttggcgcaattggggcgacgctcgaggtcgaacgggacgtggaacgtggcgaaatagcgaccagaaccaagccgatgagggcccatccacttcgacgtcatcagctcacttgacggacttcggcacgttcttcaattacatcggaggaaaccaataaacgcaaagtgattggacattttcatttgatcggacattttcattaattaatgctaaattatattactctttaactttcattacttctctatttttgaattgtatcagtcaggaccgatgacggtctattcggagggggccgatgatatacttaatttcttatttctctttttctctctcttatcctctgatcattgttcgcccatcaatgtcatcccgggggcggaccttcttttcactaatcgagaccctttataagtgttcatccgcctcttctctctctcagtcttgcccggggctcccgcccatcagtctctgtccccgagaccgaatcgggttgggggttgcccattgtatcctgaacattggacaccagaataaaggctgtgctgttggtcatggaagagtaagacattggcacttagacctttcgggcacccccttgtccccatctacattcaatcacgagggttggtaaattatatgaatcctaattttttccggagctttggaagggctcctgaaaagcacgaaaaaccccttgtacgagaagttacatatgcatattttgcatatttgtgtttatatttcgcaatttatatgcatatttgggtatttttttcaaaaaatcctctattaaaacgacccatctattaaagcggcaattttgattccaaagaacccaaaaaaattttttcaaaaacccaattttaataaataaaaaactaattttcaaaaattttgaaaatttatctcaaaataagccaaaaatgagaaatttcaattttactttttactttcaacaaactgtgagagccatccggaattttctgccatgtcgagacacaattcatttttggggggggggggggcggggtggagacgacgctgacaaaatgcgattttcgggaaatttaaaatttaaatgcgatttacgggaaattttaaaaatttaaatgcgatttacgggaaattttaaaaatttaaatgcgattttcgggaaatttttaaaatttaaatgcgatttacgggaaatttttaaaatttaaatgcgatttacgggaaatttttaaaatttaaatgcgatttacgggaaatttttaaaattccccacccccctggtaaagctggtccgatcgagcctccagtggaagagacgacaaccagcaccgaagaacccaccaccacatttgaagcgcctgaaatttttgtcgaatttaatgtgagcgtgagcgaaaacggtaccgtaatcaccgcatcaatctccgtcatcattacggtggctgtgctgatcatcggaggtagtgacaaaaaaaaagatttaaatttaaaaaataataataattaatattaatttaattgcccattgagaaaattcaaccaagagttttctttaatatattatgttaaataatgagtttttgagaaaaggattttcggcacaaattttacattggaatctttttgtctttttaattcaaatttttttataaattaattaattttatatttttttgtttagccacgattgtccgttcgatggcattagcataaaaacggaagaaaaactgtgtgatgaaaaatgagaaagtaccaagttaacctaatcacatgtgtctaatttcaaaacatgatcaaatacaatcattaatccacacatttaatatcaaattcatttaaataaatgcaaaattacaatttccaaaaaataataattaaatgtgttaatttgggctgtaaaaaacacctacatataataaaatcaaatttttacaaacaaaaatatgattgactcttgaactcgatcaaacccctttaaataattttttattataatttacaaaattagactttcataaattacaaaaattttttaaataaatgtctcgctggagctgtcgaaggagagaattttttaaatttaatttgagtggaatttcttaatggattttagtcaaaattattcatcaggatcgatttgaaatagtctccagattttttgatcatttaccactttattttgttaaaacaatgactaaatttgtttttctttgggcactcttccattttccggattttgtcaaaaaaaaataataatttttttttacagatgcaatgttttgtttattccacaaaatcattaggcattagtgctacattttattgtatgaattttatttctttgattttcttctttgcttgtct

SEQ ID NO: 9355 - DNA, 1209 bp, Heterodera glycines
aaatcaatcactgtcgaattattgtatacatgaaataatattaatatacaatttgcacatacaaaatttaaaaaacctaaaaatattatccctttaaagatttttcttttgattcactgtttttattttatttttctcttcttcattaacaaaacgctaaaccttaattcaaaatgacaaaaagaggcggggcctcctctgacattgtatagtgtaaggtaaaattataatgcttattcgggaaggtatggtctcaaaattgttttttcacctcctcttaaaatgcgcttctctccatctgatcattttctccatccgtcatcacaccttcagaattttcccgcagacaggggttatccatgttcgggaatttgcagtggaaatcgatccgtttcttgtacccgtcatacattccgattgaaaatcgcgcgactgattactcagatgctttctttaggctgtagaggccgaatttggccttttaagccttcatttggccattattattatattggtgtaaatttgtcgcctttcccacattttcccaccattgacaccaccgcctcacttctttttagtaacgaagttcataaatgagagaaataaaaatgcgattaatttttgaaaaaattgttgttattaaatgagagagacaagacgaacaaacattattttgacgcaatttaattcatttttaaaggtatacacaccgtttcaattttggcctcccagttccaaaaagatttgcgtgtgtggctcagtggtttttgtaagatagtaaagggacaaagggtggtggttcgagtccgttgtgcaacatgaatatttttatttatttttgtccaaaatattaaaaaatgacgaattttgggaattatttttgaagctttttgccaacaaaattggtaaatcttggtatcattcgaaagcccttgatggggagaagctttttctaagcaaatgctaagcaattggattgattaggaaaaagatatgagggttcgaaattttgtttcttgaataactttttagttaaccctttttttgcttttaaaaacccttacattttgttccaaacttttttatctatcgatatgcaaaatttggtgcagattgtatggattgagaaaaagttatatggagagagtgaattcggtttttctctattatagagataagaaatagtacgcaaaagagaagatgtttttt

SEQ ID NO: 9356 - DNA, 718 bp, Heterodera glycines
tccaactcgggggcacctcctcaacggaaggggatgcaccgtacccacttgtttcgttcctcagccaactgtcgcctgttagcgcgattgcatgccctcagcgcaggaccgattgctcggtacctggctttggcgcgacgcctcacgccacattctttagctttgtccaaaaatgcactgatcacggacgggatcaattgaatgatcatatccatgatgggtctgagccaaagaatgtggcaaaaacggggtttcatatgcggtgagcatttgcaatttttgtatgttgtacaaatttagtgaggggggtcagagaactgtacaactatttctcaattcccattctcttctctgttgactgaccactcttagtgatcttgaccagtctgctcctgggaatctatggcattatttaaaaagaaattggaggacagagaaggttaaaacacaaaagaaaacagtacagaggaaaagaataagagaaaattgaaagacgtgataaaaggggtggttgaatattttgttaaaataattcattttaaaagggatatcgggaattagattttatttgttcagttgggccgctactcgtctcttttgccctttcaggtgaattaaatttttttgttcaaacgcacagatttggagtcccattgcaaaaaaaaagaattgaaatcacacaatttcatgtaattaattcattattttattttcacaa

SEQ ID NO: 9357 - DNA, 2070 bp, Heterodera glycines
ttcatgacttttggaaatgggttttcatcctcaaaaagttgcaatacgtggattacatggacgagttggccaagttggtcggctgcaagccgaaattagtcggacgcattttcactgatccatgcctggccaaagttctcctcttcaacggcctcgtgccgtaccaattccgattggatgggccccaccgatgggaaggggcgcgaaaggcaattttggagatggatgcgcggatgtttgagaacacaatgacgaggaagacgcgagaagagacgaaagggaagaagagggcgaagatgagcggggggttggccagatcgatcagcggatacatttgaagggggagaggagggcacactgacaaaccaaaccaaacataacgaacgcacttttcatatttaaccggaaattacatttgacataacccgagaagaaaatatcagtttatccaaaggattgattttcatttacatggggaaatacaattcagtgtaaatatcgtgaaattggtcactttttaccgttgttggactgtctcagatacgttttcgctttgatcagatccatcacccttttgtggccccaattctttgccaattcgtaagcatcttgtccctgcccatttttcacatccaatcgcgccccgtgttgcagcaaaagttgacaaatgtcgacgttgccgccttgcgccgcgtacatcagcgcagtccagccgtgtttgtttggcacattcacacaattggcatcctccgcaataatacgctaaacattcaaaaaactttggctcatctcttttatttactcattttcacctccaccaaatcataaacgcccaaaaaagaggctgatcggatgctcaaactgtagccttttctcggatctttaaatggcactttgatgaattcgccgattatgtctaaactaagctcctgctcaaactcatgccgttcgacctcgtcgttgaagcacacttgttgattcttcttttggtttaaaaactttctaagtgccatttttacaaattttgtagtaattgactaaagcattgtaaaataaaggtcggcgctatatggaaagttaccgttttttaaaattttttcaaacttttttcatgcaattttttttttatataaatgctttttaacttttttttagcaaatggttaaagtttcaagatattctattacaattatggtgaataaaaagtatattcacgattttttatctcaaaaatttttgcaaaacaaaagggtccccctttgtttttgataaaattaaaaatctgtcactttataactagcgccaaatttcttaataggcccaaataattgtcatattcatgatcagcgacctctaaaacccccgggtacttggtttcatgactttttaaacaaaaaaaaatttaccaaaaaaaagtgaaaaaattttcaaaaacggtaactttctatatagcgcttaaagggcgataaaaataacacttgacaattctatcaactagggttgggcccccaaccccgaatttttcaaccccgacggccggtgacccaaccctactgtcaacgaataaataaagggacaaatgagtagtgaagaatcccggtgtaattaatcaggaaaattccattaaaatgttgtgccttaagttttatgtatgaaaattaaggaagttttacgggagcaggaatgggacccacgcaaaactctcgctcccgtaagaaatcccgctagccaaatgaacttgaacggtcgccggattcccgcttcgccggctctaatgaagggacccacgcgtttcggcgctcgtgtttcggcgccagctcgtttttccacttaagcttttttctttggcatccaaatccaacaatcttggtatcattcgaaagctcttaacatgctctattagccttatcaaaaacgaaaagtttttcaagcctgtaaaaattttattaagaaaaaacttcaaaaatttcgacttttcgcaattttcatgcataactgttttgataattgtctaatcgcaaagcaatagcttagaaaaagcttctaaatagattaagctttcgaacgaca

SEQ ID NO: 9358 - DNA, 1774 bp, Heterodera glycines
aaaacgcatgggacaagtactcgaagtaacgaaggacaaagctgtcgttcaggtaaatgcgaatttaacaaattattattccattggtgaaagttaaggtgtttgaaggtacgtcaggtatcgatgcaaaaaacacaatttgcgagttcactggcgatattatgagaacacccgtttccgaggatatgcttggaagaatattcaatggatccggcacacccatcgacaaagggcccaatgttttggcggaggattacttggacatcgatggacaggttttaaaggcgtaattaatttgcaaattgatatgacctttaatgttttagcctatcaacccatggtccagaatttatcccgaagaaatgattcagaccggcatttccgcaattgatgttatgaatagtatcgccaggggacagaaaatcccaattttttctgctgcaggtcttccgcataatgaggtgactaaatggtgtcgacctgtgcaattctttccccattgtcagatcgctgctcaaattgtacgccaagggggcctcgtcaaacagccgaacagaaagaaggaaaatgaggtggagggtgacgacgactttgccattgtgtttgctgcaatgggtgtcaacatggagacagcgcgctttttcaaacaagactttgaagaaaacggttccatggaaaatgtgtgccttttccttaacttggctaatgacccaacgtaatttaatgtatggtaattcacgcatacataaaaaaattatagcatcgaacggatcatcacaccacgactcgcgctgacttgtgcagaatttctggcttaccaatgccaaaaacacgtcttggtaaggaggaaattacctttaaagaatagctttgtaaacacaatctcggataagaattatttagtgtttcgattgttttttaatgcttttgtattcgttaaggttgtgctcactgacatgtcttattacgctgaagcacttcgcgaagtgtccgccgcccgagaggaagtgcccggtcgtcgtggttttcccggttacatggtaatctccactagtacattttcatgtattttaactttgtcttgttgttagtacactgacttggccagaatatacgaacgtgccgggcgtgttgaaggccgaaaggggtcaatcacacaaattccaattttgtctatgcctaatgacggtaaaagaataattggtggtaggaattttttatttgaccttttagacatcacccacccaattcccgatttgaccggttacataacggaaggccaaatttatgtggatcgccaacttcacaatcgtcagatttaccctccaataaatgtacttccatcgctgtcgcgtctgatgaaatcggccattggcgagggtaaaggacaatgtttcgcttccaactcttacattttgctttgctaggaatgacccgtgccgatcattcggatgtgtccaaccaactttacgcatgttatgccattggtaaagacgtgcaagcaatgaaagcggtggttggagaggaggcactgtcgtcggatgatttgctctacttggagtttctcacgaaatttgaaaagaatttcatttcacaaggtcaacaaaatcctttaaatgcatttagtatcaaaggagttcgttttagggaattatgaaaaccggacggtgttcgactcactcgacattggttggcagctgttgcgcatttttccaagagaagtgaatgaattccctcttacttttattttgaaacgtttcttttaagatgttga

SEQ ID NO: 9359 - DNA, 1402 bp, Heterodera glycines
gcccaagtatttagatggcgtcgtttcgacttcagtacgtgatttttagaataatctagtcaagagctttccaatggtgccgaatttgtggggattcgatcgtttagaaaaaagttagagtgcgaaatctctcaatttttctagttttgaatcggttcaaaatccggtttttttggcatttccgcaactcgagacatatttttccatgcttagctcctagagacgaatcgattggtatatcatttgacccattttttcacggggcgttcactatagttcacccgttaggattaccgtgattcaaatcctcctgattttatcaggatactgacctcccatggtcaaaatattaacaaatgaggcaatagtgtggcaaccgtcaagaattggtatcccacgaaaaaatgttaaaaacttggcaggtgccttttctagggcttaaaaatgcgctgaccacaaacctgagctcagattttgtaaattattgatttaatctatgatttttgatcaactacttgacttttccaaatgtttttattatttttaaaaaatttttacaatgaattttggtttgaaaaagcctgatcatgaattttgcgtccattgtttcttgcgttcgatcaatttgtttatccgccggtggccatgtttggtcagctttccgttgacctgtgatttttttaaattttgaaatcaaaatttttgtgggggacaaaccacatcagccaattttctgaatttaacaaaatttaataggtccacccactaggccactaaagtggtctccttcctctcctggctttgcatttttgtaaaactaggtttaaaatagggagaatatctaatcgaaaattttaccgggtcaacgaaagaactgcggatgatgtatccggtgagactgccccgtccaatctcccacgacaaaccaacagagcacttccacgaagttgtcgacttcccctccacctcctccctctcctcctccctccgccagcgggcggtacccattcggttacctcgggcagtacgccccgctggcggcgttgctcaatcaattcgtctaacgctctttccacctcttcccattctcttgctgaaaattcgttttaaaaacattaaatggtttagtttttacccaagcgtctgagcttctcaatcttctcttttaattgccgatggtatagcacgtaatttaaccgaaccttaaaaaagaaaaaaaatgaaaacaaacagattaactcaatatgtgggatggcatggcttactcattgaataaatcggatagtgaaaagcgaacccttggaatttttgcggaatttgtcctaacactaacaaaaaaaatacaataaagaaaggtcgttgtattaatgaaccaattatgaaacggaaaacaattacgtgt

SEQ ID NO: 9360 - DNA, 2093 bp, Heterodera glycines
  unsure (1)..(2093): unsure at all n locations
gagggaagagagaccgcgaggaacgggagaccagacaggaaagaacacaaaccaccaaggccgagagcggnacccgaaacacaacgcggggaagaacgaaacaagggacgcacaaaaccaacccaaaggacggagcgagnagaacgcgagacgggangcacaaaaccaacgcnncccagcccgaaagcgcncgacgcgaaancncagagnngccgaaacncgcgagcaccgccaacccaaagaagcngacccaccgangaagcgcngagggangggggagaggaagccgacggcanggcggcagcnggcatggcaanggcgnagggggncgccggcgggcgncgngggagcgctcgccgacgcggcggacggcggcgaagcggcggacgaacagccggcgccaccgacgccccggggcgaagacggcgcacagcgcaccaagaaacagcacctaaaaaaaaattcccgaatctttctgaatgggaaaagtcgattggcactgaaaaattgtaagacaacgtgtcaagataattaattggtaaaatttttttttattaatttaatattttaatttttcaatttaatattttagaaattcgcaaatgaattaaaaatttaggcactcaataaattttgataaattctgacatatttttactcagatttaaatatttaaattttttccaattgatattcgcgcattttctcatatccattaatattaaattgtcattgtaattgaaaaactacagtaacacttatgcttaacggggaatgggcagcatgtgactgtaattaagacgattatctgctgatcagcaggaggaagaggagatgtgatgtgagagctcaattaatcaattcttatgcccatttgaatactaattaagtaatcagatttattttatatgcacctgaccaggtgacctaggttcatgtttttgaagcattcacctgtaacctgtgaaaatctgttttctcgatgtttgtttattttaattgaaaaaatgcgtttaaaaaatatattttcattcattagttatttttgtgggattttttgccattaattttgggcttacgacttacgttaaatttaaattgctggaaaagtaaaaatatcgaaaatttcatcaatttttaatccattaatatattgaaaatctcggaattaacgcattttgctgattagcgtctaatttggtactttcaggtttttcaacctcgaccaattccgaattcctaactcaaactctaacagaaattgaacgaaaagttttgatcgaattcgggttagggattcggaacgggtcgaaataggtgtcagaatcataattaacgacccccaaaaactaaagcaactcatttttatgacttgctattttgagaaaaattttgcaaacacaaaagtttaaagatattttaagagggggggggggggggggggggggagatccaacgtggaagtacagaacaggttatagggaagttattcccgaaggattcggtctccctagaaatctgggggcatcgggtcggcgggactgccacgatagaaaaataaagcgattttttcaagtgcgcgaaagtggaactcatacaattatggggagcaaaaatccaaggtatatttaaagtacaggttatagtgaagttattccggaaggagttagtcttttcataaatctggaaagatcggctcaggtaaattgcttagaattttcatatcgaatttacttggattatttctaacaaatagtcatgattggactaagtgatcgaatattattagacattcatatttgctttttgcatgacttttttcgcgctctttttcgaaaaagattttgggaaataaaagcggtccggggatggcgataggcgccgccgacaagagaaattttgaaaatttgagtgtgatttgttaacagattttcaataaaaaaggctggtttttgggattactaggctcaatttgaacggattttctttaaaaaatgataaaaaaaaattaaaaaaattagaatcatatttttgcggaaaggaaagccttgagtatacaaaaagaaaatttaaaaataatttaattttttccc

SEQ ID NO: 9361 - DNA, 3771 bp, Heterodera glycines
tgtgaactagagtgccacgggaccgggaatttttgccaaaaccgggaccaggacttgccgggacctgagaagccgggaccgggacctcgatttttttcgggactgggaaccgggaccaaccgggaaattttaaaaattcaaaaaatttaaaaaaatttaaatttatttcaagtaaaaataatacaaattaattttttcttttgctatttatttaataaaatccaaaagttaaagctaagttaaattaattaaaattttcaaatcgaatttacttcaattatttcaaacaattaatcatttttggaccaaatgatcgaatattaataggaattcagatttgcttttaacatcacttttttcgacgcggttttccaaaaacctttgggaaataaaagcggtccggcagtgccgataggcgccgccggggaaaattttgaaaatttgagcgagatttgttaacagatttttaacaaaaaaggctggtttttgggattactaggctcaatttgtacggattttctttaaaaaatgattaaatacaattaaaaaaattaagaatcatattttgtcgataggaaagccatgagtatacaaaaagaaaattcaaaatattttcattttttccctttaactcaattcttcatcactaatttttcactcagacccccattcttaccagtgcttgtttttcccggttgccctaccgggaccgggacctgagcttttcaaaatccgggacctcggatgaccgggaattcccggcccggtcccgctctactctattcatatgtaatgctaaggatagggtagcggctgtctagctgcagctgaaattccctatcctcatcgaggtgaggatagcgacagaaatgtcaattaaaatcacaaaaataagttaataaattgaaaaattgaactaaaatttttttaataactctaaaaaaaatttttatgatgattgaacaaaaatcgaaagttcgaaattttcgacctttcgagttcgggttaggaattggttgaaataaatgacagattcatgatcagcgaccccaaaaaccttcaggaataagtttttacggccttttatgacaaaaaattttgctaaccaaatttgacttggaaaatttctcttgggcgatagaaaagaaaaaaagatgtgtgacgagagagtagctgcggatggtatctgcagataaaaaaatcgtcagctacagatagttagcgctagcattatgaaatgaatacggattttatctgcagctaccctatccgcatatccttagctgcagataactatccttagcattatgaataccagcaagagaaaattttatgcaaaatttcaaacatttctgaatgtgttaagcgaagaaaaaaaacctgcatacaaaaagtaaatcaaaagcatttttataattaatcagaagttttagctgacgtaataattttaaaaaatttaggaaaaaagtaaaaactaaatatgtatcaataatgattaaaaaacattattaattatggaacgaaagggacagaaaatgattatgacgacgaatggtgatgggtgtgatgatcagcagcagtgcataagtcatttttattatatgtttttgtttgtttgtttgtgtgtgacgtcattaagaatttaaaaaaatggttgtacaatttcaaatcggtttctaccagggcccagggctaaaaatgcagcagaaaaaaagttaaaaactaaaaatccgggccctattcataataaatggaaaaatgaccaattggtacaaaatctgttaaaataaattatagctaatttttttgaaagaaaattaattaaaagtaaaagaaatttaaacattatgaatttcgtaaagtttttcacctttgaaatcactccttctgtgaaaaaatttttttatattggagatcgaaccccattttaggggaggggcacaaatccgacactaaagaataaaaaaataattaacaattcattaaaaaaatttatttgcgtgagaaaatacgtttaattgcataagcggaaggttttgtatataaaattcaaagatgagaatttcaaattttgaagagcacacatttcgccgaaaaataaaaatcgatgacattttttgaggggggggggggagaagaataagttgcattttgacaaatggacaaatggggaagaattaatttttatgtgtttgtggtcacattagttgtaagtttagaaattttttattttggaataaatttttttttattttttacgctcgaaaaaaagttttttttattgaatttgtacgattgatgctcaaaaaattttgcttttgaataattttaaaagaaaactgaattttttctaataatttttagttttataaaattttatggctgcggccattggcatcgcaggcccataaattctttgttttttttaaatatgcccaacaattccaaaattagagatgcttacatatctcgaactaagagagcagaatttacacgaatattcgtggcttttcagctgatgatgagtgatgagatgatgctctcggtgggcttcttccatttgccatggatttggtcgcccgcttttccccgcggggcgccggaggcggaagagagtgacgacccggcggttggcacaatttctgcgctttctctctcgctctttttttcttattgacctttaatgaacacactctctctctctctctcgctccctccctctgtccctgagctttttgtatatatccactctcttgttccatgtttttctcggcctctttcacacttgctctctctctctctctctctctcatttctctctctctctctcatttctttctctctctctctcttatctctctctcactctctctcatttctctctttcctctcaaattgcattttcgtgtatactttttttcgctcctttctcttatgctctctttcttcatattagaaaacgaagaaaaacaacgaaatgagcagaataaaagagaaattaatgaaaaatattataaaataaaaagagaaaattaagcaaaaaggaagaaaatacccaaaaaattgaataaaattgaaagaaaaataagaagaaaattgggtacaaatcgcaaatatattcaaaaatggataaaagaatttgatcttcaaaaaaataaatgccataaagcaaaaattgatgaagaaaaatatgaaattgtacaaaaatttattgcaatgataaataaatttaagcaaaaaaagaaaatattcaagcgaagaatgaaacaaattatgacgaaatttgtaagaaaatcgaacaattgaaaattggaagaaataatttgggacgactaactaattatgtaaacttagaatttaaatagtctatgaaattttaattgtctctattgtttttttaaaatgtgtataagttatccacttatagatttctcattaaaaaaagttaataaagcattccacgataagaggaagaggaagaggaggaagaagaagaagatatttgaggcgtggtgcgacatttgaggacctgacttttgaggagccgacttttgaggacccgacttttgaggattttcccgacatttgatgacccgacttttggggacccgacatttgaggacccgacttttgaggacccgacttttgaggacccgacttttgaggattttcccgacatttgaggacccgacttttggggacccgacatttgaggaccctacatttgaggacccgacatttaaggaccctacatttgaggaccctacattt

SEQ ID NO: 9362 - DNA, 992 bp, Heterodera glycines
tttagttaatattttaggcttttttgccactaaaaatcctattctattcattcttataatttccgtattcagttattaccacaactttaaaaaattcaaatgtcgagcaatttgttggaacggttgaagctgatgttgagcacgggcgatggggcggacgttcactttttggttgggaaggaaaatgaggtgaattgagaccacaaaagttgactaatccaaagttaccagcaggtccataaccagcagcagatgggaggaagtctgaaatttttttttgatgggttttaacgttttttccgttgttcatccagaaaaaaaaaattccatccaatacatatattgtttttttatacgtttaatatgtaaaaagtgaaaacccatcaaaaaaaatttttttgacgaaaaatcatttgatgaaaaatcataatttagatgatttatatgataatatgatgtcagattcattatcagcgctctcgataacccccgaggtttctcagaatcgcaaaaaaatgagcttttttgcctttttatggcaccaatgattgaacaattaccaaatgaaaaactgttccttccatttatatttcacttcgacggcgccacgtttggaccgaggaggaactgcagcgacagcgccggtcgaatgcctttttacggaaacagctcaaggcccagcgcgaccggtcgacaagccttgagcgatcggcttcggtatgtcgccagcgcaaggcactttccgacgtgaccaacaaccatctcctcccccactacaaaattcgtacatcggctctccactcgtccacattgctttgacgaatgttgtaccgccgagtttccatcttttgcatggtgaacaaagcgaattaaaaaacgattcaaaattttcaggcaatggtcagcgcactattgacgccatttgttcggaagcgatgctcgcggaaagggggacgttgttcggaaacgactgtctgatgttcgcgtgcgac

SEQ ID NO: 9363 - DNA, 1144 bp, Heterodera glycines
gcagggacggtcccaggatttcggcttgggggggggggtacccacccacgggcaacgaccttttttctttttttttgcttttcaaaccacttttttgcggccgtttttccaaaaaactcttggggaacatgtgatccaccgaaaatttttttttgtgatttttatgcgtcttgttaacagattttgtccaaaaaatgacaaattttgcgattttgaaccatttttagcagattttcatcaaaaattgtgcatttttgaaaaatttagtaaaattttttctgctttttttaaaggaggtctgattatttggttatttttttacaaagtaatttattcttaaatattgacaaacaagactcgagaatcgtgtaaaccaatgaattcatttttccccaagtgccttcctgcgttctgacaatggaagaactgctcgccgtcttccaattccattgccacccgaatctccgcggtgcgccaggacaatacccaatggcatttccgtgccatggacgcatttccgatcaaagagaagggacattttcgatggacattgagaaattgtcggaatttgcgcgagaggaagtgaacagttgtcgattaagcgaacacttttacacaaaaggattgccatggaaaatttgggcagaaataaggacgaagaaaaacagcactgaaaaatatctgggcgttttcctatggtgcattgctcaaataattggtggaacaaaccaatttaaatttgaaatattttactttatgattaagatgaaaattggagttgcaaatgttcgtcaactcttcgaattgtttcacaaaagagcggaacggaagatgtaacgagaaaatatgaccatattttaaacaacaaagtgaacagatggggatttccatttttcattacttttacggtcagtggcagtaaaaatattccttttcttcgcttaataaaattgcgaaattaagcaattgatggacctggacaaaggaatttacgacaaaaatgaggacaaagtgacattggccgttaatattaaagtggaagaagaaaagggacaaaaaatgcctgaagaaataagcgcgcattcacccacccactcatttttctgtgataatatataaatatcgaattaaacagtttcactga

SEQ ID NO: 9364 - DNA, 3897 bp, Heterodera glycines
  unsure (1)..(3897): unsure at all n locations
aattccattgccacccgaatctacgcgatacgcctggacagtacccaatggcatttccttgccatggacgcatttccgatcaaagagaagggacattttcgatggacattgagaaattgtcggaatttgcgcgagaggaagtgaacagcaggcgattaagcaaacacttttacacaaaaggattgccatggaaaatttgggcacaaataaggacgaagaaaaacagcactgaaaaatatctgggcgttttcctatggtgcattgctcaaataattggtggaacaaaccaatttaaatttgaaatattttactttatgattaagatgaaaattggagttgcaaatgttcgtcaactcttcgaattgtttcacaaaagagcggaacggaagatgtaacgagaaaatatgaccatattttaaacaacaaagtgaacagatggggatttccatttttcattacttttacggtcagtggcagtaaaaatattccttttcttcgcttaataaaattgcgaaattaagcaattgatggacctggacaaaggaatttacgacaaaaatgaggacaaagtgacattggccgttaatattaaagtggaagaagaaaaagggacaaaaaatgcctgaagaaataagcgctcattcacccacccactcattttctgttgataatatataaatatcgaattaaacagtttcactgatccaagacaattaattcatgggttctttctttggtttgttgggaaacaaaagcaaaggcctcacttttacactttcgcttaattaatattagggttggaaatgtcggggtcagcaaggtcggggtcggggttgaccaaattgttaggtttttcaatttttctccttataccatatagtcaaaaatctttatattattttagcataaaattttttattattcataataataattttatgtgtttttttatttctttttatcataaatatttttgtataaaataattaaatatgtataggcatttttatggccaatttccagtgaaaaactgtaaaaaatagtcaaattttcaaattttccagcagaccattgacaattcaacggttgggcaagataaagaacattggtcgcaaattttctcaagctctgccggattttctttattttattttatttttcatttgcattacccatcgacaggatggggattcgaaaatttcatttcctttgcggtgaatgccaattcaaataaatgagcaattgacattcacaataaattactgaattactgaaaaaataactaaataattgaattaatggatccgagcaaaggcttttaccttttatgcgtggccacaaaacaaggtgaaaatcaaatgctaattaataataattataattaattgccattaagacaaaaattggagttgcatggcaatttttcgaattgtctcgcaaaagtgcgatgtggcggattttagtttagtattagatgaagatgtttttgacaataaaacaaacagctgaggatacaattttatttcattaccagtgaaataagcaattcgtaactttcagcgcatttggaatcagatttttaaacgcttttttttcgccgcattttccaaaaaacgtttggtgaatgggcgaggggagtatgtacagtacacctctttccaattttttaaaaaacgccttttccaagggccaactggaacagaaattcgtcaagaacattcaaaaagttaaaagcaagtttactgtctaattgcgtacagcaacaaaatgccgaagtcatcttttctgtttcttagagtccggaaacagagttatttagaaaatattattattttcttgcaatggaattaactctggctaaagcagtcgtaaatttgtctaattttggataaatttttaaatgttttttttgtttgaataaaatccccaaatgtcgggtccccaaatgtcgggtcccctaagtgtcgtgtaaatccccaaaagtcgcaccacgacctaagcatccgcaacctagtataaaaatttttttgccgatttatttatttactatattttctggccaattctttttccaaaaaagtcataagcattttagaacatttgccaaaaagccaataaagagtcctttctagagaaaggcaaagaaatgttgtatcaacatatgagtaatacccaactcgtactgtatccttactcatactgtgcaccaacagaatttatctttcttaaatcgcagtacaattgggtaagtaagcgagtgggggcggtagagttggccaagtgtacgagttgggttcatcccaacatatgctatttaatatttatgttaacggatactgtactgtaatgatcattctgtgttatgggacactcatcagagaattgacataactttgccaaaaaaaattgaaattgattatttttctcaaaattactttcaaaattccaattttcctcgtcgatgttaaaaaatggctttaaatcactattaaattggtcatttttgtacaaaatctttttgaaaagccgaaaaagcggtttgaaaagcaaaaacatttttaatgttgttcggtaatcttatggatttacatttattattcagttgttcaaatcattcgaatgtttaatttgttaacaaaaaaaaaacagaaaagcctccgacgatatttttttggcattaattgcttaaatgccatttgttacgtttatttttaggtggtaaataataaatgcacaattaattgagacaaataatatttaggtaaggggccctttttgtgtgtttttcatcgtcgtaagatgctcatttaatatgtacgaatagcgaataaatatttgccaatgacgcacaaaacgtaaattttatattatttggcactcctcacaactaaggaaggacacacaaatgaattcaacaaattttgataaatgttctcaaatgattattattaatattattattttttttagaaaattttgtactcagattattattgtttttatgaattttttatttcaaaattcttatttcaataaccatgagctggattttggatttttatcaattttttcatttaaaatttttttatggaatacgaaaattattattatttttttattttttgaaatacggtcaacttaaattttgaataatttggtgagaattcagaatactttatttcgcgatatttattgtatacgagaaatttcactttgatatgactaaagcttaatttagaaacacacatttaaatgccggacaatttattaaaggatgatttattatctgctgattttgtaagtgatatttattaaaattaagtttggtattacaaaatgatttatcattaagttggccaattatttcaatcaaagtgtaaatgcatccattaaagtgccattattggtgactaatggcatcatttcattttgctgcttggttggcattgtcctcaacgcatcgcttgtttatgtaaccgcaaaaacaccgtatgaatgaatttattggtttttattttaataaaatttattttctatattttaaaattataatttataatttcaagagaaaataatgcagaatggagttccttaattaaatagatttttaaaaatcgaggacattatgtcaaattgacgttttttcacgattcataatcctggtccattttcaaaaaattatccggctccctgctctattccaatcttttttatcaatattaataaaattcttcaaatcagagcctttaacatattattaagaatttaaaaatattttcaaaatttttccgtgtggtaaattttgaactaaaaactaacagaaggtaccaaaggccgaaaaaataaaatctatttctgtaattttaaactttctttttttataagcaatttgnttaa

SEQ ID NO: 9365 - DNA, 1551 bp, Heterodera glycines
tttttattatttttaaatttgaaatattattagacaacgatgaattatttgcccctagaatatttaattcttgtgattcctgacatgctctatttctgcgttgctttgtaaaataatttcttgatttttgtgctatttttaaaatcaatttatttaattaattttttaatttaaaattatatttgccatttaaaatttttttaaattatctaaaaattatatttgaatataagtgatgaaaaataaatttactaaataattaattattttttcagctaaattattattgttaagtaaaatcatattattattttttctgttggatttaatttagagttaaatattttttcaaaattagcaggatatattaaattatatttttgtttccaaattatcaaaaaaggttgtttgcaagcatcaatttaataggtattttgaaaattcaatattcattttgataaatttttttgacttttttgattggtttttctttaaaattatgtaagaattcgagtcaatttgtagatatcgtaaaaaaattttttttaatttattgccaattaattatttaatattttatttttcgtgagattttctttctttttttcaaaatgaattatctttatgggggggggggggggggtccggcggtgccaataggcgccgccgggaaaatttttaatttttaatgcgatttgttaacagattttatccaataaatgactaaattttgccctttgaagccaattctttaagaaaaattaagagtttttcggggtaaaatttggcgaaatgttcttatttttttttataaaaatcaacagttttgtgctaagaatcctattcttaccagtgcaaatttttaccggctgtaccggtataattatttttgaaaaaaacagtaccggtaccgttaccaaagaatccggtaattaccggcgataccgataccagtaccgctctaattactctattttaaaacaataaataatagaaattaatagattaataatgtctaatattcttgcttatgcattttcttttgttttttgtgtatccatatttatatttattatattttttgaatattttttattccatgtgttttaaattcattttaatttatttgttttaccttttgctttttatgtatcaaaaataaataaataaattttaatagaataattgtaatttttaatcaattttattttattagttaaataatttcaaaattagttatattttaagaattgattttattttattactattgcttattatgcacattttttccagtttactcattcacccattttgatatttattattattattttgtttatataatctgaaatatggctcattaaaaagcccaaaattctcttacgaaaattcaaatgaaaaaaaaaaccgtaaatatttaaagtccacattcttaaaaaatcattcctcaaccttatgaaaaataaataacttaagcaattaaagtcttcaacatttgtcaaagaaatatataaagattgtccataaatgagcttttatacttaaaca

SEQ ID NO: 9366 - DNA, 1804 bp, Heterodera glycines
aaaacaaaaacatcaaatatttgagaaaaattttatgattttcaaaaaattaataagtttataaggagaaataatttcccaataatataaaaatttgtggtgggaataaaaaacttttaattatttaaagtgttttattaaataattttctttcagtcaatttttggccccatttgtgattattatgcattgatattaagtaatcgaatcgatttttccctttttatttaattatttttttaaattgtattaatctttattttaataaacattatagtatagtacatgtttattaaaattgcatttttattaaataattgaaaccttatttaaatatttatatttagattcaaattacaaaactatatttaatggtaggatcgtatttatccttctccttgtcctgtaatgcgagcttttaattcggttctttcggcaaactcctagaactgagcggggccgggaattttgacaaaaaccaggaccgggacttaccgggccagaaaagtagggaaagtgtgaaaaacatttaaaaataaaatacattgaagggagccgaactgtcaaaaaaagcaatcaatcattttcacaccttgctacgcaagcaaatcttataacctcatatattcttatatttcaacgaacacaaaaaatatttcgtctaattttttaaagtccaagtatatatatatatatcaggggtgggacaactctcgcctctcgtctctcgcctctcgccaactctcgccatttttggtactctcgcctctcgtctctcgcctctcgttttttgtgacgagaggcgagagttgaaaatacacccctaaagattaaacttttgagcagccagaaaaattttcaaatttacgcgaaaaaaaaatcttaaatctctttctttccttccttaatgttttctctatttttggatagctccaattcaaatatggtctgctggctaaaccttctgcctttcattatttttctctttggttcaattccccaacggtacagaatttttttaataatttctttaaattattttcaattgaaattttaattaataaaaaatatttcaatttaaaaattattattttttctttttttaaacagcctaaaactgcaaatttaaccaaaactttgataattttttgacaagttctgttaatatattacactcaaaattttagaatttttccggcggcgcctatcggcggtgcagattcggcaccgccggaccccgcacccaatgttccaaaaaatttttttttggaaaaacagcgccacaaaaaaagcgacttaaaaacaaaaaattaaaaaaacaagttttggtcattttttgaataaaatctgttaacaaatccgaagacaattttcaaaattttttcggcggcgcctaccggcaccgcccgaccccaactgtccccgaagttttaaaaaacgcaccgcaaaaaaaaaggtggaaaaatggacaaataataaagtttgtttctaaaataaatatatttcatgaaaatattttttaattttcatgaaaaaattttaaagatttttgtttggatttttcatgacttggactcggtttaaaaactaggactcagacccggctttctgtacccggaaaaacactgacccggtatttgcccaaatacccagggccatacccctaatttaatataccaacttgaggcttgttaaaataagaataaagcttcagaaaacctcgaaaaattctcgcctctcttcctctcgcctctcgcctactctcatgttttttggggaatttctcctctcggccaaactctcg

SEQ ID NO: 9367 - DNA, 1628 bp, Heterodera glycines
ggtaaagtaaaaataataaaaaatttgcattaaactcagcgacgaatacaaattaaaaaaagaagttacattaaaaaatgtaattaaataaaatttttgttttaaaaaatcattttaaaaaatatacatgattttagtcagttttcacctcaaagctctacatgttgtgcgttggaaattggtgtatttaaagctaaacatgaattaagaacctttattaaaaaaccggttcagtatccgtaatttatgatgtcttaaagttaattttataacgatgcgtttaaattactttgtatataatttatcttcttcactcatagcctttaaataaacaaaatgcaattaaaatttttaaatagaaatcccttaataactttagcgtccaatttgtacactcacgtgggtcagcgcatttgaaagagcagaaagagcaccacaaaaatttagaaaagacgcttctaccaaatgctaagacaaatttgtcatttttataaaaaaaattgtttttatttaataactcataataactcttcatacattaattgtaacccagctggtactgcgtgatggaatagtgcctatagcctgagctagagcttttataactatataggtcatttattgacgcctaaattgaaccacagttaaaatttaacactttctagatttttaattaaattttttggttaaaataaatgtgagaattttaatttttaccaaaccggtttttaatgcttacacatgcagtcattttttccctttggttttacatgttgcttaaatcgctattttaaaatactaaaatattttaaacattatgttttggagataaattttaattgtattagcttaaaattttttgttattaaaaaatttcttttaaacctaatgaagcactagtcttgctcgctataactttgttttataaattatttaataaatgaatttggaaataattttaagttttcaattgtcaatacaaaaattttttatgaattataattatgatggcgctttattctcggcgacggccaaatgtatcggcgttgccgccagtgagtttcggcgaaatcattaacaatcaaatggctttgtttttgatttcaaattaataaaaattaaaaaataatttcatattttattattacattttacttaagtatatactaatgttagtgcttcataaaaaaattatagaattttgataaatcaattttatttatttttttctaccgctttaacttgtcttaattctattaaaattagtaacacaatttttttgatgataattttaaacaatttcatagaaatatttttatattttttccataaaacattaccaaaaatttaatacgcttacttaattacttaaatttttgttttagcatttcataaaaacagccatttttgatattttttatataaaacattaacttttgagtattttccataaaacacattcattaatttgttttttaattaaactaatttaattttttcctctgtacatattcgaaaagcatctttttaattattatattttaacttgttttaataaaatgattttgcatttgttcattcttaacatttgcaaatcttaaacaaaattggtcaatattattacttta

SEQ ID NO: 9368 - DNA, 1733 bp, Heterodera glycines
  unsure (1)..(1733): unsure at all n locations
gcaaaatatgtaaataaaaatgtataaaaaatgctaaaatatgtatgaaaatatttacaaaaacccagaaatatgtacaatatgtaaataaaattttaaaatggttatttttcgaaaaaatttcttcgtaaagggtgaaataggcacaaaatgccataaaaatgaaaccaaaataggtttagaacccaccttttagtattttaaaatatcttaggaggcattttcaaaaaaataaataaatttttcacaaaaaatttctaaaaattctaaaaatcttcaaatatgcaaaaaaataaaaataaaaatatgtatgaaaaattgcgaaatatgtacgaaaaattcaaaatatgtagaaaaatccgaaaatatgtaaataaaagtcccaacttttgttcgcaaacacaaaaaagaaagtgtttttctactaattaggctatggagaataaaaaaatatgtatttacataaaaaaacaacccctaataatcactgatncacctccgatttgttctgactctctctgtcctcgtcttcgttcgatttttgccgtttctccgccatttttttctcaaaatatttttcggcacttttttcgtcactttcccaatcgctgctgttctgctgctgctcttcttgcccaatttgttctacattttcaatctcaactgctgctgatgctaattgtccaccattttttgtgccatttcatcaaaagtgccgttttttgcttttccattttctttttccgtctccgaattgctgctgctgctgccatttttttcttcacttttcgcttcgattagcacaattcgcatttggggaggaagaggacagcccaaaaggttcgggtcaatgtgaagaagtcggaacagttcgacaattgtttgctggtcgaacaatttgcacaaacccttcatggcatttgtgccatcggccgaacggagcactgaaaaaatatttttggaactgcaaacggacagtgactaatgaagcaaacggtgctaggacgaagtgacaaaagtatcaatgacagtaatagttaaatttaattattatatgtccataaaatatgacaaatttaattcattggtaactttttttcagaatataatttttcctaatttttttgttacatttttttgtaaatttttgctagattttaaaaacattattatatattagaggattcgtagagctagagctttcttctaataccaagattgattaatttgactaagtctaagctaattatgatttatgatttagaaaaaaaaaaattaaaataataattaaatttaaatattaaggtcattgatacttttgtcaattttttgaatataactttttttcattgtcaataaatccaacaatcttggtatcagttgaaggcttaatatccaagctgtttctaagctattgctttcaaaaaagttataaaatgaaaaaagtcgaaatttttaaagttttttctttatccattttttgcatgcttgaacatctttgtgtttttgtaaggctaataaagtatttgaacggctttcgaatgataccaatattaaaacaaaaaattatagcccaaaaatttggactggcgccgaaacgacccgcccctaatttatgttccccatttttggaattataaatcgtcggtattatttgacaaaaataatgattttaaaaatgggaaaattaatgtttttcatgcctttcaattggatccggatatttttatttt

SEQ ID NO: 9369 - DNA, 1916 bp, Heterodera glycines
  unsure (1)..(1916): unsure at all n locations
aaatggtttctccctgcgcttcnctcagtccgacaaattccctcaggtgcaattgcccatccattgccaattttcttccaacatttgcttcggcaggcccatcattttttggcctccttttgccacaaattcgctccattttttccaaaatgcttttgctcctcctccccccttcgtctcccctcggcacaatttccaacaaatttttcgtgtaaaaaaacatttttttcaaaaatttctccgcccgtttcgtctcctcctcgtccccatcaagcaaagggtcgtaaatgtgttcctccacataaattcgcattttgtcgtaaaccgccgtgccaaagccgcgctcggccatcctccgctttgcccatcgcataaacactgccaaatcggcgcccaattttccggcacgaaaccattcgatgtcaagcgcaagaaccaaatcatagtggctcgagaggcgattatcgttgaggaaaactgagaaatgagaaaagggccaattaaaaattaattgccggtaaatatcggtcatagtgcccaaacacaaaattgctcaaaaacggtcagaatcgatgtaaaaaggttcgaattgtttggcactccaattcggcactttctcagcctgaaaaagggcaagcgcgcccctaattcaatttttccaaccatttcgaacatttttacatcgattctgagtgttttgtgcaattttgagttttgaccctatgaccgatattttcctaattgccttttaatttgatcaaaattgattaatttgtatttaaaagatcccttaattaattaatttctttgattttacatttaaatttgtttaattattttgacttctcttcccaccgtctctttcataaaatctgttcttcaattggccatgttcgtcctccaattcgtccaatatttctttactgccgcccatcagttttaacagccgcgttttcgccccgggaaaatttagcattctgagaaatatttccgaagaagttcccttaattgagatttttaatgcattgaatggacaaaaaaaattaaatgtcaaaatggtagcggaatggacggggtcggaggtattcacgacggaagagtctgtccaactgtgcccaaaaaggtaatgcaaggaagaagctgtctgggcgtttataactcggaaacgagggttgctaaggccaataaaataaagagcggatgtgcctcggtagctcaatgaaagatttgcccgtgctgagacgatgcgaaaaaaacttaatgattgataaaataattaaattaattaatgaattgatgtccatgaatttaataatacgattaatattttaaatataaatttaaaaagaataatataaaaagtcaacatttgtataagggattatattttgtaaattcaattttaaccttgtcgaatctgcttgttaggccttaagcaagccgtgtaaaccatgatttattcaattctctaatcttcctgattaaagaataacctcgaagcaaataaaattttattcatttttaaaaattttagaaattataattaaaagtataatatttatatgaatttagttatcgcattattaaatttatttatttattttatcaatcattgattttttcgcatcgacctagcaccgattgcccaaggaatgggtggacgagtgggttcgatccaacccgagtcgaccgattttgcggtcgatcacatttctgttgccgttcccttcccatgccctctactactatcggtgtgccatgccaacatttttcgagatgatttcgttgatggaaatgacaattattttgctgaacacggtccgcttgaactggtcgagtgtgtccgcgcggcgccgttcgtccgcgcattcctccgccttcgcctgcttcttcaccgcttgtccaccgatgcattt

SEQ ID NO: 9370 - DNA, 1057 bp, Heterodera glycines
aaaaataaaaataccaaaagaagggcatatgccacttacactttctggtggaaatgaggtcaaatgtgaagtattgataaaagaaaacaaactgaagaaaacattgtgaaatttgattggaaagtataaagtcagatagcagtgaaataagacaattgaatttggagaaaaatatagtcagacctccaacgaaaagaaaatttttttttttttttttgaggaaaaattttgagagaaattagaagtactggaacaaatgtattttttttatttgaggaaatgtttggaggtctgaaagaactatttattgaaaagatgagggtattgttctttgagtgattgaatttggtgagaaattttgtcggttggtggcaatgattttaatgcttcataacaaacgatgattgtttggtcaaaaacttccggcggtttggacatgtcttcgctggcctccttctggtttggtgcaacaatgggagtctggtcattcgtcgtttttgggagctgggttggaggtgccggtggagctgggttttgttgacgttttcggagacgcgcttcgtattcctctttgagttgttctttggacagcgccggacggacgaacagacggttcaggttctgttgggaacggagccgaacacgctcgcgcttccatcctccgagtgccacatgttggtgtgtgggcgttggcatgaccaccttgagcgggcgtggtgttgttcgctgcgggtcgtatcgtccgagtcgaaagacggccgttggttgggcctaaacttcaagatggtccagtatttttgtgatggcttccctgtcttcctgaacacgctccgatgggcggatggcattgctttccgggaggccaatgaagaccagggtgcgttggcgttcttgctcttcgagtgtggcagtgttttggtccaggtccagtgcaggtggcattgcacgtttggcgcgaggtggagtgatgtttgatgcgttggttcgcttcatgtcgattaattaggaaagaaaatttgttgttttttttgcgatcttaattggactatcactagtc

SEQ ID NO: 9371 - DNA, 5497 bp, Heterodera glycines
gtgctgataggcgccgccgggtaaattttgtaatttttatgcgatttgttaacagattttgtccaaaaatgaccaaattttgccccaaatcttatattttcttgataaaatatttaaattctgccataaaatttcaaaattatgaatatatttaagaaataagaacaaagtaagaacaatagcccgaaatcagaacatttcttacaaataagaacatttttattttgtaagatttggaccctccaaatcagaacatttcttataaataagaacagatccgagccctggtttaaatacacgaaaatggtctgaatatcatcagtgcttcagtaaaaggtcatttaaaccattcttagactaaaaatggaaatcgtaatttttgaattttcgactttttgttcgaactcgggcccgggatttggaattggtcgaaaagaatgtcatattcgtgatcagcgaccctcaaaaccccataaaacgtgttttcatggcttattagaagaaaaattttttattccaaaagggggggggcaccagcttcacaattacccaatttgcaaataatggaatgaatttaaaaaataataaaataaacaactcacctcattgaagaaaaagttcaccgttttgggattcagcttaaaagacagcgttttcagaaaggaaatgaaataagcaattatttcttcgtttgcaaaatcaaaagtatgtgtgattatcagctgaaataagataacatttcattatgaattttgacaaaacattaacaaatgccttacattcactgtgttattgctcagaagaaaatctaaaattgtttttttaggaaaggaatttttaaaataaataaataacttacaaagtgatgtttcgtttctgatgttctcaaaaaggatgttcagtgtctgcagcagttgcacatttatgtaaggcgtggcactgctctgccgcataatgcgcaaaaagtgcgaaaacatttgacgttcgaggaaaaaactgaaaatgccaaatcgaaaaatcgctcaaaatgggaaccaactcaaagaccgtcccatcgttttggtcgccccaaatcaacacttctgtgatcgccctcaaagcctcgacaacaagtgcactgttcgcttctgttattttgtcattcttcatcaaaacgccgtgcaaatacctaacaattgtttagaaataaggcaaaaattattccgacctgagatattccaatgaatggggatttcttggcttccataatgccgaagaaccagtgaattttttaaacattataacaagttaaggtgacagtttcatgacaagggcaagcgaagctttctttacaaggtaataagcaaaggctcaaagctgacttaatgagcagaatttgaatcaaaatatggcattttgttgggtcggggtcacttcggcgcggaccatttcggcgccgcaaattttgaaatgctataacttttttatttgccagttagctttagccaatctggcatcatttgaaagctctatgtgtgctctatatttacatgtaaaaatagaaatgaatgattcaaaaataaaaaagttatgccacgcggcgccgaaaaagccaagaaaaagttaatttttgaggttttttggccataacttttttgtaaactgacgaaattttttgaaattttacaggctaatagagaatctgagctatcgaatgataacaaaaatttttaatttggttgatcaggaaaaaagttgttagcaacggcgccgaaaagtcgccgaagtgggcggttcccattttgttagccatcagaataatttttaaaatttttttcaatttttttttaatttaaatttaaatttttaaacatttttttgcaattttttcagtgatggaagattctcttcttgatgctgagacatttttgtacaaatgttctcatcataatgttgcagcagattctattgaatttcatggcgtaaaaacaacacgaactgatgcattgaagaaggaagtggccgaattatttcgtgcaaataatctgtatgggtttttttctcaattaaattaaattcttccctttttagccaccaactgatacaaaattctggcaaagctgcaattcatatgatggtgggtcatccatccccagatattcgtgtgtaattttacttttgtatggcctcgcaggagatgggtcttttcgaggaatgtcaagcaatgattgacattgcgcctgggattgacaacggagagcagaaatacgtcggtcagttaaattctcaatttttggatgcatcaggccaattcagttaagttcttcgccaaagagctaaagaacgcgttcaaaatgaacataaaaatggaaatgcaaacgtcgggcgaaacggacgctggtctaattgcgaagaaagcagtaaattcaacacgaaatgaccacccaaacgtggtttttttttaacgtcagaacatctttggtcggggcgagacggcggaattgactttttcgaagggattacgaaaggacgggggctacagctttggattttcgggtttggtctggacagaattttgaattgctttggctttctttccgtccatttagcactgaagccactcctcggctggcagcgatatgagaatattggcgcccaaattaacaaacgatcagactttctgaaatggaacaaagctgacacacacgaaagtgctgcttctttcacgtttaacaagtactttccggagtatgcacttatgtcttcattcggcttcaactcggtaaagcgctgaggtcgaatggcgcggggttaattcatcagtttaattttcgtaaaattttctttcagaattggcgctcttttttggctcgcagtgacacgcctttcccaattcgagaacactccggacacacaaccaaattctcgtttgattacactcttttgtcggatggacgagaccggcccattttgccaacgaaagggtcgttgttcaaactgcgggcggagtacgcgccgggagcagtcggcgattcggcatttttgaagggcattttcgattttcaggtgcagtaagtaacccacttctcctgatttccccttactttcgttcctttttcagactgccgcccccctccccggtggccttttctgcggcgcgtcgtttcgcctcggcgttgtccatccggtggccaaccgcggcattcatttgctcgaccgcctttacctcggaggaccgtttgatgtgcgtgggtacgaactgaattcaatcggagcgacaaaggaaagtggcgcacttggagggtcgacactgctcgtaagtgaaagacgaaatgcaatttcaatgtgggttaagcattatttgttttgggattttgattgcgttttagcaaatattttgcattttaagagcaccgctgttcatctttatgctccgctgattcccaaggatatggtaggtgaagtttctttttcttaattcattcttcataaaaaagggggaggagggtcgccggcgaaggggaaaagagaagaattttcaatttttgacacagaagagtttcaggtttcatttaaaattcgcggcgcatatgttgtcgattaattttggctctattgaagtttacacaaccataaaataatttgacagtttaatgcaccattttttctaaaaacacccaattaacatttttgatattatttgatagcccaagtcctctatttcagttttttgctcatttcttcgtcaccgctggctctctgtcgccaatgcgctccaaacaccgactttatgacctttgggagttgcagcgcgtttccgccggccttgggctggctgtgaatctcatgaacatggtcaggctggagttgaactacacttttccgctccgaaaactccctggcgatgtttgctttcccggcattcaaatcggtgccggactgaatttcatgtaaccagaaaactgcaagagatttgttttaggctcaaaaaacaaaaaactgaatttttttacaaaattgcaaatgttttgttcacttttctttttgtttcatttgcatttggttttgtttttattgataaacaatttataattcaaaaaaataaaaagtttaaaataggtaattcttaaatttactttaaaaatcccttttcacttttacatcgttttattttgtttggattttacgatggctgccattcgaaaaacactaaattttgtgagtggaaataaacagaagttgcttgagcttcgtcttctgctcggagacgaatttgaggttggatggcaatggatagtaatcatttgctttctaatcacaaatccatggcatagattgctccgttggacattgaccttcccgaactgcaaggtgaccctgcggacataaccaaggcaaagtgtgccaaagcggtggacgccaccggtggcactttgaaagtaatcgttgaggacacggcactctgtttcaacgcattggacggactgccgggcccatacgtaaggaaagtgggctcaaatgtttatcagcgacgactttaggtcaaatggtttctcgcgaagttaaagccggagggattgcatcggttgttgggtgagcggaattgaaaatcaaattttaattgttttttttgtaatttagctggctacaacgacaagtcagcttattctctgtgcactgtggcctattcagagggaaaagacaagcccatccatctttttactgggacaacaaatggacaaattgttgagccgcgagggtcgcgcgagttcggatgggacccatgcttccaagtgaattaatgcttattcaaattaatggtttttatattcatcctttagcccgatggatttcaaaaaacatttgcagaaatgaccaaggaagaaaagaatcaaatatcgcacagagcgatcgcattagggaaattgagagaatttttgcaaaatgagaaataaaataatttaaaaaattttattgtttgatatataagaaaataaatattgttaagtgaaatgctaaaaaagagaaccagtttggttcaatgcgaataatttggctaaagaacggttgtgaagggttagtctcgtcatcagagaattgatgtcctctaacttattcgacatcgcttcgttttgatcatttttgggcgattcttgctttgttatttcgtccgtttgggttgattcggaagtcaattggggagcaaaacagcgactgtctgctcatgttcaatttcctcaaatttaatttaaaaatggtaagacttggactcagcccacccgaaaaaatgacatgaatttgttataaaactgcttgatattgaatattattcacaaaaatgtatgaaaaagtggcgatatatagtgaaaattttttttcatcaacatttgaaatttttcaaaaaacgtcatttttgagtgtaatatctcttaacagccgacaataattggtcaaacgcgtcaaaaccattcttttttacctttctgcgccattgatactctaccaacgtgtcagcaaa

SEQ ID NO: 9372 - DNA, 1546 bp, Heterodera glycines
  unsure (1)..(1546): unsure at all n locations
tgtcatcattcatcacncctccnccttatgcttcatccctcattgtatatcgcacatctgctttgacttttgctttatcccgccgaacttgcccattcggctttatttcccttcagtggggcttcaagtttatttgcttcttggcggccaattctgtcattttattaatgccattatttttattggccagtaatagccatttacggccgtccatcacttttactatatgttctaaaaaaaagccgagagtcgagaatgtattttccaaattcaggattcaagggcataggaactgcttttaatccataaactttccctaatttttttttatcacactcgtccaaatcccgagaataatcaaaaaaaaatgcccaaatacttttactaattatcgtaattagggttgaggaactgaaaactccatggttttgcaagtaaatttaatattttcttttgtggaagtcccaaattcagagtccctatccaaccgtattcctaatttatcttacggtggctaagtattgatcaattctgagcactacaataagccaagagtctcgatcatgataagaaattgcccactaactgttacatatattttccgctaatcactccaaaaatgggtcgtcgttcgttggaacaccaaaaaaattatcaccacccctcctcaaccagcacatccaccccatttgctgctgctcccccctcccatccgtccctccaatgttcctccaccaactaccacatgttggcaccggcccaaggcgggcgcaaaatgagtctgattgtattgcaacagcagcagcgcaaaaaatcgctgtgcgtcgtcccccggggcgcgggcggcggcgattatacgacaagcagtgagacagagagagagaaaaatgatcagagagcaaaatggaaaaatgaaaattaacaaaactttaaatatgtacatagtttattaatgagaatccaagttggcataaactattcaaaaatagttaattagaaaatcaaaaaaatttattttaatttttttaattaaaatcgttaaagtaaatctaaaaatatttaatttctcattttttaatttaaatgattaaaataaataaacttaatttttcgattttttctgaatcattttttctaaacacaaatttcaattaaaattaacatttttttaaaccaattttatcaatatatattttttttcaaaattttagtcgccaaagcggctgtcctttcatcgccaatgtttcaacaaacaaaacagcagcaacaagccggcgcttctggcgcaaatgccacggcacaacagcaacaacaacagctgagaccaagtacaaaaagctaatttaaacatgaataaaatatttaantaatttgaatttgctcaccataaacctaattaaattaaatttattgagtttaaatggcagaatacttaagaaataaaatttgatataacaattcgtaatttttacaagaaaaaaatcatattccaataattattaatcattggcacttaataaaaacaaaaagagctaatttaggctgc

SEQ ID NO: 9373 - DNA, 4149 bp, Heterodera glycines
aaggtcacacagtgtcaagccgtggggaggacagtggcagaagaagaagcggatttggcctgaacacgatcagtgttgtcggcggtggtgccatttcggctggtcctggtccgtcagccacgatgccaaacatcaagcgggactcaatggcaatggtctcaattgggagactattagccaatttctctatttttaatgtcagcagattgccgaccttttggccaccacgtcacttggaagcaccaagaaattgccgaaagcaagtgagttttttggcacagagaaagtgaatttggtacaaaaaaagaataaggcacaaaattgaatttgaaaaaacaagtcataaaataatgactatggcataaaacagggatttggcatggcacaaagcaacgaattttgcacataatcgctgttgaagtgtgtgacttagagcagaaaattcaacccaaagtttcggtgttttgcacagaataaaggaggaaggttccaatctctgagaattttgcttattttatagtttttgaaagggtcgaagagggaattttttaaattaagatagtctgtttttgtattttttgaaaaaatcagggtattttgacagaaatcctctaaaattgtaaaatttttacacataactcaataggatgtgtattaattaaagaaaattaattgctgatttaatgaccgattttcaatgtttgtgatcggaattctttcgcctaattatgtatataataatatttttgttcacttagccattctcgatcggcccttggctgatcgagtgctgaaaatggtgtgcttattgtcgctgatcagcgtttgcatgcacaccccgcgcaccctgcagctgatcccgcacttcacctgggtactgcttgtgcttgacgccaatgtggtggccattttcacgtgggaagtggtgctaaaggccaacaacatgggctacttcaggatgattaactatgccgtttagtctaattttttattttattttatttttaaaaacactgtctttttaattagttttttaatataatttccattttttaatttgatcattttcttttgcttttacctttgttaatactaaaattaatcagcataattaaatgtatccctctataaaaatttactattttttgaaaacaattcgtaattggatatatttttaaaaaatttaagtgcccttcgatttttggcattaccattttgcaccattttttttaccattttaattttcctgttttgttttttaagcatcaaaatgcctatttccgcgaccgttggtgccaattcgacttttttctgctccttttccattggatctccttgttgctccacatttaccaactgtttgtacattccgagctgttcgcccaatttgggctcgtctattacgattggttgggcgtgattcgatgtgttcgtccattggtgcgttatgaaatgcctaatgaaaacccaaaagtgggaaaaatgccattattaaaatttagaaaataattaatgtgtcgaaaaataagggtcaaatcagtctatttttaaaaaatgtactttcacaaaaaaaattatcaatgtcaaaaaaatgttcatatttattttttattatttttgaaatttttgagttaaaacttgttgacaaatttcattaaaattttcaaaatttttcccccggcgcctattggcaccgccgggttccatcgcttgaatttttcattttaccaaataaatctacattatttttttgtcaaattcattattaataataatcagcctaatgacttggctgatcaacaagatctttccactctttcttccaggtgattatccgactgatcagactgatgctgacattccaagtgccgcggcagcgaatacaacagctgttgaagtaataaattttgccaaaaacggacacatttaattaaaaataattttttgaaattattttttatttacatttggttttaattaaacagacgatcgagcactcaagtgcaaaatgtgaccgtgttctttttgttttttatggcattgtacgccatcatgggcattcagctgttcggccgaatggattaccattgtgtgatgcccggtgagtttaacaaatgtgcagaaattttatattcaaatgccagaatgattcatttaatgagatttaaaaactgagaaattaaaaaataattgtggatttattttctttttatataatttttattttaaaatgttattttaaacaaaaaaatagtttgtctttaaattcagggaccgacccgaagaatgtgaccattaacgatttggccattccggacacaatgtgttcaaaagaaggccaaggcggttacgagtgtcctgacaacatggaatgcatgaaggtgggaaagtttgtagttaaatcttaacatttatatttacaattttttttaaatgaaaaaactaattatttaaataaatattttatataaatttacaattataaaattagattattctaaccttttgtctcatataaaatatttgttcagctagttctgagtgccaaaagtgaaggcttttacggcatgtttgaccatttcggtaagttttagaatgaaaatattttctaaaaataattttccattaaattcgttttatttctgtaaggcgccagtgtgtttactgtgtatttggctgcctcagaagagggttgggtgtatgtgatgtacgactgtttggactcgctcccgtcacatttggcatttttttattttgtcactctgatttttttcttggcttggcttgtcaaggtgtgataaaaatttaaattttacgaatttcatacacatttagaatgtgtttattgctgtgattacggaaacatttgctgaaatacgggtacagttcagtgaaagttggaaaaaggaggaaatgacgacaattgaggacgattttagtcaagtgattgattaattgatatttattaagccaggagataattaattaatttctaagaaaattgagtcaactgatgacgggtggaggctgatcagactggacacggaggacaagctgaatccacgcataaagcaattccaaacggtaaaaaatggtttagttttaaaatattctgttaggtctaattaagggattatttaatgtgctgaaaaattaaattatgaattgaatagctatcatcaatttttcagattcttcgttcaactggtttccaatgtgccatcatttcgttggtgttggctaatgctgcgataaatgcttcgtttgtttatcggcacgacgaaacggatgcgaaacggcgcaatttgtattatttgattgaagtgagaaatggctggttgagaatttacttaaacaacttcctttgttcttttaagtgtgactttttcattgtttttgggaaagaaaagcttaccaataagccacgttcggaagaatttcgagcaaaatttatgatgcttaaatccgaaacttgcatttgctttgctaaattttatatgttttaccaaaactgataagttcaaaaaatttatttattaaggtgtggaatttagaaaactaaaaagcacataaatttgttagtaaggccatttatgtttttatttgtgggcagttgaatcccttttcgtctctccgcttttcatttttttttcgtctgtatgaattcagcttgaatatggatggcttgcccttacactgattatcggggagatatattttggattttggcgtttatgaatcattgtttcccaattacgcatttttattcgattttattttttatttttagtgtgttttcactgttttattcgatgtcgaatgtttggtcaaattgttttgttacgggcgccaattttttaagcgaaatatcttcaagttcgaattaattttggccattggtggcacttttaacattcaacggcatttgtacaaccaaaattacttcacttattttcaaggcaagtcaatggaaagctgtaaaattattattattcataaaaatatgttttttattttaaaagaatttaattaattttatatttttagtttttcgtctcttccgtctaatcaaagcatcgccaatgctcgaagattttgtgtacaaagtaaaatataaatgaataaaattaaatataatatattttattt

SEQ ID NO: 9374 - DNA, 2131 bp, Heterodera glycines
gtaataccagcagaccacatatgttttccaattcgtatttggacaattttttgccattgcgcagccaattcggtcagtgtttgcccacgccatctgaacatcaattaaagtaaaagtcaagagtctcgaacaatggaacagttaatgagtcacttgagtccaatggccgatgcctccgaagttttccccggtcagaatcaaatccttggggaagccgagcgccgccaattcgccccaccagcgaccgcaagcgtactcaaaagcatcctcttaaagtcaatcaggcatttagtggtattaattagtcaattgcgaactgttcgtgaatgttccgccattcatggccaaattctcgcccgcccagccgttccacgagtgcgaaattgagcatttgttggcccattccgcggcaaatttggccaaattgtcgtcccactccatcttgtgcatgttgctcgccgatggcattttgttgccccccgttttgttgaaagaattgccgagggccaattcggaacggaatttgttgtggcattggacagctgcgtttttgtcttcttcagtcaccggcagagtgtattggggggaggaagggtcggcggtcgatggcacaggcgatgactcatcatttggactgtccgacgatggcacagacgatgactcgtcatttggactgtctgacgatggcacaggcgatgactcatcatttggactgtccgacgatggcacagacgatgactcgtcatttggactgtctgacgatggcacagacgatgactcatcatttggactgtccgacgatggcacaggcgatgactcatcatttggactgtccgacgatggcacaggagatgactcatcatttggactgtccgacgatggcacagacgatgactcatcatttggactgtccgacgatggcacaggcgatgactcgtcatttggactatctgatgtcgcgttgcaattttcgtccgaatcaacaactgttgtcgtctccggttctgtgccgggattgccttcttctgaagaacattcctccgatgattcggacgattcgctgctgctactgctactgctgcttctctcagcaaaagcggcgaatgccaaagtcaggagaagaaacattgagaatagtttcatttttgataattataaattaaaattatgtttttaattttatgatttttctgtgttctgcgtccgctttataaaggattttccctccgctttttgtcaaaattttcaaaagctgagcaaataaaacggtgaattttataaatatttttcacattcttttggaattttgacagtaaaatttaaaaaatgaaaactgtgcaaataaataattaataatgcgtgattattattgggtgaagttgggagtaaatcggcaacaaattaatggattaaaaatgccatcgccacaaaagtgaaaagcggaagaaacgcagctgaaaaaataaaacataaaataatataaactagggttcctccccgagcctcagcaaaatgtcggggaacggggaggaaattccccgaaagaatttgtcggggatggctggagaaatttaaaaaatgtcggggagcaacaccttcgtcggggaggaaattttcataaaaagtctaaaaaaacacaaaaagaaaaagtccagaacaaaaaagtcttaaaaactcatttaaagattcttccatcttatttcaagtgcaatttacgactttcgtaattccccgaaacatgtcggggaggaaccctaatataaaccatgaaactcgtcaaaatgttttttaaaattttaaaaagaaatgccaaaattttgtaaaaagtatggaattacaattttcatttttaaagaagcaatcttaaaacattatataaagtggtgctaggtcgtttcttaaattccgccaggaggtatgaaaatagaaatataaattcataaaacttggctcaatttcaacaaaatgaatagttcatggcagggatggcattccgaggccccaaaaattttcggaaatcggaattccgcgggtccaaaatttttcggaaatcggaaatcggaattccgaccccaaaaacgtcggaaatcggaattcggaagtcggaaatttttcaaaaaacattaaaaaa

SEQ ID NO: 9375 - DNA, 2273 bp, Heterodera glycines
cgatggcacaggcgatgactcatcatttggactgtcggaggatggcacagacgatgactcgtcatttggactgtttgacgatggcacagacgatgaatcatcatttggactgtccgacgatggcacaggcgatgactcatcatttggactgtccgacgatggcacaggagatgactcgtcatttggactgtccgacgatggcacagatggcacaggagatgactcgtcatttggactgtccgacgatggcacaggagatgactcatcatttggactatctgatgtcgcgttgcaattttcgtccgaatcaacaacagttgtcgtctccggttctgtaccgggattgccttcttctgaagaacattcctccgatgattcggacgattcgctgctgctactgctgctgctctcagcaaaagcggcgaatgccaaagtcaggagaagaaacattgagaatagtttcatttttgataattataaattaaaattaagcttttaattttatgatttttctgtgttatgcgttcgctttataaaggctttttcctccgctttttgtcaaaattttcaaaagctgagcaaataaaacgttgaattttataaaatatttttcacattcttttggaattttgacagtaaaatttaaaaaatgaaaactgtgcaaataaataattaataatgcgtgattattattgggtgaagttgggagtaaatcggacaacaaattaatgtattaaaaatgccatcgccacaaaagtgaaaagcggaagaaacgcagctgaaaaaataaaacataaaataataaaccatgaaactcgtcaaatgtttttaaaaattttaaaaagaaatgccaaaattttgtaaaaagtatggaattacaattttcagtggtaaagaagcaatcttaaaacattatataaagtagagaccggacaagagggtcggtcgaacggtttcggttaaaaaaaccgaaaaaaaccgaaatcgaaaaaaccgaagaaaaattttcggtataccgtttcggtttcggtttttttgaatttttttttatcttttcccaaaaaaaacaataaaccatttttatcaatagaaaaagcgaaagatcacctctgagtaaaattgcagagctattgaagctctatcaatggtgtactaaaggtttggaaaatgatagaaaaggcagccaaaaaacatgtgtttgctccttgattctaaaaaaaccacaaagattagttttagcgatttggtgccttttttggcgttttttcccgaaaaattccattaaaaattcaaaaaaatcggaaaaatacacccctaagaaatgatctaaaaaaattcagagaatatacctttatgaattgaacgccaaaattcattttttttttcttgataaaaaattttaggtttaaaaatttccttattgaaaaacattataaaatattgaattatcaataaatcagcaaaatttagtttttggttagtttttacgtattttgctccctaaaaatcattaataaaaaaatttaaatgctttttttcatgcctttttcgggatttttgtgccttttttcagtgccattttgcgctttttggtgccttaattgtgagctctagccataactttagggccggcggtgctgataagcgccgccgggaaattttttttgtaattttaatgctatttgtgagcagattttgtctaaaaataccaaattttgagattttgggctaattttttaagaaaagatagctttttggggggtcggcggtgccgataggcgccgccggaggaaaattttaagaatttttaatgaattttgttaaaaaaatggccaactgatttgtcaaaaaagtcggtcgattgtttcggttttttaattatttcggtcgaacggtttcggttaaaaaaccgaaaaaaaccgaaaccgaaaaaaaccgaaaaactcaaaaatttctcggtcggtttttttcggttaaaaaccgaaaccgaaaatcgaaaaataccgaaaaaacccgaaaaaaaaaccgaccggtccgatctctaatgtgtaaaaatccattcaatttttttttattaaatcacaatcgcaaaatttttgatcatttctcataaatgaaatttgctgacaaattatccactgaccaaattgtccacttacgaattgtccggaccccgttgaaaatagagacaaaagggcaacattttgaacgtaggaacagaaacttacaccaccactccgtgtttccgtacgcttcccgcccatcggcggtcg

SEQ ID NO: 9376 - DNA, 6719 bp, Heterodera glycines
  unsure (1)..(6719): unsure at all n locations
aaaaaattatttttgaaaatgtacccctgaaaatagcaaaaagtaatttttaaaatactaaaaggtgactcaaagcctatttaagtcatttttatggcattttgtgcctatttcatcctttacgaggaatttttttttccaaaaaataaccatttaaaaaattttatctgcatatttcgggatttttcttacatatttaggtacatattttgaccactttttgcatatatttttggcagccctatttattatatattgatagatccaaaagctgtgatcagaaagctcaaatacgcgtcattattctttttttgtggactattagttgggccaccattgtaaaaatgggatttttctcatttttattctgattttcgccaaattttcgtatatgaaggcattaattattatgtggcttaattgattgataagaatcggttgatttgtgccaaaaaaccgactttaatgccgatgccatcctcctcatccttgtgattcagcggttgcttttcctccccgaacatttccacggcatttggcacaaatgcacaatccacgacgccctccaatttggccaagtccgcttccaatgtgcgcggatagcgctcatagtcctcgtttgcgccaaattggagcggattcacaaaaatggagacgatcaccaggggcggagaggcgcactgatcagtggtgccattttgttccttgtatttgccatgacttttttggcatttatacaatgggatataaaaattagaggtcagatttcaggaatacacagtgtcagcctcaggatatacacggattttatcttggcaaactattgttaatcagacaaaattttcagtatttttcaaaatgaaaatttgaattaaaaaagtttcaatcggcattttgggtgggtttaaaaaattgaagttctgatttaattaaagtcagaaaactgggttctaatgcttcttaaaattttggatgaaattaaaaagttagtgaaaaaatagcagaaataaacattgacttttttgtcattattccattggcgtgcctggtgtgccagtcggagatggccttggtgaagggcacccattgtcggcaccaatgccacgcttaatgaaagggtacttttttcggttttgtacatacaccccaaaattttcaaaaatatgccaacaaaggatggcaccgagttcgagttttttaatgttagaaaaggaataatttgcccattgaaaaatctgaggtttttttttgcaattgcaattttggggtaaattattcattttatgccatcaaaaaacgccgtgcattttgttggcatattttttaaacttttggggtgcgtgcacaaataaatttgtataccaaagattggcgttctgtttacgatgttcgcgcacgaattgtcgcattgtcgcaatggtgttgatcactgtcaactttgaagaggtcgacatagttaagaaatttgttaaatacagttgaaagagttaattttaaaataaaatttatttatttattaatcgaaaatttgttttaaaaataggaaaattatttttgtttataaagaaatgatattgttaataaccaaaaattgtttatcattttataaatttggttcattagaatcaatttaagataacaaattaatagatattaatatattaattaataggatgttcgtgtcatgtgatcagtcagtcagtcagctggggacaactcagccgacagaagacaaactcagcntgatgggacaattcggctgatggacaactcagatttacgagaattaacaaaaatataaaaaaaaatgaaaaatgattaaataaataaaataaaaactaattaaataaactaaaaataatcttagttcaaaataaactaaaaaaaattttaaatttaacagttgtcttccgccngggtgtcatgacaactcgtggcttatgtttaggcctatcttttaggctaggcctaggctgggccttgcttgggcctaggtttaagctttggctttattttgtaaaattttttatcgtacgtctgagttgtccatcaaccgagatattgcccctcagctgagtttgtttcgtttgatggttttttgacaaacgtcataactaggcctccaatttttggttttttaattatttttttcctgagctccctatggcttgaaacgcacgaaaaacatgtttttttttggtggttgttaagctagttttcgagttattttagcaaccattttctagttttttatttgtagcacctaaaaagcctaaaaaatagtgaaaaaaaaactattttcaattactttggcgttttgcccaaaattattaacaaaaatgcaataaaaactaaaaatacacccttaagagatgaaaaatttctcaaaaattcatctccaaaatttatttatttactttcttgagaagaatttttaattttaaaatttattttctcaatactggtttggcttaattttgttttgtttttttttgaataaattttgtcatttgacaccccctaaatttgaaaatttttagcaattattttctcatttttagcacccattttggagtttttttagaacctaaaactaactattttggaagtttttagcaactgtaaatattagagtgccacgggaccgggaattttgggcaaacttattaaaaatttaattttaaaagttataaaaagtgatgtcattgcaaattaaaaaaaaattaaatatttttcatacattttttacacaaatttgttcaatttatgccatggatgtccaatgcttgagcacatttgatgcttaaaatgggacaaacaaaatgcatgggaattagcagtgattttgtgctgttaattgctgcaatttatgctgaacagaagccgagacgaagccaaatttgggaataaaagcactcatttttattggaaaataatcacatttttaataattttattttcgtaataaaattatttattttaaatattaaattaaatgccacaaaattccgatgcacaactctttctggtccaaaattaattgtgtgtatacattacaaaaaatttgtggttccatttttttttgtagtaaaattattaataactaaaccctacccaaaatttcaaataaaacgcaaaaatttttcaaatttttctgttaggcttaggattccgacacgctccaattctatacaccgtaaatatgaaaattaaatctttgaaaccattacctcacctatttaatcataaaatttctcagaagtatactctctctcaaaaatgatgttctttttgtcggcatttgccatcattctccaatgccaaattgctgttggacaggtgccaacgtttcggaaatttttaattttaattaaaatgtttttgctaagctcgtcgcaccgcttcttctccatgctcaaacaggacccgatttcattgttcatccccatgttgagcccgaacatttggatgatgatgatattgatgacgcacctgtgccacactcggcacggcttggccttttggaacactttttgggtggccaacgcactttggaactgattgagcaagagcatcagttccatgaacgggagaagtaaccaaatgagctattataaaattcgacgacaatttcttggcggaatggagggagtgggttaattaggcggcactaattagccagattagctcaattattaaattcaaaatttaaaataatttttttttgccatttgtttgatcatatctgatcaagatgggtctgatactctctcgtgaactggcttgtgacatgatcgatcttggggacagtttttagacccaaattttcgattttttaaaaatgattaacaggcaacagccgaattatttccgaacttgcaacaagaacgacaagttcaaggcgtgctgccaacaagctgggatgaccagcgcaataactgacgttgaccggctgtacaatgacggtaaatttctcattctgttggattgaactgatcaggacgtctttttgatcaaaaaaggcgcgagctgtcagttttatttttaaaatcaaatttaaaaaatttcctgatcaaaaacattttttgattgaaaatattaattaactatgggtgcaaatttggtgtttaaattttgtttttattttttcaagcttgcaaatatccgcctgctgagctcgacacgaagcaaaagatcacattgggctactatttcaacgaggcaaaaaatcgcattttgcaattttaatttaatttattattatttttaattgtgtttaagtacgtgatgtgttatgcggatgcgcaagacaacggcgattgttgcgcaaagaaaggtgtgccatcggaggtatgaaaaaatgccggaaaaaaaaattgttttcacccaaatcaaatcttttaaaggtgcaatatatgttttggagcgccaattgccaggacctttgccgaggcctcagtgccaaattgaatgccaatccggcgtaagaaaagaattaataatttaaaaaaaatcctttttaagttttcgaattctttagaaaattttagaaaaaaaattataattttctctgtcccaaatttaataaatagtagtgcaaattagcttttcccatattgtttaattgagcgctaattaaaaaaatggctaaattgaattaagctgggacaaatgttcgccctacaaaaaaagcatttactactgtaactaccaaaatgtccaaatgaaaaagccgacggccgcgactgtgcgcggcttttgcaacaacgccaaattgtgcaaggtaacatggatgatgatgggcaggcacttcttggataaaacctgttaaaattttaaaaaattcgaataattttttaatcaaatttcattaaaaatttcaaatttaatccttatttctcttaaaaaattggctcaaaagtcgcaaaatttggtcattttttggacaaaatctgttaacaatttgttgaaaaaatcttcaaaagtgtttttttttcttctaagaatgaaattttctaaaaaaaagtctcgattctcgagtcgaaaaatttcaaggattttttcgggtaaataaatataaatacaaaaaaactcaaaaactgaaattttgtgaatttttttttttacaatcttttcagaatccaatgggatggagagacacatgcagcaaggcctaaagagcagtgggtggtcagtgagagagagagagagagaaaaagcaaaaaaaaaaaatgccaaggaaattggagaaaggacagaaacaacaaatggggggatacggtagacagtgttgaaaggatgatacggtaaatggagaggggagaggtactctgtacagatgtattgggatgtggtgtaagggctgtgcgaagctgaaatttaccgagacaagattaacaagaatagagcttaaatattcggaaaatacagtaactggctcggtaattttacggtacagaacaaaaaattacagtatgttttaaaagtttaaattgtaaaacggcggaaatttgatttgactcctgagaaagttgatgtttaagctttcgcatagcccatgaaaattggaaaatatgtaatgacgatggcaattgtttaaaatgggaataaatattattaataaaatttaatgccattggacacgtaatgccaagctttttttatctgtgccaattttgatttcaaatggcacccgttttgattttcccacagctaaatttgacaaaaaaatgttctgcttcaacacgatgcgtgccatcattttgctgacattcgtcgtcatccaatgccaaattgtccaaatgtccggcgggtaatttttttgttaattgaaattaataataattaaattgatgcattaccgttataagccctgatcacttttacttatgtttatcaaatagaaacaattgtgacagtaaactgagagatagttccaaattatttggacattgatctccttaatcacttactgatcaaggcgactcatattgttagtttgatcaccaattcattacttatcgcttattaattaattggtcaattaaactattaagttttgtaattttatagacgctgctacaacccaagcgacaaattccacggatgctgccagcaaattggtatgaccagcacaatgaccaaccttcaatcactgatcagagatggtaattaattgccctgattttgatcattccgatcagtttgcatgctttaaattcctttgaagcttgccgttatcctccggccgatctggcgatgaaccagaaaatgacgctgggatcatacttcaacgaagtaaatgactcaaatttgaaataaatataaaaaattttttttttcgcattaaatagggcttcttcattaaaatgcaaaatgatgcgaaaattaaaaaattgttgattgaaaactaaggatttttttcataaaaaataatttacccagtaatgttttagggttttacagcccaacttttgcttcgctaatttacaaaaatattttaattattttttaacatttaactatccaataattaattaacataattaaccctttaagtatgtgatgtgttatgcggacggacaagacaacagtcaatgctgtgccaatgctggtgtgccatcgaaggtaggacaatttttaaaatttttaaaaatccgaaagaaaaaattgaaaaataaaacaactaatcgtatttatttttataaatttcaaaattt

SEQ ID NO: 9377 - DNA, 926 bp, Heterodera glycines
gctgactgcctgcccttccacccgccgctgccccacgaacacagacaggcagacagtgcactatttccccttccctcttgcaaaggaggaaatagtgcactctcactatgggtacgcgccagtgtcagacaaaattgctcataacgccaaatagcgcatttggcgtaaatttttgcgcgttaattcaaaatttacactggaaaatgccttttttgtattttttattttgatctgccataactcgctccattcccaactaaactgaacaaatttggtatctaaaaaaagattttgaaatggggaatctttttctaagcgaatgttaagtaatttgtcatctcagaaaaaagttgtcggaatttcaaactttatcatgttataactcaagtcttaggcagctctttctaaccaaaatgctaaatttattcttttttctattgattctaaatgttcaaagtgattttgtacccttataaccaaaattattagaatttgcgaatttcatgatttgtaatgtgttagagacatgaaaatagtacgccaaaaggagaggaaaagaaatacttttttattattatttaataatttttgaatgggagtataaacaaaaataaaatcagtatagaaagatgcagaatttttttctctatcgctatgcaaaatttggtagggatttaacataaagaaaaaaaagttagacatagaaaagtaactgttgctttttacatcattaaaatgaaaagaacaccaaagtgagagaaattacaaagaaaaagagaaacgacgagatagtactaggcttttctctgcacagtggggcgtacccatagtgcactctatgcctgtctgtctacctcgctttgaaacatttcgactaaaaaaagaggacccaaacgcaattaatacctgaaaataaaaaaaaaatg

SEQ ID NO: 9378 - DNA, 4104 bp, Heterodera glycines
  unsure (1)..(4104): unsure at all n locations
gacccgtttcgagtagaaaaccactacccttttgcttttattacctagaaaataaactaaaaatgcattactccacgtccgcatctacacagactgatcacggcccgtcaaccgttccaaaaactcactgctgaacatgcccttgggggcaggaaaaaagaaaaattcagccctggtcaggctccagcccaaccctgggttttgtccatgaaaatccaggtccagatccaggcttttttatcaaaatatcattattttgcatccagcattcacacccacactaaaaaagcgcaattaattcattttaattcaagggtaatatatagtccaacccttagccgattacccatttaatgctccttctatttttagaagtacactgccgcgctcgtcaggcctgttagctgggcagaatgggagctgaggcacaattccatcgcaagggtcgtgagcttggacgcggcaagtttggcgttgtcaaaaaggcactcttcacagaccaacagggcaacgaaacggcggtggccataaaacagctgcattgtgtgaagagcaacaaggaacaggtaaagtgggagtttgaagaagtgcgaccgcgcattcacacattaccccgtttcgtttcaggtcacggaattcatgaatgatgctcggatcatgcgaaagcttagacagaatgtcgtccaattctacggcattgcagttgagcgggagcccgtgatgatcatcatggagtctgtgtcgggcggcagcctcaaggacttctgaaccagagcggcagagagctttatgcccacggagcagctgcaggactgcgccacatccattcgagggcatcattcattgcaatattgctgcccgcaattgtctttacaccgggggagtgaagggcgaggcaaaaagcaaaaaatgtcataaaacaaactgctcatttatttataggtgaagatagcagacttcggcatgccataccaaggggcagtgaagacgatgccggcagacgcgcaactaccgatcgcatggatggcgcccgagtcgctgaggaagaactgcttcacggagaatagtgatgtgtggagttttgggatattgtgctcgggaggttttgccaaatggcgcaatgccattccaattcgccggctacagactcccacatcatgtcccctcgccctcgagggtggagacgaaaagagcgtgagtgaaaagcccaaaaacgtgttttcattttttttatcattttcttttttgcaggtctcaagggacagcgcctggtcttcccgccgaagttcgtcatgcagcacgtctgggccccgaatcacaacaaccgatactcaatgggcgcggtgtacgactggatgaagcgaacaccgaaggaggaagaaggcgccagtagaactagtgcatgtgatcggaatgtgtgtatattgtatatatgtatattgttttttgtaaaatgtttttgtctttttcgtgtcaccgtttagcatattttatttagatttaaggatctctttattttgacaaaaacaaaacaaattggaacccttaaaattcaacaatgcgtgctttgggtgtaagagaacgggttagacacgtttatattttgtaggccgaacccaaaaaacttggaattttttaatggaattaattaagaataccgaacactggttattttccaaaaaagctacaaagggtatcggaaaagggaaggcacaaacaaccaattaccacggaaacgaaaaccaccctgttttttttttgccgggactcccgatttttttttagtctcgccgagggcccgatttcaatccataccaagatgtcacaattaggcgaaaataataaaaaaactaagctgagtgagtacaattagttttgcttatggggtggtagccacaaaaaacagacaaacaaaacggtggggccccaccgccagactttcattcttcccatgaaatttgtacaatttcccttccaccatctcatcatcatcatcctcttcaaatcagcatcagctgaagtcccagtaggcggacgtgtccagcgacgactcgcgcgtcacgcctggccctcgcgcgcgctgcggcgtcgtcagttcggcgaacgggcgcacaaaggcgcgcagcgcgtcgcacagcgagtccaccagcgaaagcgcgggggcaaaaggcaccgccgccgcgacggtcgttgaaggaccggcggcacagtcggcgtcgcgttcggccaacagtcgcagcgcgtccagcgcctgcgtgtcggtgcagtagcggagcagcacaagcgcgcacacattctgcggacaacaattatgaacagacatttttggacagaatggcgctttatttcctccccctcgcgctttcaaattaaaaagaaaaaattttagaaattcgtttttttgtgaaatgttttcggtttttataattctgtataaatacaaattttcgatcaaactctgccggaaaaaaatatcgccataaaacctttcgaagcattaattttcagcaattatataaaatggatttctaattaaaaatcgtaaaaaatggttaggtaaccaaatgtgcaaatttgctttcaccaacccttagtccaccccgtccaaatttttaaatatgtcagaaattttcggattgtatttcttggaactcatgctcgagcagtgcaatataaaaatgatgttaacccgggtttagcgctaaaccgggagccctgaaatcgtcaaaaaatctaagaatgtaaccaaatttgaaaatttgctgctcccaccaaccgatagtccaccgccgtcgccaacggtcggcacactgagcacaagcggcaaaaacagacgtaaagtgtgcccggtgatgaaacggctcgccttcccactctgcagaagatggtccaacaaacgaatgcacaaatatttgtctgccaactgaaaattcaaaacaattgttgatggatgggacgggagcaggacaaaacgtcgccgccgaaacgtcgccggacaaaacgtcgccgcaaaattttttaaaattttatctaaaatttatcaaaaattttttagttacctagcctggttcggaaaaaattctagaaaaattcgaaaaaaaatttttattaagaaattcaaaggaaaaaatttttttcaagtttttttcgatttttttcttagaaatcaacaaatttagtttttattaacacttagattttcagaaaagctaaaataattttaaattttcttaaaattttgaaaaatttttaattttttttgcggcgacgttatgtcccggcgacgttttggggtgtacccggatgggacgacaaatcgaatcaaatggatttgaaaaaaatgaattttgatttgtaaagagaatttttctgtttacaaaatttgaaaattctctttaattttttgtaatgtcgttaaaaataagtgtagaaagcccaattaaagcataaattacagataaaattatggagaattttatttatattacagaaatggtgtgaggaggagcatttttttttttgaaatttatgtatattctaattttgtgtgtattttctcaggattttattcggtttttaatgatttttccagtccatcggcggattgtcgcaacagcaaaacttttaaaaaaaaacagtgccataagcacgaaaaaatgtcgaatggtaattgtaagagggatgctctgtcctaattaattatttttaaaatttcaaaaaaaaatttcacacccgaagcattgcaacacaacattcggcgctgttcacctgcacacattcactttgaagtccacagcctatggaaaaatgctaaaaattggtttaatggattgtttgttgatggccaaatgagtaccaagaatttgacaaattcctctcgactgcagcactcggcatccgcatcaaacacaaactgatcacggcccgtcaaccgctccaaaaattcactgccaaacatgcccttgggggtaggaagaaagaaaaatggaccgatggcatgggatgggaggaaatanaaatggtcaaaaattggtaccatgaaatattcngtgtacgtgcagaggccgtcctttggcacttccgcaacgagtgagccatttgtgt

SEQ ID NO: 9379 - DNA, 1967 bp, Heterodera glycines
  unsure (1)..(1967): unsure at all n locations
ctgaaaagtctcgtttccattccattcgatgccgaacagcgaaaagaatttggcgaatcggaaaacactgccccggggcaaacacttcagcagacggaggcaaattcggaggagaaaaatgcgccgtcggcggttgtgccgaagaccgactcggccgatgaccttttgggctgttcctctgcttttgcgaatgaatccgccgatttatgcagcagaaaaccatcggcaattgcaaaagacgaagcggtggaggaaatggcagccgaaaaatattccacggagagaattgccaccctcggagaatcgctgcggcacgcaaaaggacgtgcgacctattacaagcaggaagtgagtttggacagactgtaatgtggcggttgggcattgtttggaatccaaaaccctggctgatacccacttgaccagcgcccatttgtcccaattcgttctaattgattgcctgtggcaatcttgtccatttgtcagtattagaaagatctacaaattggttcggcgcacagtacagtcattgctgttgtgttttgtttcccatatggctcattgggttttgcgtagttttgctttgtctttctcatgggttcggttcccttccgcgtgcgtcgctttgtttgccctcttttggtttccgtgcgaagaaacgtcagctgtcagtctctgaccttcggcttacagtacttactcccttcgcaaattgtccctgcacttttctcgttggccttttctgtcggagatttcctcaaaaaggcctccaataaatgtgcaacattttttttaaattttttcaacatattattttgagattttttattgtttaagtgtgaggaattgctcagaaaggcaatctgtgaccagcagcgcatcgaagcattggagcagaacattttcgagttgacgagcaaatgccattcactgaatgtttgtcaggggatttggcattttcactttcatttgtcttgctttttttcattagccaattttcaggatgctcttgagaccacccaaattaattacgaagcgcaatttcgaggcaaacattaaaaacagacaaatccaacaacactaaatttgttccctttatcagatttacatgagcatttggcagaaaatgaagcaaaaatgacgggccgaagtgatcggacattggcactcaatgggacggaacggagcgtggaaaacggcggagaaagtgcgttttgagacgcatggaaaggggcgaccctaattttttaggcaccacatggaaattatgcaaattttaacaaaatttttcataatttttgaaaaacgcactcatttcccacgaaagtcttacaggtctctcctccccccctccctttccaatgtttttatgggctttataaggcttcgctttttcttcagaaactaccaattgtaagaaaagtgagaaggtccgttcccattggttttcgtcctcgtccaaacagtcgaaggaatgaatgactttccccgtgccgacttctgtgattttcactctttgttaagttcgacttgttaaataacctatgcaacagtggacttagtcgaccgaatcgtcaaaatcagtcgaatcgaatgttaataattaattgtaacgcttgtgccatggaaaacactttttcatctttcgaataaataatgcccatttcattcgaaagtccgaagaagcgaattgtacaaatttatccgggaaacgaagcactggtttatgtacaacacaaattaccatcattagttaattgcgtacactctctttggtcatcgggtggcatttgtacacttagtgatttggcattttgttgtgagtccgatttctggtgcttttctcctccctcattctgccatcggttggtaaaagccggcatttataaaggaaaagcctcggaactcctcttgngcaatcgttttgatcactgcggcttctgtcggcgtcagaatcggctcctcct

SEQ ID NO: 9380 - DNA, 2465 bp, Heterodera glycines
  unsure (1)..(2465): unsure at all n locations
cgagccgacgcagcggatttttcgtcataaactnancaattattctcaaaatggcanttgcttcaaattntatcaatataatagtgctcatttttcggataattagctaatcaattagttaattgccctccctcgcttttgactgacccccttcagaatggagacggcctccctgctcagccacaccgggtaaagcacgtcgtcgtggagtatggcctcgaaaaggtcgtcctcgttgtccgcctcaaacgggggttggcccgccatcatttcgtacatcagaacgccaagggcccaccaatcgacggaaacgccgtattccatttcttggaggatctgggagtgccttggccattttggtgtttgatcattggaaaaatgcctccggcgcgatgtagtcgggcgtgccgcagaaggttgacgtgaggctgtctttggtgatgccctctttgcacatgccgaagtccgccagacgacagtgcccgtcggcatccaacaaaatgttgtcctaaatatggggtgattaggccaatcattcaattagccgcaattgcgcgggactcccaaaaatgtctgctcaaattaaaacattggcaaaataccaatttgaggtcacggtagatgacattgtgccgatggagaaattgcaacgcgcaagtgacctttgaggaagatttgtcaatatggactttcgagaaccgagactctctccccttggcaccctctctctctcttccctctgactctctccccttggcaccctctctctcttccctctgactctctccccttggcaccctctctcttccctccctctgactccctgtcttggcactctcttctccctctcccctctgactctctccccttggcaccctctccctcttccctctgactctctccccttggcaccctctctcttccctccctctgactccctgtcttggcactctcttctccctctcccctctgactctctccccttggcaccctctccctcttccctctgactctctccccttggcaccctctctcttccctccctctgactccctgtcttggcactctcttctcccctctgactctctccccttggcaccctctccctcttccctctgactctctccccttggcaccctctctcttccctccctctgactccctgtcttggcactctcttctccctctcccctctgactctctccccttggcaccctctccctcttccctctgactctctccccttggcaccctctctcttccctccctctgactccctgtcttggcactctcttctccctctcccctctatgttcctttctcgtctctgctgccctctcattttctttctcccttttctccctcatttcccttttcatcccttctctgcccttgctgttgtttctccattttcggtatttaaagcccaagaatggcacctctgccgcatagaatcgtgcccgtggctcttcaaatttcctcgctcgctgaatttggaacatcaaatcgccgccgttcacatattcctgtaatacaacaaaatgccaaatgcatcgaccatttgcatttcagttttaccatcacaaaaaagagtttgtcgggcgtttgaaaggaacagaaaagtgcggtgagaaaaggatgtttggccgccaatgccaaaattctcttctcgcacattgtgcactccacgtcgtcgtcctgcagaatcacgtccttcttcagcactttgactgcgtacacttcgtccgtccctttccgctcggctaacatcacctgaaacagtcgcaaatcaaccgaactaatcgatcggaaccgacacagccaacaatcaatcaataaataaatgtaatcaatcgataggagtaaatcatccaatttaagagtttgacgagtaaatagatcaatcatcggataaaccatcaaataagtcgcgtgccaatcagtaatgttttggctttgcttgtcacttcccatcccattcccacctttccaaatgatcctttgcccagcactttgataaaagtgaaatcggccaatgccgcgcgtccgtccgtgccagagattcccttgggcgaatcgccgccgcgtccttccgagacttcggcagaggcgacgctcgacggcaatcgcgagggggcagtagcggcggaagcggcacttttgggactgctcgtgctcggctcgagcccagcagtgctttcagacaccgacacactcaacggcttccgcttcgctcggctcgacattttgtcgccagtcagtccgagttgggccaactcctcggacagctgaacggaccgaacttggcgagtgttggctgaacacgcaactgaccagcttgaggtttatgccgcagttgttggccacgttccgctggcaccttttgtgcacgttcagcctgcacacagaacactgcagtccctggttgatcagcccgtacagcatcgacccgcaatggtcgcaaa

SEQ ID NO: 9381 - DNA, 1455 bp, Heterodera glycines
ctcatatgaaaggccgattcataccgagaaatgcgaccatttcccccccccccttcccccccccccccccacctgatagtcctcgttccacaccggacttttggtcttgggcctcgtcaccgttttgccaacgtggtactcatcgcagtcgacattcacatacgcatccaccaattggctgtccgggtcgtccgactggttgaatctgaggggttaagggagcgatcaacggatgaagtgattgcgataaatcagagcctttggagtgggagtgatggatgtactatatccctcccccccccccttttagattttcctttttttagaaaaaaaggattggcttttaatcagaatgtttctgaacattttgttcccctttttaccttttcgaccattctgtgggctgaaggtcgcgcgcttcgaccacccgaattttggccgttccgttgaacaaaaccatcgctttttcggcctccgtttggccttttcccccgtcggtccctttgtcctttggccttttgctgttgtgaggtgatcagctgatcaatggaggctaatccccgcattcaatgagcagagaaaaggcgtaagacaacggacgaaagggcggaggaaaagcgacgaaagagcgaaaggaaaggaagcgaaggacgagaggaaatggtgagaatgatcagctaacaaaagacgaagagtcgaaaatcggcggaagaggggaggaggtcgaaatgagacacaatggagaggaagaaagaaagaactgtttgtgatgagttttggaaagggcactcgcgcgggagggaaggctaacaaatgagaaaaagggggggggcaaacgcatttataatgagaggggggggggacattgaggaaagggaaaaaaaggggggacaaacgacggggaaagtgctgcacggacaggcaaagaatgggcaagaaacactcacggagaaaaatgggcaaattattatttgcgaaaatcaatgccccgcgttatgtcaccctccctgctaaaaatttgtcctaaaaatgcttttacaaatttcagaatgacaattcaagagaagaaattgagaaaactgagaaagtgttcgagtcaatggtgcaaaatatgaagagaatgattgggaaaatgatcaaagtggacgattctgactccacagaaattgtccaggttaagatcaaacccatagaagcattttaattttattttcacaaattctgaagaaaccttggattggccaaagatataataaattgttttcttaaaaacagggcacggattttcaaaaaaagattctaaggaagcgattaattcataacgaaaaaaaacaaatcaaagacttcaaagttcacgttctgttcatttccctgcttcatttacctttaaattttaaatctttataaaaaaacatcgaaatttttctttgaaagactaaaaacattttttaaaaa

SEQ ID NO: 9382 - DNA, 3196 bp, Heterodera glycines
  unsure (1)..(3196): unsure at all n locations
cgttctgtccgctcgggtgttgttggattcatttcctccattttgatgattttcaatgaatgccgatggaacgaataataatttacaggtcttcttgccatcccccccnccccctctctctcctctctttttcattctctctctcccatcctcttctctactgatggtcttatgctccacagagtctgcgagatgaaattgccaaactcagcgaacgattggcgctggcggacagagaaaaggcacaggcgggcgaattggggcttcatctgttgagggagaaggagcaattggagctgacccacgaagtctttgctgccctttgcctgctgttattgtcccaatgcttagaatttgctcaaagagttggactctgtcaggacggaattggagcgaacacagaaacaattggcatccattcggtcaaaccaacgccatgcggcggcgaccgaattggaccacgagttgggactgttggaggattcggccaaaatggaggcgcaattcgttgaccgagtgaccgctcttgaaacggaagtgcgccaactgatggaagtcggtggccaaaggcgggggggggggggtaaaggcagcgaaagtaaattacaaatccccggaatgacagtcagaaataccatcccttaaaaaggcttattccttttagcaattgaacattttcaagtcggagtctgaacgattggcctttgaattggaaagtttccaactccgagtcactgagttggagaccgagaaaaggacaatgcgagaagaggtgagccggggaaagcgaaagggacggaaggaaagaaaaactccgccgtttgttaagctcaaagaattgaagcaaagggagcaatttgcgttgaatgaaaacggagagctcgaagaagaaaacgtgtccctccagaagcaggtgctttttggcatttgttttggtcaattcttttgcaaattgtttttaggtgtccagtttgaaatcaacccaaatcgaattcgaatcgatgaaattgcaactcaaaaatctgcttgaggaagtggtcattttgcagacggtggccgacgaggccaacaaggtcagccggggcacggtgttgaccattggtatgacaatgaaaaaccctgtcattttctttattttaaccccttcaactaatttttggttttaatgttccattttcagcttcgatctcttgccgaacgccaagaggcagaagcattggccgccgctcagcaggaaagggaacagcgactggcactgaaaaaggaattcgagcagttgcgcaaccagggccatctgtccacactcaacagcctttacttgggcatcaaaggggcggaccgggacattgtcaaacaggtgaataagggggggggggcaaatggatgggagacacacggaattcccacttttcagttggaaaattcgttcatttccgacaacccaattgaaacgttcgccaatggcaatgcaaagggaccgaaagatttgttttcggaactgaacggcgatttggaagatcggctgaatggtgcacaagcggagaacgaacgactgaaagaggccaaacaaacgcagccaagggtgggcgaagggcaaaagatttcttatttttaaatgaaaatgttttcttattttgtcttcatttacccctccctttatgatgaaaattgcttcagtttttgtccaaatgcttcttccgtttttccatcggttggacctcaatggcaatttcggttggcttcggttttacttcacttttttcatttacattttcagaagagtgtgacgtttccaaactgaaggattacatggttttggcattggaacgttttgacgaacgaatggaactgaaaaaagaagcgaaagagacggagaaacgggagcaacggatgagaggtgagaaacgcgcgttatctgtggaaaaaaaagaaaatttagaagccctcagagaagcgattcttctcgcgggacgaaaggacgcgcatttgaccatcgccaggggaatgatagtcagactgggccagacactgcacactttcttcaccgaactcaacggcacggaggaaggccaacagaaccaaagcgaacgcagacacatcgccaatgggttggccgaccgtctcaacgccgtggcacaacgcattcaaccatttgaaaatgggatgaaaaggtgggcaaaagggaggagcatgagggatagcaaaaaagggagtgaggggggaatacgcgccaaaaatgaaatgttttttattacttttaaatttgcaaatttctcgacacgaaggattttatttttcgtaacattgtctctttcaagccaaatcctgtgttcgttgatgctaaaaatgccaagattttccctctatcttttgccactctcttcccttcttcagactcggttcgcctcctccaaatggcggcggtgagtcgcctcctccgaccgacgtttcgtcattcgtctccgtcgaaacatctgagtccgactcgccacgcgttttgctaccctcgccagaattatgtcggccaatgctttcgcagaatttcctaaaagaattggagggcataaaaattggtgcggatgcgcagaaaggtgagttatggtgccgtgaatacgtaaaaacaataatttgtcagaatttcccagagaaaattgccttttcatttccaatttcccttctctgttgccaatgttgcctttagaaaattttgcgctgaatgaattggtcagtgagggcgacttgcgcgagtgccttttgctcgcggggggcgacgggactgacacggacgactcacagatggcctatgggttggccggagaattgcttaaggcggtgggttgatgacttaagccaattagagatgcgctttgattaaggttcgaaatgaagccgaacagcgcatttcggcgcgcatggcattggaggacaaagacaaagcggacctttaccagaacatcacaaagttgaagtcccaattggccataaaacggttaaacccccacaattgatggtctctctctttgaatgtgtaattcattcagtgaacaagtctcatctctccgttctgttcttcgttccaacaaaagttcgaccgaaagtgtgctccaatgtttgcgggaaaaatttgagtccgaatttcgactgaaagacgaggccaacgaagtcggacagaggcggggggttccagctgccaatg

SEQ ID NO: 9383 - DNA, 3906 bp, Heterodera glycines
ctgcacgctccggaggagttacagcagcaagtcggcaagcggagaatttggaaaggaattgaaatgacatttttaggtggaaagtctgcaggactcattgaaaatggcggaggaagagaagaaaactatcaatcagctgctcagagtccgttgatctttcaatgacataaggaaagtagcatctcaccatcagatgagcatacaacagaaattggcactcactcagcgattggaggagttggagatggacagggaacgacagatgcaacagttgcgcgaaaggggggcgactggggacgcgggggggcacgccaacgcacatcagccacaacagagccaacagccgaagaggacgggccccggaggaggccaacgcagcggtggaggggccacgtaccatcagccgacgacgcgggcagtgcgctacccgggtaaaaaagggggacggagtcagggaacagttcggtaccacccccgcccctcctttttccccggtacgttgtcccctttttaagggtcgtcgtcactgcctaaccatcacaacggcggaccacgggggaagcagtgacagcggaaagaagcagcatttgccttataaaataacatacttaatcactaatggtcggaaaagacgggtcccttaattaaacaaattacaaaattagtcttccaacccatttcccataaccaaaaatttaaaacttgttaaatggtttttgtttctcatattttcatgtgtatttgtcattatttgtttgtccatttttcggaagtaaatttcgttgctttttgtcagtacaattgcagcgacagcgacgcctttgcacttgcgacggtcgtttcgcacgtgcggcgacggctttcgaggcattctttgtgaaaattatggaaaacgagcgaaatgcgcggcccacacagtgcgaatgcttggcgatattcgtcctgggagacacggacacttttgggtagaaaaattcgaaaggcgtagcgaaaaccgatgcgaaaactgaaaattggcaaaagtttggccggtaagggcggagggggggggggatggctaccgttcactcatatggtaatagacgatgggagacactacggtggaactcatggcgagcagaaaaatgacattgagcacaattttgaggcggaggggcgtccatccaacggaaagatcgctggaaacggcgaataactgaacaattggaggattcagcagaaaaagggacgaaaaacgcaccaattcatagggacaccaaagcagcaaaaaggaaaagaccaaaatggcgaagagtttggccatctgaaacgataacaaatgctaattggccaattagcactaattgcgttgcgctttctttgcttcgcccacccttcgctttgccttcagaaatgattccttcggtttattttcgggcgtttgttttttgcacaattcgtgcgcaattcgcccataagtgaaaatgagaatggcaaaaggcaacaaaaattggagaagcacaagcgaagcattgtaactgcgaagggatttgacaattaaaagcaattaaggaatgaataattaatgcgacgcctcacagcaaaaaggcgcccctttttgacggaattacgtcgcaaatcgttcgcgtcgaattgagcacttccctcccacgcaccaaaaaggcattctcgaccgtatctgaacaaatggcaggcactttctgcttcttaaactggtcgtaccataaacgtaaagggcgggtgccccgaagagaagggaaattgtccaaatggcacaaattgttaatgcgcagcagcgattgccattggttcctgaaaaggagtgattggatggagttcatctgcttaatgaatgcattaattgtttagcattcgaattgccaccccaagggcgacgttgcaacgggtaaagaatggcaaagtaactgaagaaaaaagagcgattagctaattgactcaaactaacgaccgatcaatgcttatcgcgaccattgtgaacaccgaagcacaaaactgagcaaagaaagaaatttgcattaaaaacagagaaaagggaattgccggtgttacggcaaacatttggttgaggggacaaagccaatggggcaaaagccaccgattgaacacattgtaaaggccaagaggcaccgtattgaaaacggtgatggacaaatcgctgaaagaggcaaagcggacgaaaagggacgaagtgccaaaggaacttacctaattgccaaattaaacacgagccgattggtcgtacgctgacgcatcacgcgatgacagaggacaatccttggccaaatcaatggacaattaaaatttgaaatcgaaacaattggtcaccaggcaacggtcgaattcactgcgagagcaatcaaagcgagaagaagagtgaaaatggaaaagacaatttggagagcgaagggatagtcgggattggagtcgagagaagcgaacagaaactaagaaaagaaaggggggggggacgggaggagaaatgacgaagacgaagacgcacttgggagttggaacagaccaactgatcgaaggagcaacggttgaaggacagacggagaccgaacgcagcgatcagccgaccgaagtcggcagaaccatcgccggaggggcggacagagacgcgacacccctcaacaaaattactgttcccgacacaaaacgaagcaaaggaaggcgtcgccataactaagcgaagtttgtcattggacaaacaaacgttagccgaagcaggtgtataagctaaaaacggtggatctgacgaaacagagacaattacaactgaagtgggtgggtgaggaaggaattccctccccaattcttagctgtgacattccgaattaaacgaagtgcaatgaatcagtgggacaccttttttctaggaaaagtcacacaaacaaaactcaaaagcaaaacgaaaaagccacattgcttttattcaaattttgtaaaagaaagacttttcctctttagttgacgtccgatgaaatgtgtgaatgttatttggatatgagatgaaaaagtggaaataatggaacaaacaaattcaggtgccatttcggaaaattttggctttttaaaagaactgacgaacacaagaaaaggggcgaatgaaagaaacaatgataagtgagtgagtgggcaatcaaatcaaaacaggcgaaaaatattcggcaatcattcagaatttcggtcccccaaaaaataaatgtttattccgaaagattaccaaatggccgagtatgaaggcaattaaataatcattataagcagcatatttaattattaaattccgtatcagacgatcgtcgctttttgccgccatttcccgagggcccaccaattagcgtgaacccgccaaagtatcccgcggcttcatctgttgcagcgtctgatgagatttgcttctgctgcaatagattctccaatttccttgccgcctgtgcgtggactgaatgcctttgtctgtcgatgctcaccatcgacgcattattttgggtgctgttttggcactgactggtggcacttcgccgaggcaaaggcggcaattggttatccgaagtgaggagagaagaagtctcgaaaagattttgcagagggggagagcccgttttgggaggatcggccgaagaatggacgccgaacggacgttgttgggagtgggcggaagaagaatggaggacatttccacgctgaataaacgtaaaatgataccatacatggaaaggggggacggggcgtcacttcgctttcatcgacgacggacggcgcaatggaaaagcgacgcggcttcatattcggcggcattcccattgtgccgttctgaaggtcgtccaaattctgaggcatttccatcgcatccaaaatcctcctcttaaaggataggaa

SEQ ID NO: 9384 - DNA, 1328 bp, Heterodera glycines
  unsure (1)..(1328): unsure at all n locations
ttcagttataagttgtcagtttattcttaattctatagtaaatccgaaaacatttgcaccattgactttctccggatttaagcccgaatgttgaattttcttgtgattcacctataatttcnagttaataagttgtcagttttattctttaattctataggtaaatcccgaaaacattgcaccatttgacttttctccggattttaagcccgaatgttgaattttcttgtgattcacctataattttcagttaataagttgtcagttttattctttaattctataggtaaatcccgaaaacattgcaccatttgacttttctccggattttaagcccgaatgttgaattttcttgtgattcacctataattttcagttaataagttgtcagttttattctttaattctataggtaaatcccgaaaacattgcaccatttgacttttctccggattttaagcccgaatgttgaattttcttgtgattcacctataattttcagttaataagttgtcagttttattctttaattctataggtaaatcccgaaaacattgcaccatttgacttttctccggattttaagcccgaatgttgaattttcttgtgattcacctataattttcagttaataagttgtcagttttattctttaattctataggtaaatcccgaaaacattgcaccatttgacttttctccggattttaagcccgaatgttgaattttcttgtgattcacctataattttcagttaataagttgtcagttttattctttaattctataggtaaatcccgaaaacattgcaccatttgacttttctccggattttaagcccgaatgttgaattttcttgtgattcacctataattttcagttaataagttgtcagttttattctttaattctataggtaaatcccgaaaacattgcaccatttgacttttctccggattttaagcccgaatgttgaattttcttgtgattcacctataattttcagttaataagttgtcagttttattctttaattctataggtaaatcccgaaaacattgcaccatttgacttttctccggattttaagcccgaatgttgaattttcttgtgattcacctataattttcagttaataagttgtcagttttattctttaattctataggtaaatcccgaaaacattgcaccaattgacttttctccggattttaagcccaaatggttgaattttcttgtgattcacctataattttcagttaataagttgtcagttttattctttattctataggtaaatccccgaaaacattgcaccatttgacttt

SEQ ID NO: 9385 - DNA, 1675 bp, Heterodera glycines
taaataaggaattatttttattaaaaatagataaaaaatcgaatgcattatatttttcagttttttataataaaatacacttttattaatcaaaaacaaattatgaaatgtataataattgaatatttatttaaattgaaatgaaaaaattttgacaaattcaattttaaaagaatagctgaaattctttaattaaaaaataataattaattatgtaaatgaaaatcattattctctaaaaataataaagcaaatttaaaaatttattaattattaataaaactaaaacatttaaatgtattaaatgtaatgaaaattaactcaaaaataatagaaaaataatttacaccgtcagggtccgaacctgcccccccccccctcagaacatgtaccagaatccccaatcacacagggattctgagggcttaacgatgtaataactgaaatctgatttcagatttgtgatcagaaccctaaaatagctctaaagacatgttttgaatattttgggtgaaaaaattttttcactcaaaaatcctggtcacccccctttggtcccgaaaccaaaaatcacttttatttttataacaattcgcaaaaaagagataaaaatgtaaaataaaatttatattatagagaaaaaaattgcggatttttgtagtatattacttttacagaatgacttttcagaagcgagttctgaatttttttctgaaaaatctaaaatttccagaatttctggaataacttctttcatattgaagttagaaaacccaaataaatcccaaaaaattctccttatttttctctatttttaaagctttattatagttaaatcgatgaaaccatcaccgagttatgaattttccaatattagcccaaatttccaagggccaaaaaattgccaaaaaataaagaatttttaaaaaattccaaaaattttgaaacgaaaaataaacatcatattcgtgctcaggaccctaatttaccccagaaaaatatttttcacaccctttttcgaccccaaaaaaatttttgaaaatttctagggggcctagctcgaaaatttttgaaaatttccctacatatagtataccattagatagagcttaaaaagctctacaattttgctctaaggcattttttgtctaaaaccgacgcctgacgagttatgggcccgggactcaaatgtcccgctcaggccaaaatttttttctatttccgggaaaaaatcgaaatttttccgaaaaaaataccagtcgatagagctcgaaaaactatgttttggaagtggtctccgtttctctgggaaaaatcgttaaaaaatcctaaaattcaaaaacccgaaaaccgttttttaggcctaactcgaaaaattttgaaaattttcgaaattttaaaatttcaaaaaatcgagctttgaaagctctacaataagttcgctgaccaccccccgctcagatcaaaccctggcgcggtattcacctggtactgaagtgtactttttgagcacgcttcagttgccattttttgcaggccaggggtttgctcaaaaaaaattttaaaaaataccaccttgtagaggacccttaggcggagtgccctttcagcgggcactttttgattcgagttttacaaaaaaagttaggggccttcaaatgcaaacaaaaggaca

SEQ ID NO: 9386 - DNA, 5392 bp, Heterodera glycines
cgtaaaatcgtggaaaatttgggccgccctttttaccatttacagtaacctacaaaaaatatcttctgacaaacatacaaatatgatcagcgggacacttttgtcaccactcctatgaatatatttttttaatttatcactgttttcagtgactttggggagtgtccgatcacttaaaaaggcgtgatctgatcgagttggtgatgattatccttttttgatcagcaataaatgtaaggaagcatgtgttattggtgtttaactgaatatatatattttttaaaaagtaaattgtcctcataaaaattttttgactaccattaatctcgagaacatttctcgagaaacggctcataataaatattgactttatgtatgtccaaaatttattgaaattatcctttacttttgtattttaaattttttaattttcgggcatattttgtacaaaaccataaatgttatgcgggtagggtttctgctgatttgttcagaataattctcatatccataaattagcgagcttgaaaacaaaccccctgctgggaatactggtttataaacaaatatacttttttttaaataataataattttttttttaaattttttttttggagggtgggtgaaaatacctaaataattaaaatgaaatttgaacttgtttgaaaccgtaaaatttttctttataaagtttcatttaaaaagttctttccatggtctatcgtcaccgccggaccaaattttttaaaaataaaacttaaaataaggaaatttcgctaaaatgtcggaaaaattcttccaaaaaaagttgatgaaaaataggctaaatatataaatgtgagctaaatttttaattaccctcatccaatcgtcgtcgattcttttctgttaaattgcttttcggcattttgatcattttgctaatcgccgcggttggcactcgttgtaattgtccaatctgatcaggcttgatcaccaattcggcgacacaattcatgtgatcatccgttttggtacaattggacaagtcctgaaaactcgaaaacatttaaatccacaattacaaaaatcttccgaaaatttaattcccaattttcaaaaatcctttcaactttgaaaacttcattatatccaaaaagtcgccccaaaaagtttgaaataattgttcattttagcttaagttttgaagcttatcaaaaaaaaaaaagtcaattacaccatgttcatcagaacactctttcatggtgatctgaaaactcgaaaatggcaatgccgatcagggatggacgaaatttcgtttcgttttcgtttcgtcctacattttcggcactttttgagtttcgttttcttacggactaaaaacccggaaaacccttactccgtataagtccgtatgcaggaaaatacggacccgtatacggatcagggttttttgaaaagttttttaatcaataaaaccatattttatgaaatttacgaattggaaactaaatagaatttcataaaaaattgaacgaaatgctattcaaaatcgtaaaaattttgagtttttatcacaaaaaacatttttttccaatttcgtaaaatttttcaataattttttgtccttgatgttcttattttgaaaatttttcggccatacccctgtcctagagccacatccgcttttccacctactatgatcttaattccctcagttagaggatacaattttaaagttcttaattaaaattgaatatatttaaaaattttcggttttttcgtttcgtacgaaatggctattttttcgttttcgtgtttcgttttcgtccgtcaaaattttttcgtttcgtgtttcgttttcggttttcaaaatttcttttttcgtttcgtgtttcgttttcgtgtcgaatgccctttttcgtttcgttttcgtatacgaaaattttttttgtgattttcgcacatccctgatgccgatctcacaaatttccaaaaatcctttcaaaaaccctgtgtaatttttcatcaattccagtgcccattttcccaaaaatccttggtatttaaatttttcgaaaaaccagcttcccaactgcccaaaaaatccattgagtccattttttatgaaaatccgtgccaattttccaagaatttttgatcattcaattctccagtgttacccttatccaattttccctgaactgcttcaacttcttcttcttcttcacctgttcgcccaacagttggagtgtgctcgtgtcgttgtccatccgtgcccaaatggacacgtccctacactcgtcgtccaccaccatttggttgacgctcagctcgcaattgaaaccgctgccattggtcgcctcgcggcacgccaaattttctggcgcaattggcaaaaattgaccattgtgctcttcaaaataaaagcaattaaaagggggaataattaattaaaatattgaaaattaaattaacgaattattttgcattaatcatctcaaagttactaataaaaattaaaatatcagcaaaaaaataaaataattattttataaaacagaaaataattttttgaaaacttatctataatcatttaaaaaaataatagattttataattgaaaatatgttgtttttggtggcgtatgcaattggattagataaatttttaaatgattgatttttgcacttactgatcaccaaattgagcggaacttgtggaacgaacatactgatcaccatgaacacagtgaacctgtgctcaaaaacaggggtcaaaatgcatatgaaaatgaatgagaattgagtttgaaaaacgcgtaaatacgtggccaacaaacattttaatgtgtccagcagacaaaggacaaaatttgtaaattttttctatttctaagaaaatttattgaaatttttttccaattttcgaaaagttgagttcggagctcgtcgccgaagaatttttcttatgcatttttttaagtaattttttacttacgagcaacatttgtacaaaaatggcactttcactgttgaaacctatattttgaaatattaaaattctttcaggagaattttcatcaaaagagcaccgtaccgaattttccagacccaggtcgaaaactcggattcctggggtccattgggtttttccgatgtccgatttctccggttaaccgaaaaaactccattcgggtttacggctggaattttccagacccaagccaataactcgagttctttaggctctaccgggtttttccgatttcgggattcgccggcttcccgaaaaactccatcagttaattttctaaatgaatccgtaattcaaatttgtttaaaagtttgattgttgctctaatttggctctgaattgcctccccccaaattcactcacataaattttcccatttttcccatctccgatttcttctttttttccttccttttcctcccattatttttgtcattttgcttcttcggcttctcctcttccgcaacggattttattattttgtccaattttttcccatttttctttctgcgcgaggggctaaattattattaattgggtgcctaattagtcgtcgtttaattgggctggggcatgggcaacaggcccataaccagcggaagaagaagaaaaggcggggatgcgtgggttggggcgtgcccggaaatgcatcggtggaaaatgtggaaaaagctccaatggaaaaatgcgtcactgctatgcagtagtatttttggaaaatgagatagtgcggtaattagataaaactgtgtttatgttgtatgaatttatgaaataaatacccataaaaaatgctatttttacttccgcggtgccaagaaaatttgaaaaattaaatattaaattgagaaaaatgttttgaggcaaaaaagcctccgatttttttccgattacgggcctggccataagtattaatgtatattttttgcttacattgtttttggctctcgatcactctctgaaaggtatttttattttttaaaattaataatgatatatttctaggatttacatttttaatgctaaaaaaaaacaaaaaaataaaaataaataaattaggttgatcaagtcagaattgtttttggtcgggcctcacaattttattttattttaaaatcctactcaaaaatatgtaaaatttcccctaaaaaatttttaatgaaaagattttttacttttcgatatcatttattttttccaatgaattttgaataagtagagtctcgcgatgtcgtaggcaacgcatgagttcattttttttttgaaattttgcgaaattttatgtatattctaaccctcccataatgtttacttgaatagaatcccaaaaaatatgtttatctaagctattttttaaatttggcatccttattaatcacccttcaatgttttgttggcgttctgccgctgctgctgttgataattagtcacgccaatttgctgcagcaaattgccatttgaattcttcggaatgtttgccggcggattttgaacatttgagaggaagacacttttttcactagtcgaatttacgccatctaatttggaattaatcgatgattaatcacaatttttgtgtttgttaattcacaaagctggcaaaatttgaatttaaaaaatgccaattttttcaaattttattgttaggcaaaacattttcatttctacaaaaaataagaaataaaatataaagtcgattttttcaacaaataaaaaatgtaaaaaaaaaagttttgcaaaaaaataaaaaattgttttttttataaagattttggaagattaattttaatgacttgaataatattgcttcatgcaattaacatacattttatttgactttttattattttttaatacctttaaaaaatgcactcaaaaacaacaccacgaacacctcaatgatttgagtaatcaccaccattttttgctgtaaaaaaaaaattaaaaattttattttaatttttattaatgcgtaaaatatggcctttattatttatgtctaattgagcagcaattttttgttaatatttatgctgttaaatggcaattaattattatatgctgcaatcgatgcgcatgttcaacgtttgtttgtttatatttgctgctgttttttggcgtgagatggcattggcattttaaaagcgccacgtgcccttctccaatccccccccccctcccccctccaaaaaggcaaattaggaatatttggatgagtgcaacggaattccgacttccgacgatttttttttgttgagttggaagcatgatttccgataatgcatgaggttggaaataaaacctttgatgctgatcaaaaaaagtcaattgcacacacaacgtgatcagagaggaatgtgcgtctatgtcgaaaa

SEQ ID NO: 9387 - DNA, 702 bp, Heterodera glycines
cccccccccccctaaaaaatgtatgatcgtcagtaaatttcaattatccaaacgacagaaaatgatggtcctaataaaccaaaagaacatgttttatagtttaggctatctggtattgaaaaaaaaacttaagattgagccctctcccgcctttcggacataggcgcaaatgttggggggtttttgcctccaaaatcgcggtttttggtcttctaatgttcccccattttgaaaatcgcacatctggcagcccttttctgaacaagccctaatccaagttttaattttatccgtctgattttcggctggctctgttcaccaattaatcctaaacccggcaaaccctagctgttgttgcgcgatgaacacatgcgcgcgctacaacggatcagggttgttccgggtcacccgaatcccgacccgatatttttctcgtcccggaacaaccctgcaacggatagacctgtgaaaattgggcggaggccgttttacggactgtgaacaatggaaagtgatgtgaaatgaatccgtgatgctcatgcatacatattttttcactggcaaatgccttccccgcccctctcattttttgttcccatgcacttttattggctcccggacaatcggaccagcagtggacattccgacagtaaaatacacaaaaagataagaaaatgccgtcgccgaagggaactgattgtg

SEQ ID NO: 9388 - DNA, 2031 bp, Heterodera glycines
ccagtgattgaaatgcaggagaatgagtcccagtgattgaatgctgttgggttgagtcccagtgattgaaatgttggtgggttgactcccagtgattgaaatgctggtgggttgagtcccggcgattgaaatgcaggagaattgagtcccagtgattgtaatgctggtgggttgagtcccagtgattgaaatgcaggagaattgagtcccagtgattgaaatgctggtggttcagtcctggtgattcgaatgcaggagaattgagtcccagtgattggaatgctgttgggttgagtcccagtgattgaaatgttggtgggttgactcccagtgattgaaatgctggagaattgagtcccagtgattggaatgctggtgggttgagtgccagtgattgaaatgcagaattgagtcccagtgattggaatgctggtgggttgagtgagttccagtgattggaatgctggtgggttgagtgagttccagtgattggaatgctggtgggttgagtgccagtgattgaaatgttggtgggttgagtgccagtgattgaaatgcaggagaattgagtcccagtgattggaatgctgttgggttgagtcccagtgattgaaatgctggtgggttgagtcccagtgattgaaatgctggtggttcagtcctggtgattcgaatgcaggagaattgagtcccagtgattggaatgctggtgggttgagtcccagtgattgaaatgtaggagaattgagtcccagtgattgaaatgctggtggttcagtcctggtgattcgaatgcaggagaattgagtcccagtgattgaaatgctggtgggttgagtctcggcgattggagaaaaagccaagaaaaggatgcgaggccgcgaagcggccgagccagtcgatttatcattcataatcctataatacaatcgtactacctagcgggggatgcgccgaaggcgctgaccccgctagttttataaaagaaatgtaagctcctacgtgcaaagaactgccatttgttattttgttgctactttatgtatttgaatcgactttatagtatatttgaatttgaaaaaattgaatattgttattttattttattttttccattaacttttcttttatgaaatataaaatattacttgaaacttttttgcattcgcctcttcaggactgaataaaagggtcccaactttctttcgtcatttcttccgtccaaattccatgcataaaaatgtttggccatgaatttctcctcagacatttgttgtcagacggaaagagatggacaaagaaagagcttttgggatttatggcactgctgttgggtcgctcaatggcactttgtgccctctacaaacacttccgaaagagactttttggtggaaggaagggaattggccgaaaagaatgcgtttattcaatcttagtcctttacttcgtttgtttggtgcggtgttttttcgtacaattttaaaaattaaattaataataaaataatatttttttggtactgatgctcattttccaaatttaaaaaacatataaatttatatttttttaaatctaagtttggtgtccattttcttgaaatgaaaaactttctctcggtgtcgcattttcaactagccctttattcggacagtttctttttagaaaaccgttcagattgttaaaaaaaaattgctgcctgtcgcctttcctttggtccttccgttcgtccatccgtcgatgtacggctccgtctctcggccgttgtccccttcctcttccccctgctcttcctcatcctcctcctcatcatcatcctcttccaccttctcttcctcctcttcatcttccttctcttcttcatctttttgtgccatcaatttgttgcggttcaattttcttccgctatttttgctgcttttgcccatcttcacgttgtgccaacattctgtccatcattccgccgcttcctttgtttactcaacggacagcgacggctcgacaaaagccgccgccgcggcatctgcagcggtg

SEQ ID NO: 9389 - DNA, 1320 bp, Heterodera glycines
aaaaacgcacccaattgaattgaccatcgattcgggctccatacgtggcgaatatttggtttggcatgccaatttgtcattgaattctctgtctctcccatagacaattggtgccaatgaatttgccgtcttcaaaggcattccgtacgccgctccgcccgtcggttcgcttcgttttcaagtgctccccccccccccccgctccaatttgcatccattcatttgtcagatgcccgaaccaccggccaaatggcgtggtgtgatgaacgcgtcgcaatatccgccggtattcccttggccattgctcacaaaaattctgatcaatgccactgtgcactctttctctttttttcagatgtgtgcccaacggcctcgcgatcggaaagtcgacccggtgaagctgtacaaaatccacgtgtccgaggactgtctttacctgaatttgttcgccccatcccaggtgatgtcattggcaaatactgtgatttctctactaattgccatcaatcccttctgaatttgccgctttcattgtcagttcactaatgacacttatccggtcatcgtttgggtgcacggcggtcgttttcagtacggctccagcgctgactatccgcagaatgccatcctcaacaatttcgtgtcacgcaaagccatctttgtgtctgtcaattaccgactcggaccaatgggtaaatttcattttttaatcggctatttatccaattctatcgaaacaaataaatttttatattaaataaaaaatttaataaaaaaattaataaatttaataataatttttattatgtttaattgaattttataaaatcgcttataaataattaataatgaatttaatttttcctacaaattacttggccaggatttctctccaccggtgactcagttttgcccggtaatctcggcctttgggatctgatgttatcattgaaatgggttcagatcaatgtaaacattaaagcttcgaatgacgggtttagtcagttttgagtggccaaattggcaaatcttttcaaaaatttaacataatcaccgactgactacgctttttatgcatttgcgttgaattttaccaatgccaacatttgaactcttttaggcccatgtgtttggcggagacccaaacaatgtgatgatggtcagtgagagtctgtcctatggaatatttcgttgttattttactttatttttcatttctgatgggccacgggtccggcgcctccgccgtttcgctgttggcactttcaccgaaagccgagggcaagtcgaaacgaatgaatgaaaagagaacaaaacatt

SEQ ID NO: 9390 - DNA, 2244 bp, Heterodera glycines
acgaaaagaatgtcaatatgaccgatgggctgagtgtgatggtggcggagcaattagtggacaatttaacccaggggttctcgggattcaccaaccatcggctgatccgcgagggcgccatgcacgaatacgtgtggacgagggtggacccgtcgctgaaagtgtcggcgttgaacgagtccattttggaggtgcactcgtttaaattttgaatgccaatttcggaacggagaaattgcctttgggtggcgcggggggaggggggacacagcggcaaaatgatcggcttattttttctaattatttttccaattaattaatgctctcttggagatggattaaatgccctctctctctctcttctgctcggatcggtactgattgtgattagaaagactaatgacgggcatttgtcggttaggcattttattttgtattgcccccctcaaaagataagggttttccgatcggatatattcttggggacacaaagttcaactttatgtcaacgtttcaaattctttggacccaattcgcagatgttttcccacttttggttcgattcgcccgccgcccgtttggccaattattattctcgtcaggcggtgcccgtctttttgtattcgtttgatcacgtcagcgaaaacttcgagacccaaagtgatcacagcgttactttactttgtttttttgcaattgactaaaaaataccactcttttggccttcgacctataaatttacctaaaaggcccaattttgttttatgaaaaatttaggagttttccacggatgtgacgaaatgtttctgttccaattggagcggcgctttctcgagacgcgcaaagaccgaaattggcaattggacaaacgggtgaccgaactgtttgccgaaatggtggtcaactttctcaaatacgagttcggcactcccagccgccccccccccctccaaaatcgttcatttttagtgaccccactcccgaattgggccgtttcccattcaattggacttcgtccacctcttcaaagttggactttctgtccatcaccgactctcccacaatgaacgtcggcttccgatggcaggcccacgtattctggaacaaatatggtcattcattttgctattttttgcaattgacagtttgcttactgtaatttgtaatacaatatccattctccgttcaaatggcactttatcttttgtttcagtcgaacatttggactccgtcgatgtgggaaatttgcaaaagatcgcttatttggacaagcaactgggcgattatcaggtgcaaaaatgcttatggcacaaatgagacgacggccaatcggaaaaatgccgaaaaagtcgtaaaagcaacagaacactaaacataggcagaacctattgatatgtacatttgtatcttttttatgatcactgattagagggtacgaaggtgtgggttgtttttatagctcacaattttgcgtttttgcgcaaccaaaaccaattgtgtccctcctccgccgccgctaatgcttttcggtcggttattccactgatcagtgatcactgatcagtacagcatcccttttttccgggtttgagtgggttttctttttatcatgccaataaatgataagggcacgtcccatccatttgtgccgtgccattttctgctcccattttcagttggccacttggatgcttctgttctgttcacttttcttcttcgccatactcgtcggcttggcctgctattgcactcggaaggaaactgacgaggacgaactttgatctttgttcttttttcgtcctttttgccccctccgtttttcttttttgtattttttgccgctttttctcattctttccaatttcaatgtctttcgctttctttttcatattcactgccttttttgagtgtgtatgtcattttataataaacagcgaattatcgcattttgttcatcatttgtccgtcgtccagcccattctttgaactttcgaaaaataatttgtttgcaatatgaaaatcattgaaacgactttctatcgccccgggggaatgtcttggcattctgccaacctttgtctccattctctcacctctcacgcttttatcttagctctgcttcttcacacactcaaacacccactcagccagcatctgttgccttctcaagcggctgtcagcccccggccggggtggtgagggaggtcggttgtcgtgtcccgtggttgggcgccggtgggaggg

SEQ ID NO: 9391 - DNA, 3331 bp, Heterodera glycines
tcttcactttctgttcctcttccactttctcttccccttttctgttcctcttccactttctcttcctcccgtaccccctttaaaaacttggacccggacccggcttttctggacccggaaatatccggacccggttttgcccaaatacccggattcgtctaaccctaaaattaactcattttgagatttataaattatttaaatatttattaatatttgtttatttttaatttttattcgattaattttaatatttaatttagactttattattctattaattaaaaatatttattattttattaattcaaaaaatcattatcattaatttaaaataccataaagttaattaattaaaaaaataaatttaaaaaaacaaaaattagaataatttcaatataatatttgctttaaaataatcagaagaaatgggactctaacccatggcaagccagcaccaaaggaaggcacactaaccacttgaccaccggatcgcttgcctccttttaatttccttttcactttccttcttttttggcataaaatatttataattttatgtttaggtaacttattaatttgtctccatttttaaatgattttgcacaaaaaaggtcaaacaatagatttttgggctaaattagaaagaaagaattattatttttaatatttaaaataaattatttttaataaacttaattaattttaaaaaaataaaatcattcaaaaaatttaataaaataatggatgaaaacacccagaataggtgggacccgaaccgtcgaccaccaccaccaaaggcaaaaactaaaaatttatgctattaaaacagcaataatttagttggaaatatttattgaataaaagtaggagcagtaaaaaactgatgatgtaaatggaaacaattgataatgaactggggaaagaaaaggaggagacattttttgcttattgaaaaggggaggttaaagaccactggcgagcgtgcattacatataaaaaaaggaaagaaaggaaagtaatcaatttttattcaaaagtactttgctccatattttttattatgcctttctttctcttttaactcactcataaaattcttataagaaaaacattaaaaacaaattttaaaacgaataatttatatataatatttgacgggaaaatccaataaattaatgagactcgaacccacaacacgccatgaccaagggcaagcacactaaccacttgaccactgggccgcttgccaccacgcattttaatgcccttttcccttcctttcttttattgcaaaaagctcgaccaaaagtgcataattttatttttctttataaaatatttagattttatttttttttaatgttatttttgtatttatttaatattcaagttattttaaatttaattttaaaaaattattattttataaataaaaaaaaattattattttattttaataaatttaattaattaaaaaaacaaaaaaataaatctaaaaaaaaatgaagtatttaaactaaatattgaatagaaaacaaacatcagaaatgggactcgaaccctcagccatcacagaaccaaagtcaggcacactaaccacttgaccactgggtcgcttgtctgcatcctttttaattcccttttccttttccttcttttttggaagaaatcccgatcaaaggtgcttgaaatccctttttagagcatttcccggacccggacccaaacaaccctggtatcattcgaaagccaagagtttgtagatcatgcgaaattgtttcattttttgatttgaccacttttaaggcatgcaaaaagcgttcaaaaataggacaaccaaaaaaagtgcaaattttgactcgttttccgaacgcagttcgaacaattcttaaccaattgggatgccgatagtttttccttatagccagtccaaaaccctatcgaatgataccactcccgacccgtaacattcggtagaaagtcttaaattagtttttaagcttgaaactggggtatattattcttatatagggaataatgaatttgtggaccgaagtaaagaataagcttatgtttgtttctcatcattcggctcattttatcttttaaatttccaaattaattaaaatttaagtcggcgagtcggcccgcaaccgttttggccgcccttacatttcgggacggccgctgctgttgtgcgaccggcagaaaatcatcaaaatgtaccgggagggacgccgaaagattgcaatcgcacgcgaaattggcgtcacacattcatgcgtttccaaagtgatcagaaggtaagtgagtgatcggagatgaccacggaagagaaaagacggccaattgagacggattcccgcagatttgaagagaccgggatgttggagagcaaaaactcgcggaccgcctcttgcgcatgccccggcgacgcggaagggcacggtgagcgattaaaggcaaattgggaattggcatttgcattaagccagctttttatctgcacattttttgtccttccttctttgattaaatttttttccgtcccttcgatttttacaaattttactgttttaatccatttttttaaaccaaataaatccccgcttagacccgcgcatttgtcggcacgcccgcttcgtccatttcgccgcttcgtcctcctccacccaattgccttcgtacgaaatgaataaaatggcacccaacagaaaaccaatcattcgaagcgatttgccgaagaagttcagcatcgaatggtttttgatcacttgaattgcttagtaattaataacttattaactcaattaatttggcttattaaacgttaaattctttttttaggattctcagtgatcattgagcacctaccgtaagcattggtccatcatattgtattttttgtctcaatttattatttattgcttatcttttggaactttaataaataaaatatgaaactattccaatttggattccattatgaaaattttttttgcatttcaaattttaaaaaccaaaaatattatactgaaatagtagcacattgtttttctgttgtttgaatagcttttaattcagcagttggagaagtaaagccctttcgtcgttctaataaatcctcaatatttaaataattttgctaattaaccaattcgttgactaattatcatctgccaatttttcgaaatgtcttcgaaaggcgcaaaaaaatatttttatttaattgctttactcccaattttatgtttgcagctttttctttccgccaatggtaaatttgttcgttggttttttggctaataattctttaataggcctattt

SEQ ID NO: 9392 - DNA, 2341 bp, Heterodera glycines
  unsure (1)..(2341): unsure at all n locations
aaagtaggagcagtaaaanctgatgtaatggaatcattgataatgactgggaagaaaggaggagcatttttgcttatgaaaggggaggttaaagcccactggcgagcgtgcattacatataaaaaaggaaagaaaggaaagtaatcaatttttattcaaaagtactttgctccatattttttattatgcctttctttctcttttaactcactcataaaattcttataaaaaacattaaaaacaaattttaaaacgaataatttatatataatatttgacgggaaaatcccataaattattgggactcgaacccacaaccaccccatgacaaaggcaagcacactaaccacttgaccaccgggtcgcttgcccctccccgtttaattcccttttccttttccttcctttttggaagaaatcccgatcaaaggtgcttgagctccctttttagggcacttcccggacccggacccaaacaattttggtatcattcgaaagcccagactttgtagactgaggcaaattgtttcgattttcgatttgactatttttaaggtatgcaaaaaacgttcaaaaatggaacatctcaaaaaagtgcaaattttgactcgtttttcgaacacagttcgaacaattcttaaccgattgggatgccgatagtttttccttatagcccttaaaattccacgtcgattgaccccactcgcgccccgtaacactcgctagaaaggcttaaattagtttttaagcttggatcatgggtagattcttcttatatagggaaccagggccctgcgggccctgtgaaagcgccgggggcgctttcaactctggctctagtgggagatataatttggggcgtgcaaaaagcatctattggccgctaagcgatcctcatagtttaggaatatgagaatttggaaatgaacaaataattaatttaaaaacgatattgttttaaatttaatttaaatgcgatatttttatttatatgctttctcttccactttctgttcctcttccactttctgttgctcttcttctcttccgctttctgttcctcttccatttgctgttccccttttccttcctctttccttcctctttctcgttctcttccactttctgtttctctttcactttctgttcctcttccactttcttttccactttctgttcctcttacactttctgttcctcttccactttcttttccactttctgttcctcttacaatttctgttcctcttacactttctcttccacgttctgtttctcttccatttgctgttccccttttccttcctctttccttcctctttctcgttctcttccactttctgtttctctttcactttctgttcctcttccactttcttttccactttctgttcctcttacaatttctgttcctcttacactttctcttccacgttctgtttctcttccatttgctgttccccttttccttcctctttccttcctctttctcgttctcttccactttctgtttctctttcactttctgtttctcttccactttctcttccactttctgtttctcttccactttctgtttctcttccactttctgtttctctttcactttctgttcctcttccactttctcttccactttctggtcctcttccactttctgttctcccgtacccggtttaaaaacttggattcggttattttacccgaagtttccgtaaaaatacacccctaaagattgagttttcaatgtgaaaatgcacccttagagatgggcttttgataaacttaaattaatatatatttattaattttgtgttttcatttttttgtttacacgcatggtcgagtggtagtgctctttgctcttttcattatgtttctttggatcagttcccatccaagtactttcttttcttctaatttttcaaaattattcttttttcgacggaaatttaatataaatttaacaattaaaatcgcaaaatcttttcatttttgaactaaatctgtcactaaaatttcaaatttttcccgtcggcgcctatcggcaccgccggagttccaaaattccctttattttttaaattgactcaaaaactgtgagtattctaagaattataaaaatttagaaaatacattgttaaaaaaaaatcattatatttatttatcgaaaggggttgttggttggtctatttgatatttaaccgaaattttgtgatgaaaaattttttggaattaaaaaaaaaattttgaaaaaacttcggcttcggcttcgaaaacttcgggttttttgggcttcgagcttcggacttcggcttcaaataaaaattgggcttcgcct

SEQ ID NO: 9393 - DNA, 3943 bp, Heterodera glycines
ttttccgaaaaaatttcagcccggattttgagacatatgcctataattttttttttgctaacttgctatggcctaatacgcacgaaaaacgagtttttaatgatgtaagagacttttttgatcattatcaaaagttatataaataggaattttttcagaattttgggtaagctgtgaaatagtttttcaagtttgagtcaagactttttccgaccctttttttggtttcgcgccgaaacgacccttgcgccgaaacgacactgcgccgaaacggctgcgccgaaacggttgcgccgaaacggtcgcgccgaaacggttgcgccgaaacgatacagactcttctctatttcacttgagaaaggagtattccaacgtttgaatctttttcttttgtttcttatgttttgatcaaacgaatttttctcatttttcattaattccttaaattgttcctcaattattgcaaatccttgcgcactaacacgcaatctttcaccacatgactctaccttttttgaattttgatcaaaaactaaagcccgattgttatcatttgacatccaaatacctgggacataagtgccattgatttttgcttcccttttataaacacaagttttttcatcaaaaagatttttaatgtttttcttaatctcccataaaagataaacaccattttctaactggcattgtccatctgagtatttacaattctttgtatcatctgctggtgaatgtattatgtctgaccctggggttccaaacaaagtgatttttgacaaaaaacaattttcggactcggttttttggaacccaattttccaccatgattgttcaatgattaattttttgttggtgtgtttttggccaatttctcctgacaaaacaccaaactcacattttttgtaaattgccatttgatgacaatcttcaaaagtggttggtaaaagaatttgatcagggatttcttcaattttgtacccaaataaatcagttctgtatttttgtgtttgtctagtttttatgcatctccaggcctcaaattgaaaattatctgggtttggccgaaataaatctagcattaaagctcgggtgggttgttcaagaaatctactgatttttccgcacgaagaggtgtcccttttgaattggaccaattttgtttgggctctattatggcaaatcattggttgggtggctacacagaaatttattatattgataatcattaaagcgttgaagaaatatttttgtgaattaagaacccattttcttgacttactcgcactgtccattggtgtgtttgcctcttgtccttggactaattcctgatcagatattaaaattctgttcaaattcaatttttcttcgataatttcgtcattttcctttccttttattgcttctaacagcttttttgggttttgaataccgaattttaatttttcccaagttgcatgaaaagcatttttgattttgctaaatccattttgtgtcacactccttgcgacattgaaagcaccaaacggctctaaaatgaataaatgcattttcatttcctgagcacttttctcccaaaaatcgatttttccttctttcatattcaatcggctctcttcaaaattgatttttgtataaaattcaaaaaatccaatgagcagtgatgaaatgctctgggaattggttgtctcccaaataagtttttgtttcagtatttcaaaaatttgtttctttgtgtatgtgatatttcgaatttcaaaaatttctggtaaaattttgattaaatttggtaaaacgggattaggaatttttatcaaataaaaaattaggagcgatgtccaaccataagaatttaaggtgccgcctccattagcactttgatgaatttcaaaatagtcagcccattccaaaatggcaaaatataaagttttaaatcgtgcatccaactgcacataacatgccaaccatttagaattaattaatccaatcaagttattgcaactaatttgagcattaatttcttggtcatcagaatcaattgtgatttccaaaatagagacatttcgggaagggattatcagagtccgggttaatgccattcccgattctcttaactttttccgcaatttgtcaaaaaattggcaactgtcgttttttgtccaatcattcggtattccttttgagtttatcataactaaatccaaatcactttcttttcttccaaggccattgtatatgctcccttggataaatacattcatgtcccaattttctttgacaacttctttaatccgagtacattgtctcaaaatattttcagttttgaaaacagagattttcctgtcgttttcaatctttttcaaaatttggtctaaatctttttcatttatttgatttgtgggccttttttggtttaccgtacccattgggttaagtttttggcgaatgtcttctaacagacgaccgcacatatttttgcctttaaatccttggtccatgtttgaaaaaattagctgtctttctctaatgtcaattccgatgccccagctaagattgactgaggcttcatataatggaagctttccagtttccaacaacatttgaccaaatttttcgttttgtgtgaattttgcccataaaatagggcgaatgacaccttctcgaactctattccattcatactgatcaaaagatttgggattttcttcaagcgacttatattggtccatgtctttgtctgtaaattttttgaattcactgggttctgtgatcccatttttgaatttgatcatttttgccaaattaaaataaccaaaatacgaggccttttcaaagcaatatttttgttccacattatcccatttaaagccatccatcataaaagaagacggatgaaaattggaaaaaacaaaatttttcccgaaaaagaaagctccttttttgcctgaaggtgaacttaaaacaattggtttccaatgtggctgataaatttccttattttcatttttgaaaaatgttttgacgtccaacggttctgtttttgtagtttcacattttgagtttacccaaaattttgttcgttttgtgcacaaagggccttcaaaaatgtcttcatattcataatttgattctggagattgagactttcgttttactcccaataccacaaagggatcaaaattttctgattggatttttccaaaattttcaccttttttcggcatttccggagttgggaagaacattttagtagttgttggcaaatatgatgaaaaatgtgtcggcacaaatgaattgtgtgaatggcttcccgcggccttctctctgcgtccattccccaattggttccaattcactttctgtgcgtttgttgccactgtctcgtgccatttttgttcgccccttttctcaattggcattccaatttgctccaacttcgttaataaattgttgatattttcttcttccggtactcgaacaattgccggaaaccttttcttcataacatgaattggcactcctttggggacaacccaaatgcatagcagttcgtaacatatttcttcaacttttgttagaactgccaacagttcagcgtccatggtttctctccatatcactatgcattgagtaattgtgccaatttcgatttctgtgccaattgtgttgttgtcccactttctcgggcgaaaaaccattgctttcatttttctttttctcatgatttgcctcagttcgatttccacttgattatccacaataaacaccaaaattgaccgtgccaccacttttggaatgttttctgacacataattccaagctttttgttttttagaatccaccaacagatcctcaggaatttggaattttttggttttttcctctaacgtatttttttgaaaattttgttgatcctctaacgaatcttttccaaaattttgtt

SEQ ID NO: 9394 - DNA, 5477 bp, Heterodera glycines
  unsure (1)..(5477): unsure at all n locations
ttgtgccgcgaagcttgcattacncatcgcgttattcttttccgatttataaattcgatctgattttttcaatgatctgggtttaggagaccgcccaaaaagactcgcattttaaaaatttgaaaaaatttacggaaatatttttgtctgccattaccaattaatcaaaaaccatgcttttcaaattttaacgcaaattttaacgcaatttttaaaatgtttttcttctttcctcttacagttattactgtgagaaattgggcaccggattttggcgagtggccgagtccattttgccggttacgatgaatctcacgcaaaactcggccaaagtgatggccacctcgggccaaatttgcaacttttacatcaccaaagtttgctcacaaattgcttaccgccccaatgtttggccatgccataattttccgtcattcagaacattcagcacccaaaagtactgtcaatcattgtgagtcaggccaactcgaaggcgaaggagatcagacggtttgtttacaaaagcaaaaattttaaaaaatattttaaatatatatttttttcaattttaggacgacaatttcgatggttcagacgataatcgctgggtgggacgtgtccattctcgacaagcattttcctgaactgctgcaatgcgtcaagttggcgctctgcgacgcggactcggaggtgcgggcgacggcgcggcaaacgttcgaaagtctgcaagcgttttacccggccaaagcggacatgcttttccaggtgggcgagcacttaggggacacaacgattggtgccatgggccaacccttataattagctgtagtggaacccttaaaaaaccaaaattcctcggctttcaaaccgacagaagttccattttaaaggagttggagccggccaagcagcgccttctcgtcggctcaagcaccgcatcatcaacgcattcggtcaattctgaacgggacaatcttccaaatccgaaccgcggcctttacaatgcacagaatggttggtttggtttttcgcattgattcgtccgaatatttcatttttatttcacattaagccttcttcaacaaacgctctgcgagtgatttgaaccattccgttcgtcggctgaacctcgccttgccaaaggtggtccatcgtccgaatgtcgtccgctgcggcaaaccgccgcgtacgctttggcactcatttgttttgttatggccatgcaatcccttttttgctttttgtagagccggccacacaatccgctttgcgaccggcttatccccatcatcctccgtccgccgccgccggaacaccggtggcacggaagattggcccgtcgtcgatgggcggaggagcggcgaacaaattgcaaaagtccatcagcacaacggacgcaaaatcaacagcatcgcaatcgcaacgtaaacacatacaattagtcaaaaaaaagagaaaaatgtccggatcaggttgattcccccagcgttgccgcccccctcccgaaaacaaataaatttatctgaaatttttcaaacaaaaaatcttataaaaagttttttgaaaaaagtactgcgattttttcaaaattttagaatgatctactaattttttcaaaaaacttcttaaaaatcgctgaaagtgaaatttcttattaaaaaatttgctaactaacaataaatgaaaaatttttcagggggaagggtgaaatgaagtgctgccaaatctgtcatggaataatttcccgttatattctaaagtaaaattaaatggagggggcgggagggttttgccgaattttcaaatttttactatattataattattgagagaactaaaaagtcggcacatttttcctccccggtacattcttccaacaatgccgttttgtcatttttaagccggcagtcggagttcgtcgccaggccgcgctcgtcacccgcctccacgaccgcctcctgtcgctgctgctgctgctgccgctgcccatcacgcgccgattgcggccgcgcgaaagctgcagaacggacgcgaccaccacgacattggcaatacgccaggcaattttttgttttaaaaatcctagcaattttaaataacgaaattattttagtaaaatcggccgcttcacatggacaaccaattcacaaagactttgttcgtgctttggtcgtacatttttcgattcctttctcttctgatttcgctcctttagaaaaacgtggacactcaggcgagggatgtccgaccaaatgacatacggttggtcatttttggtttatttgggccatttattcctggacatatttcaattaagaaatgatgatctgcccgcagcaaatgtccgttctccgccgaccgtgcaaccttcgcatcattttgcacgtaattctttgtcaaatatgccaatttgattaatttaggatgggataatcttatgcaatttgggttaatgtcttgaaatgggatcactgttcatcggattcattaccacttctgcgttcgaaaaattttaacgattttaaaccggtttttttaaaaaactttcatagctcattaaaaaggaaaatcgcttgaaatttttttttggaaactttgtacatccatcgaagtcccatccgccattttcagcccgccccagcggcagtccgtccaccgatttctacggactctcacaacggcaggaggcggtgctgcagcggatcagttccgaggagcacaacacatcgggcggcagtgtggggccgtttccgcgaaagtcgtcggccaacaattcgttcgtcagcgacaacaagcgcaacctgtctatgcgcgacagtgggggcaacactcttcagaatggccaacataaggcgagcgttttaaacggattgtcagtctgtcacactgcaatttatgtcgaaattcgttttataattaccagtttttagaaatgttttcccatcttttggtatattttgatatttaccgaggtccgaagggtgcacttataaaaaaatttttatgatcggcgggtgggaaacgaattgctccgaggttcgaatgctttttacgagtccattttactctgtttttcatttcttagcctatttactttgacttttttaatttatataagacaccaatttgcagtggtccttcctgagctccgaacagttggccaatgaccacgagcagcaaattgcattcatccaggaaatatgtgacacaattggggccaatgcagtgacgtaatattcacattttgtttcgttttttaatttgtcaaaatttagcaatgaaaaggaaattgaggaggctcttcaagtgttgtcgcgaatggtaaggaaaagcaacatttgtaagcattcacaatcacttctctgttttttaagatccgcgaaggagggattacgctgtggaacgattattttaacacaattttcttcgccatccaacagatcatttctcaagatttggagcgtcactttaacatcatcaaaatctcggcacttaaaacactcaaagagttgtggtgagttggcatttgttgagggggggggggtgattaattagggaccatttgccaaaccaattatgaatcatttcattaggcactcaattaaattaagagaggcggcatttctttttctatcccttttttcagcttggtccagccgaagcgtttggttgccaaaactgaacttttggtgatgatcattctgaatgcgcacgaatgtgaggatgccaccgtggtcagagcgggtaattctcacagtgatttgtccacttttttggtacaacggctcggcatatccgaactctgccccccccccccccgaaaattaaaaaatcaaataaattaggcgaaacgtatttgcttttccgttttgatgccgtaccccattatcctcaaatgcagactttgtgtcgcttataattctctcgccagagaaatttgcataaatatgaatgcgtcaaacgtttgataaaaaaacggggtgtgccaccaaaacgtaaaagtaccgaaacgtaatgcacccattcgtagattggtcaatttcgtattatgattgcatgcgttgattacatttgttccccatctccgttcttcagccgaggattgcggtgctgcggttgccaaccatttgccgaccaacacgtgcatgcaccttttgctgaccgtcatcgacgacaaacacagcaaataccaccaactgtcgggagcgatcaaaatgcttggaagtatgctctccaaactgccgccagaagaagtgagagagggaaacaaagaattgtttattcgtttcattttaacacatatttcaggtggttgaactgctccccaccgttgtgcctcggatgactcaggtaaaaaagaagcaaattggacacaaaaggagcaagcacttcatttaccccacgaaatttttatttttattttcaaaaagattctaaaaagttatgaaattttcagtcacggaattttctttaattttttctttttttgaagaatttctaagtgtatattttttaaaagttttttggatcgggaggggtggaaacgaccggctctgacaaaaaagtaccagcaaaaaaaggggggaggccgaatgggtggaattgccagaagagcatataaccaaccagtggcaaatgtttttcccattttctacaattttttcttcattttaatttattttggaaacggaaaactcatttacacttcccatttgatttttatgtgaataattcgttgattttcctccaaatgctctctcagtgctacgacaattcccagtcgatggtccgacgttcggccatcatttgtttggtttccatcagtcattcgattgggttgaatgtgttaaagccacacctaaacgcagcgacggttcgtttttagggttggggttaaatgagtttctattttaattttatttttgattgtgtccgttgttgttaagcttaaacttgtggacgtgtaccgcgaaagaatgcttaagcgatcggacggcggtgcgaacgcatgagaagcgaatgaatggataacaaacgaataatccgaacacagcaaaaccgtccaatcaaatcacttaccaaaagcacccaaaatatatttattttcccaattgcttttcctttttcttacgttgtgttgtattaattcaattcttgcattattttattttttggtgggaatgtccgttgattgtgagccgtgctcttcataatgataatgaccatcatttgtcttcactgttttgtctggttgaataaattttggaccaaagtgaataatagggggggggggtattttgctccgaatttaattattaaattgtccaacccaaaacactcactgctaatcccttgaaaatgtgccaattcggttcggggaatgtcgaatttttaatgcacaattatgttcaaacttttattttgacaaaaacaattttttgacaatactggagaattggtgttccggcggaaaataa

SEQ ID NO: 9395 - DNA, 3629 bp, Heterodera glycines
tgagcacaaaacctgaaagaagggtttgccttgggctcttcctcagaggctgttttctggctgccgcttgagatggcgctgatcgcctcatccgagatcgatttataagattgcagggcattgggcggtcatttcggttaaaaaaagaatgccgtgtcaatgagggtcaaaattacattcttcccgcttgcattgggctctgttttgaatttttcgtatgcattgggctctgttttgaaccactgagctgacaatgaggccatggaaatgtagcagtaaaaatttgccgctgagctctgtctccggcggaccgatctcatccatgttgcgaacttttctcattttcttttttttatataaattgtaaatgaaattcgttttcagtaagcgtcgtcgctctcgcagtcgttcgccattgcctcgtcggtcgcgcactcgctcaccaccgcggcgctcgcgttcccgttcgcgttcacctcgacgccgcgacgatgacagtcgttcacgttctcgctcgcctctgcgccgttctcgctcgcgcagtctgtcccgttcgcgttcaccacgtgactgacagagtgaacagccaacgaattggagagaaaagtcgaatgatgaatattttcgattacaaaccactttatattattgtttgcatcattcgaatgcattcatttccgtggtttcctttaattgtggacatacatttttaatgaattaaacgaaaatgaatcagcgcaaccgaaaagtcgcatttaaatttctttgttgatgtattttatgtttcaattaggccgtgccttagtcgggtagaaatggtttcgaactgatgaagacggtacttgtctgatttcgttgggtttcgaaatggttaattggtgctgcttcaaattttggttttgctttcgacttttgcttgcttccatcgcgcacttcaattggtagaaaaattcctcaatttttgataagacgaccaattgatgagtttttttaggtttgccgccatttatgtcaattgcattttctttacattggtctgttttttgttagtgaccggtattattttgcacttcagtggaaatcttatgacattttgtggttttggactcatttggctctttgtgtttgttttcctgcgcttcgaccgaacaataatttaattgtcttcgtcaaattggttagagcaaaatgcacggatcactccagcaaaaacggggttttgaagggcaaatttggagtggacaacaaaccgatcaaaatcacagatttggagaaggctcgcgcaaaaaaggaggaaagtgagcagaaacttatggagaaaaaggagcggagagaacgaaagaagcgacaaatggccgaattaagggaaagagcgcggattgaaagacggtgagcgaaaaggagggggaaaaggcgggcccaaagtggtaatttaaattagggatttaaatacattaaatgaatcacagacatattgcaaataggtcggaatttgaaaattttttcttagccgtaaaaactttgctggtgccgttgatttgctgctcacttattgtcgtctgatcacttctttcgccgttttggtcggcaacattcacaaaacgttcattccccgctatttggcccctccgctggagaatgtctacgacagtcccgaccttttgatgtttttcacgtaggcgaaaatcttggattattcggaatttaaaattttctttctaaagcataacacttctcatcgacgtcggctttttctggttgctcgtcttttggaggtgctaattacttttcaccctcttaattggtgtctctctctttttcagctattgtcagcagatggccctctgttgtcggctcggcttttgccgttttttgctttggtgcgttgctttggtttttgttggcggtggactgatgctttatccaatgcattttgttcatgaacaattgggtctgttgctcatcctttagtgggtttcgttattttttgcccattttcttcagatgggacgtggtgcgaatttgccgagggggaacccttaagcgaatattttgatggataattttactaatttttgccatttttaatgcccattgcttctttttttttctcatattgtacgtagtcaagtcaagttgccctcctttaactttcctaatttgtgattttcacaatgatttgttcagctcatttgccctttcgcgctgcttttgcctttttaattgtgctagtcaacctcactaaaaacttaatttagtcttccattagcttgccatttacacattttttgctttgattttcaatcccggtaaagttttatgtattctcttttgaaaaaatcggcatttttttttgtctgttgtatactttcattaaaaaaatgattaatttatttaatcttatgttcgagatggcttcttcagtaaatggaactgaatctccaacatcggtgagaagaaataattgggaatcggacggtgaagagggcgacaattggaatgttttggcacgaacggaagccgaagaccggcaatggcgtaggtcggtggtccatttgctgaacaatgggtcgatgtggtgttggcttttaccttggctttcccttcagtcgtcgggaggagcgcgaacggctcggggcggtcggagtacggcacatttggggctattcgccaactcacaacgaattggagcgagtgtttgaggaacatcgaatcgcagaacgaatgctcaaggaggagctgaagcgggacgtgatttcggaaaagaatagaagtgagaagaaaaggaagcgaaaggaagcgagggaagagcaaaataatcagtccacgaaagaggaaacatccgacgagacgacggaagagtcatcgaaggacagcgaatcgtcggaagacaaaaagcgaaaacggaagaggggcagaaaagagagggggaagaagaggaaggaggaaagcaagcggagaaagaagcacaaaaagtcaaagagaaagcgaaagagcagcacaacgaggtgagagagcgaaaagggagggatcggtgacatcaaaggggtaattaatggacagagaaaggggttatcagagggaggcgatatttagcataattgaaagataccacctaaaagtgttgaagggattcctctcctcttttagcgggtcttctgacgaaacttcaaagggtggaggaaaaggcgacgaatgggtcgaattcacaaaggaaatgcaagtgaagaagagcaagaaagaggaggcagcgatgattggcccccaaattcccgaagatttgctgcagaaactcaacccgacgatggcacccgaaatgaaattggacgcgaggtgaaaatggagcgcaagttcaaccaaacattgctgttcagtgcccgtaaccatatgttgcgcggggaggccgcagcgatggccgcgtacgcggcgcaaggaaagcgcattccgcgccgtggtgaaattggactgtcttccaatgaaatctccacgttcgaatcggtcggttaccgtatgagcggaacgcggcaccaagccatggaaagcgactcggctggaggaaggaagaccaaattctgactgcggaggagaagcgattgctcagcacggtcactgacgaacagcggacgagg

SEQ ID NO: 9396 - DNA, 3570 bp, Heterodera glycines
  unsure (1)..(3570): unsure at all n locations
tttcgcgccgatttcagcgggaacattcgatgcccttttgacggcactgttcgtcggcncaacggagtgcctaaattaaaaaaattaattaattgtaattttaaatatttattttaccgcattccaaatttcgatttcactaattttcagctgatcactttcgagaataatacataacaaatcttgattaatttgcaaaaaggcttttgatttgatcaaagcactaatattttgatcaatgtaacgcaaacagcggagagcaaaatcctaaaataaaataaatataatcatttagggattcatttttttaggcaagtgccgaaaattactgcttacttattacgctcagataaacaagcaaagggctttccgcttggtttgggtgtttacgattatgacttttataatgcttatttgtgttattggctcagtacttgatcctttcctacccgggctctaattattaatcacattgtctttttttctcagcaaaacatcaaagtctcattaatttgcgcttatatgttactaataattaaaattctttcttcacctccatcttcagcaacaaagcctgttcaaaagccacaaaaacatttggcaacttttgaattgaaaatttggcacattcttttaccaggccactgatgttatatttgtgtgctataattaaaattccaatttatttaaaattcaattaataaattttcaccagcttttaaaacttccaacaaattattggcatccaatccatcaaaactcttcgtataaataaatcttagcatcgttttgaacgcgccaatttcaatgtcggggatctcaatttgaccttcattgtaacggaacattgcttcaaatacatcggaagcactggagagaatcgctctatgagctgatataatctaaaaaaattccaaattattaaaaattttgagaattataattttagtacaaaaaaataatgagaatatgttaggactcgggtgggaatcgaacccgcgcctacacccaatccgtggatattcaaccattgagctactgaggcaaaatcaacttttatttttctggttcttataaatccagctttccactttttacctcgccagtctgcttcttcttagtaaatctataaaaaaagcttttccataaaataaaatttttatttcggttgatttttcaaatgcccgtctctatttgaatcatttgatagcaataaatgtttttcattagatgaaaaatccggaaaaaatctttctagctatttgaaattttttgaaagtttttatgtattgataataaatcattcaaaatttgcttttattaataaattttagaaaaagactcaaaaatcgcaaatttggcatttttcatttgaattggatattttttggtctttcaaaatttttcaatttttttttattttcatttgattctatcggttttttagttcgaaaaaacgattttgcatcatcgatagttgtaaatgtcgtcaattaaaaaaaacaaatttttttttgactcgcctcctttttgtcgtccttcccaaccaaaaactcaacatccgtatactctcttttcttaaacactttctccaattggtccgtcaacgaattgacaatttgtccatcgcttgtgccttaaatattttaaatcttttattaattgggagacatatattaatgagtagggatgcgatttttaggcaaatgcctaaaatttttgcgcacttaatacgcacagataagcacgaaaaaagccctttccgcatggtttggggtgtctacgatgacttttataatgcctaactttgcctatttcggggtttttgtgcctaaagtgcctattttagggtttttgaaaaaatccttaacaaaaatgcaataaaaacaaaaaaacccaaaaaaattttcagaaaatacaccctaagaattgtaaaatttttcaaaaaaattatccctaaatttaatatttttttcttaataaaaattttttggtttaaaaatttgttcatattcgaaaaaaaactttaaaacattaataatttcatttacaattgaaatatttaaagttttaacgtgttttgttacctaaaaagcgttaataaaaaattttatttgcctatttttgtgcctattcgggcttttttgtgcctatttaatgcctttttaggtgcatatttcgcgattttttgtgcctaaaaatcgcatccctataaatatcttatgaaatttttatttcgtgtcaaaaaacttttttttttaaaaagatttcgtgtcaataaaaaattcgaaatatttgtgacacacatacattgcaaaattaatatattagatagataactaaaaatttgtcttttggtgaaaataataaataatggcaaaattttcttatatattgaaatttttaaagcgaagaaattttttaaagctgaaaactttttcgtaattaaattaatatcttatttacacattcgaaagccacaaaataaagaaaaatcattaaaaataacatttttatggatacattttgaaaatttctattttagagcatttttttggcatttcataggggtgtatttttcgttttttagcattttatgattacttaactttgattaatgcaaaaaatatttaacaaaatcgtaaaaaagccgaaaaattatatatttttaaattttgaagtatattgatgttaatcgaagaattttcgctctaaaaggctgtatttcggcgtgcatataacaggcaggaagtatacatatttaaaaaatattaataagttcctccccaataatggtcattttatgtgtgtgaataggtgaatcatataaatgtcgtcactaaaacagaataaataaattataatgcaattgattttggttggcataattcccaaatcattcaattcattcaatattttcaaaagaaatttatatttcttaagaaaatggctaattttaaatgccttttccaatgcgctttttgcttcttttttctccgattttccgtaatcgctgttgaacacaatgaaaaggatttatttgatgaaatttggaagaatttaaataataaaacgccaaaagtgaagggatttgagaaaataaaagttaaaatggaaccacaaatggacaatgaacaaatgataaatatggaaaaatatggccaaattgggaagacaaaagtgaaaaaagaaaaatgcgaaaatggccaaaccgaaaaagcaaattattcgacacgaaagcaaatcaaaaaggaacaccaaagtgaggaaggaacggagattaatcgacaaacaaaaggtgagataatccaacaaaagcaactccctcacgagtagggctgcaaaaaatatggacatagaattcacggaatttaaaaatgctgattttcctgttcgtttcgtaattgccagaatgacttgaaattttgcaggaaaataccttggtataagggctttctctctgcaaaatttcaaaaaatttcatatattagaaacttttttacaaaaaccaacatgtttttaaaacttgaaaatttcacgaaaaaatttcgccatgaaatttacaagttt

SEQ ID NO: 9397 - DNA, 1709 bp, Heterodera glycines
ctctcttctctctcccccactctcactcattctctttctttctctcgatctccccctctctctctctttctctcttctccctctctctctcagtcatacatactcttactcacatttctcgacatcccacctcaccgccttcacccctcccacgatgtcacgatgtcattttcacaaaagttggagaattagggtcagtcgaaaccgatggcgcctcagggagcttttttgaaaattttgttcaagtttgtaaaccatcaaaacaaccaagaaaacgaaaaatacggtgaaaggttttacacaaaaggtatatcaaatgttacgattaattttgtaatggcattttacaaaaagagaatggcatttacaagcagcgaatttaaataacatttcatattactttcatattacgttggtcatttgtttgtttccatttaaggcataaaggaaaagtgtatttaatcacacggcaaaaacagttggcaaagtgatgggagccgatcgataggattggctcctccaaaatgctcgtccaatggatttgccaattgtgggctttttcgatttaccctgccaactcaatagaggcctctcattttggcaaagtgatgggagccgatcgataggattggctcctccaaaatgctcgtccaatggatttgccaaaattgtgggctttttcgatttaccctgccaactcaatagaggcctctcattttggcaaagtgatgggagccgatcgataggattggctcctccaaaatgctcgtccaatggatttgccaattgtgggctttttcgatttaccctgccaactcaatagaggcctctcattttggcaaagtgatgggagccgatcgataggattggctcctccaaaatgctcgtccaatggatttgccaaaattgtgggctttttcgatttaccctgccaactcaatagaggcctctcattttggcaaagtgatgggagccgatcgataggattggctcctccaaaatgctcgtccaatggatttgccaattgtgggctttttcgatttaccctgccaactcaatagaggcccctcattttggcaaagtttttgaaaatgtaaaaaaaaagtggaaaaaattatattcaatttgcaattgcattttaattattttttaatgatttccgtggtaatattcatacattttagcaatgctgttttgtaaacagaggatgatcgtttaacacagcaagaagttagaggggcatatttaagcaatttcctcttttctatttttatcattttctaaaaagaattatagaattttttccatgtaaatccataaaaaacgcaaatttctgagtttgtagggatcaatttttgaaatttctcccaaggaccgattccttaggctatattttttcgttttattgcatttttgttaagaatttcgaaaccaaaatagtgacaatggtattaaaatgcggaacccgctcagttgggcgccggcacgtttgggcgccagcatgtttttagctataacttttttctttgtcaaccaaatccaatattgttgatatcattggaaagctctaagtgccctctattagtctgcaaagttttaaaaaatttagtctaggttataagaaaagttatggccagaagaattcaaaaaaccaaattttccaacttttttggccataaaaggttcaaaattaacaaaattttttggat

SEQ ID NO: 9398 - DNA, 3080 bp, Heterodera glycines
aaaaaaattgggcacggcccgaattaaatgaagaaattttcggatgcggaagactttttaagcagcgccaaaagcattgattggaaaactgatagtgcggagagcagaaaaatctgcggagattgaaaaaatttggcacgaatgggtggacaaaaaggcattggaaaagaaggagacagatgatattttaaaattgctgatgcaatatgaaagtatttttgcgattagtgatgaagaattgacacaaaccaatctgatcaaacaccaaatcgacacaggcgaggcagaaccaattcgctgtaagatgcgttttgtgccatatgcctacagggagaaagtcgcggcaatgttacaagactatttgcaacgagatgtgatccgtccctcccattcgccgtggtcaagcccaatcgttctcgtgccaaaacgcgacggaacgttgcgattttgtgtcgacttcagagcagtaaattcggtcaccaggaaagacagttttcctttgccgaacatcgacaatacgctactaatgctgggagggcgtaaatttttcacgacccttgactttatgaccgggtattggcaaattcgtatggacgaaaattccatcgaaaaaacagcattttctaccgaatttggcctacatgagtttacggtaatgccattcggtttgtgcaacgtcgtagcaactttccaaagatttatgacgcacctttttgacggatacataaacaactttgtttttgtatatatcgacgacgtccttatcgcttccgactcatacgagcatcatttaaaacatttggtgcttgtttttgaacgaattcaggaggcgggactcaaactgaagctgtccaaaagccatttttgtgctaaagaattgccatttctcgggcatattctaactcgcgaaggaataaaaatggacgtcgacaaagtgcagccaattacaaaccttccaatgcctcaaacgcgaaaggaattgcattctcttttgggctttttcacatactataggaagttcatctattcctttggtaccatcgcagcaccactttttaaactcctgcaggaaaacgtcaaattttccattggtgaagtggaaaaagaggcaataaaaagtctaaaagaaaaagtcctgaaagacgtagttttgtacttccccaacttcgaaaaagcgaaaaatgacccctcgcgttgctttatcatgatgaccgatgccagcaaagttggactttcggctgttttatgtcagcatgacgatgagatgaaactgagaccaatttatttcgcttctcgacaatgcagcaaatatgagagccgttatgccgcaactgaattagaagcgttagcagtgagattcggagcaaagaaatttgctcagtttataacaatgctgccgacgagagtcctcacggatcacaaatctcttgtgcccatgttcaaaagcaaggaggagactggaaatgcgcgagtcgacaaatggctcatggaattgaattcgagatttatcttgaaagtagaataccaaccaggaaaaatgaatgtgattgcagaccttttatcgcgatcatttcaactaaacaacgaaggaatcgccgaaccgctcctggaggaagataaagcattaattggaatgataaaaatactgacagcggaagaagttgaagcgtcaattgaggagaaaagagaaaagtggagtcgagcatccgaagaaagtgaaatgaagcacatatatgaatttttaaagaaaaaaatcttcccggacgatccaagacaggcgcaaaatttgaaggaaacgtgccacaaatacacgctgctcgacggactgctttatttatgtgaagataatggcaaactgcgacttttcgtcccatccgaatttcgtgaaaatttggtaaagcaacgacatgaaggaaaatgcgcagggcacatgagtgacaaaaaactctttcttcaattggcagaacagtatttctggccaaatatgctgaaagattgcatgaaaattcatcaacactgccgaatttgtgctcatacaaaggaggcgagagcaaatgaacctccactgaaagtcgttagaacgtcagaaccattcgaattgctatgcatcgacattttggacgttggccccagtcagtcagagttcaaatatatctgtgtgatggtcgaccatttttcgaaatatttaatcgcggagccgatacgaaataagtcagccgaagcagttgcgaaagtgttggttgagaaagctattttgatatacggcacaccgaaaaaaatccattctgacaaaggaaaggaatttgtcaattcaacgattgaagaaatcgtcaaaacttttggaattgaacgatctctcacagctgggtatgacccccaggcgaacgggcttgttgagagagtaaaccgaataataatcgctatgcttaaaaagtcgacggcaagctgctggacatgggatgaacgtttgccgtacattgtgttcgcttacaacattacgccgtctaaaacgacgaaattttcgccattttccatgatttttgggaaaatcgctcgatttacgatggatggggaagtgcccttacaagtcaacccagcatacacaattgacagcgacacatacctccaattatttcgtgaaaatgtgttgaatatgctgaacgaagcgaggaaaaattctgatgaagaaagaatgagaagtaaaatttggtacgattcccagccgaaagtgacggctaacaaatttgaagcggggcaacgcgtaatggttgcctttcccggactgaatcgccgatctcggcacaagaaatttttgtggtctcatttcgggccttatcttatcctagaaattaacgaatcgtcggcatttttagtcccaattgacaacagaaatgctgagcccataaaagttccgattgagcgtctaattcgaattcctccaggaatcccggacatttcaacacttccaaaggggaaaaacccatttaaaaatgcgttaaaatcattaattgtcagcattttatcgagttttgaagtctgtgaatcagatggacaaatggccccattatgagcaattaggg

SEQ ID NO: 9399 - DNA, 1149 bp, Heterodera glycines
  unsure (1)..(1149): unsure at all n locations
cgttcggttggaatgccaaagtgtgaggtcggtcaaggcgaacagggattttggtgccattctacatgtcgcagaactcgatccagcgcttggaaatgctgaattgggctcaatcacagtgaagacaccactgcaggcacttttggcggtgttccttttgaaggccgggactgtcaaatcaatgacagccgcaagaagtttcgtcaaatcaataattgaaggagcgccaaaagaggaactccatctgttcgtgaccaaaaagggagactatgtggcgacaggacaatgtccaactgaagaagaccaaatgaaggcgctggagtgttggttcgaaaagtgctccgtggcaaagcatgctttggaagagagcggattcaaaaaaatcggcatgtacgaacccgtcggactcaatcatttagccgattctgagaagaagaaatgggaagaagcgatgggagagacaccgtgggtgctggagaaattgagggccaaaatcattcacaaggccacaaaactgatcgccttgccacgtgtcataatcggagattcgacagcccaccaattggccgaaatcttggaccaaacggcggtgatcgggccaaaaaatggaacattggcggagacagtgcgaagcctgaagcccgtggtgctctccagcaaagtgaaggccgcactgatcattgtcggacgagattcactcttgggcggagaaaccattgcagtgatgatggagcaatacgagatgattgccaatttgtgccgccgattcccgcaagtgaagttcttttggacatgcccaccgtacgtgcacgacaaacacgacgagtacgaagaactgatcgaaagcttggtgccgatgatgagccaaaaaccttttcttcctgtttgggtgacagaaagtgacaacggatggactgatgaaagaggccggtttgcgagcgctgaaggcatggctgttcacccaatccgacttcccgggcgatcagaagctgaaaattcggtcaattcgatcgaccgttcgtgccgttgctacgataggtctgggggaccatcgccaagcaagcacttcgtctttggccgtaaatgactcgataggtctggggnaccgtcgacgtcacacaatggatcagttggacatcgcgatcgtga

SEQ ID NO: 9400 - DNA, 942 bp, Heterodera glycines
aacattcttcttatttatgaacataacatttacataatttttttgagttcttatgtttttgtatgggagagagaaatgaaaaaaatgaaacaaagttaaaaatcgatgtcaaacacaccgtttcaaaaaacgagaaatgtgtcaataaatagagagtgcagagaaaaaaatctctcattttggcgtactatttctttatctcagttaatagagaaaaactgatttcacttcatcctgtttaactttttttctacttattaaatccacaccaaatttgtataccgatagagaaaaattttctgcattttctatgctgaagttatttttgtctatgctctaattcaaaattacaacttttgaacatctatatctttttctaactcaccaaactgtctaacatttgcttcgaaaaagtttcggctctcactttatgagtccaatcaattgactttatacaataactttgttcatgtttgaataacccctatctttttggtagcattcgaaagcagaaagtctaatgaagctaaaatatataaaatctcaacgtttaggcaattacgaaaaaaaagatttgattaattaaatattgttgattattttcgtttgtaactttctttagctgttcgaattctcttgttttcatattattaccttattcagactttgtgctttcgaatgataccaaaaagataggtttagctcgaacatgaacaaagttattgtaaaaaaactcggtctaagattaaatttgcagatttttatttttacagtcatttggcatcaaataaaaatggctctaaaaaaatttccttatatatttccaatcctttggatgactgacgatttcttctacaatataatttttacaaatatctttttctaaaatattattgaaaaatttgttactccttaatatttttcatcgcctttcgcctttaa

SEQ ID NO: 9401 - DNA, 4178 bp, Heterodera glycines
  unsure (1)..(4178): unsure at all n locations
tgcaggtcatgggaaataaaaattcagttttcattgtgcatcatcatcttcatttgctgctggtggtggtgggggtgcgttgaaaaagggcttttccgctataataattggcattgggcttcctcctgaaatgatcgcctgcaacttggccgagtcgggcaacccggacgcaactttgttcattgcatccagcaatttgtccttaaaatccattttgatggaattaatttttaattttttttggcatcattttgaaatataccaaagctcaacttgactttttatcataaaatattatttattgaatttaaatttgcatttacatacacctaattaactttaattttttaaattataatttttatttaaaaaatgtgaaagttttatttaacttaaatatttatttaatatttgaaggtatttttcggtagtaatttaggaaaagtttttaaagtgcggcctaataactgaagtctatattttatttccgattttcttttattatttagaatactttttatttcccattgtttttttattgctttcacctgatattccccgaccaaatccttgtccttccgtgtctctttgaattccatcgaattttgaatcaattccaatgtgcccatgaagatttgcttctgcgtactgttcatcgtccgctgtccgtcctgcccagcgccatgccgagcttttatttgaatggcatttttttggaattaatcccccaaatacttttttaaaataaattaatttgtgcccaattatgaaatataatttaatttttcctgtaaaaaaattcgtcaaaaattgatatcgttagttttttttgttcgttaattacttgccaatggcgcaaagtttgacaaaacattggccattcccaccaattctttcgtggacactgatttttgcgcatttgccatatgaattatcagacactaaaaaagggaaaattatttttaaaattaattagcaaataaattaataaattaattggtgttttttatgcctggagaaaaatttcgattttcacttcactgcatcccgcaaaaattgacaagaaaaaagtggtcccaaattcattcggcaaaatccaatgttgagtcatcgtaaaatattttaaaattgggccaacaacgaagctaaaatcaaacggaagagtgaatatacatttaagcatataaaattaatttagctattatttatatatattttttacttcaattgtccatttttcacccgcgatctttccattaaatcgcgcaaaaagtccacatacaaagcgccaaaatctatgggctcagcaattgagaaatattcttcattcacttcaacatcgccattatcctcttaattaaatttcaaaaaaaaattataaatttaaaaataaatattttttattgcttttttggcaaaccaatcaaattacctggcacttcaaataattcgtccaaaaatgacagaatcaatttggtaagcatttcggcaccccactgactgttgttgcttttagggataagctgcagtgagttgaagccaacagctgaaatgtttattattgactttcaaactttgaagaaaaaaaatatggagggcaaatgatggcccatatattaaacggcattaaatttggaatttcaatgggattcaaaaatgaagacttattgttcattctcgtgttaaaatctagtctcgaatcaccagctcaattcatccgagtcacaacttggacaaaattgtggaatgttagccaatttcgaaacaatgttcgcaattcagactcttcagtaatggaatgccaacaaatcagggatcggctcaaaattacggggtcggctgcttgagagtcgatccgcagatttactcaacctttttttggtctcgattctcgggctttgtttctgtcttgagttctcagaaaacacccactcttaagcatccctatcagaaaaatgccgctaaaacaactccatccacctttgattgcgttgaaggcgcccagtcgtcgagagtcggcatttgcgcgtgccatgcatgccatgaatttgggggtcagctgattgtacatttggcacatgctttccgcctcgtggtgcaggtcggcatgccgtatgaacaggttgaaacccattgtttctagacggtattcgggctcgtcaccgtctgcacacaccttagcaaaaaagcacagttagttatgcgccaaaaaaattaaatttaaaattaatggaattgtaaccgccctccaccagcgaaatgaccatattaaaaccctgtaaaaatgatcacaccatgtagagcatggtcgatttactattgccaattttcggcttttttggccgcgatgacctcgaaacggatcagcaaaaactggttaaatgaaaaaaacaagcaaaaaatatcttattttaatttatttaagatggttgtttttttcaaagtttatcattctagcatctttttcagttatttttgctttatgttgcatttgttagaggattttttggtcatctaaaaacatttcttgttctcggttatttattttttatgaattatttaaaaaataataataaaaaaagcagactggagccagtcttttaaatacaaataatactagtcaaatcagcaaaatttattggctttttaaaacttccctaaatgtgatcacagattatattctttttaaagagccaatttggccatttttgggtcataaacataaaaacatgcaatttcattttcccaattttatcttcctaaattgaatttgttttttcgtttattctcaccaaatgtttgaccatctgtagacaattgtccaccaacactgtccaactgggcgcacgacgacaactctccaacaacaaatccataatgttaacagccacctgttttttgagtgattgaaagataagtttgaaaattgatctgttacttattaaatgacattttggtgattagattcaaaaacgtagccctattgttcattctcatgctctaaactcttttcatcataaacaacttattcagaaagtacaattatgggtgcaatttgttaaattggcattttccattccctgctaaatccttacttttgaaaattacggtatcgttatatatacagtaagtatgtacaatgcaaaatgcaaattttgcagacggattaataaactcatctcacatttgattattacatgttaatttctaattattattaattcacctcaactcgtgtgtaatttttcttgtcaaggtctctgaaaaagcaaaaatttataaattaaatttgacaaaatctatttccattacctgttcaaatgttggattaaataagcaccaattccgctcagctcttcagggtgtgcgcccgaatattcaatcagtttttgcagctttttgtccttcttcagccattccccgtccttgtgcttctttctcgtgccactgatcgcgtccgcgatgccatcccggggtggaaatgccgctttacgccaccgctgacgggagcagcaggcgcccatgtttttgtgagattagccaaataatgcgcgttgatactggctgataaatgtggaacaatggataaaatgattcaaaacagactcatataaagtgatcggattaagatagaagcaaacaactgataaattattattatttgtatccgaattttgcaaaattttcacaaaatctttaaaaaaaatttctgtgcaatggcgtccaagcggctcgtcgagtttgattttttaaaaattaaattaatgtttctatcggttttgactttcattttacgtgttcaaacactgaaaatgatgaatgaagttaaacattttgcaccgaaactaccgttttttctaaatgaatatatttccgagagtaatctttttggtgctagtgcgtttcttaaaactgccaatgggtttgaaaacaaaaaatgggtaaaataattaaattaatagcttggctcaaattcaaccaaattaatatttcgtggtatcattcaatatcattcaatagctttaattgttctctttcagaatataatttttcctaaatttttaancttaagtataaaaagaagttaataaagcattgaaacaggcctatgttttttttgcaatggttaatgcatatataataaataaacattttaaaaattttaaaggtctttaaaa

SEQ ID NO: 9402 - DNA, 2355 bp, Heterodera glycines
  unsure (1)..(2355): unsure at all n locations
ctaaaggagaaggaaaagaaagagcggaaagcggcgctctaaagacattacagtcaaataccgaagaacgagccagggatttttgtctacccaagtaaaatggcgaaatctgggaaatttgactgcaaagttatgacgtttcactctcttttggaatataataaggtgatttttgttactaaattgactaaattgcctatctatattaattgattaaggagcatgacaacaaggaagcctcattcgaagttcaaaatacaatttatcacaattgttagttttgtcatttaggtttttctttttgtggaagcattgaaggaaatgtttgacagagcgaatgcttttgttatttatcatacagtttcaactgctttggaaagggaagtggaaaagaaacgtcgaaatgaggcactttctgaggcctgcaaagacgaggagattgttttgctggagggcagcacttctaaagaagagaaagctgaggcgtcaaagtctcctaacaacacagaattgcgctcaaattttaaagcattggtccacaattttgaggtaagtaatattccctgaattcgtcccatattattgcattctctatgatttagcctttcattgcgtttgcccactttgatataaacatttgcgggtttgtaaattatacacaaaataacatttatgggtttgtagattatacaccttatatgctgtttttttaagatatattattgacaaagacttggaggacataattttctcaattgggcttgatgtttcaagatgggatgtgcaacgcctggtaaaaaagttactgtccaaggaacgcatcaattatcgtgacctcaccgacaaatgggtggacaaggaggtttttggtagcaaaatggcaaattaaaatcattcattcttacagggaaaagtgcgatatgttccacttccttcgtatgaaaatattttccaaagtttttccgaacacgcaaaaggtgggattaagaaatcgcacttaaaaattttattaattgtcaggtcacaaaacatctggcgatctttttaacagttcttcgcagaatattaatgaaatgtccgatccaaaactcattagcgaatcggaatttgcttatttcgaaggtgtttttggagtttgtatttgttacgaaaaacattttaggctcgttgattaacattaaacagagtattgagcgacaatacgcactggaaaaagagcgacaagaaacagtggaccaaaacgagaagctgaccctccaacttagtgagtttctaagcagatggtcaaaatgttcagaaaatttattttttgaacttttctgggcataacttttttgatacacaatgaatttctgaaattttgcaagctaataaaggacatttgggttatcgaatagaaaaagatatagcgcattaaagttgtcaaattattttatggtcatgttaactgtaatagagtccaaataatttgtttgttaaacgggtacttatcttattttttttagacaacattaatgagcagcgagaacatctggaaaagaaaaagcgacgactcgaagatgacgttgatcgttacaaaaagaaattatacgacagtgaaaagctgctgaaggttcgataaatcttagtcgcccattcctagaaaaaaactcgaggggggggagtcttaagagcgcatgccaagtcgggaatacaattcatgtaattttaatttaagaaggagcaggaggacaattcgtccatgaagacttctttattggattgtaagcgctacggggagagaatggtcgccgttgttgagaaagtattgcccccgccatcgaaaaaggaagaaaaagaaaagtcgtcgggatcggacaaaaatggaacgagcggaaaagaaaaggacaacgaagttgcgaatttgaataccgaagacggtgtggagaagggagacgaacaacaacaaaaggtggcattggcatagttcaaactcactcattctgggaatttttagctcttaattgtggatgcaatttctgcttctcttagtaaaagttcttgcgaagagaaaagcgatgggcgcgagaaccgtgcggggagtgtttgactttatgccgatttggtttccgtgttatgatttgtgtttctggttcttataaatttttcattactggtccattatgttcaaaatttaggcggttaaaaaattttaatagcttaaaacaaaaacatataacacactcaaaatccacatatctgttcttggcgatgaaaatgacacccattaaaaacgatanaactattctcagaccgattaaatcatgaaaattgccanaaaaaaatacgtcacaaatttgggtaactctaccgatg

SEQ ID NO: 9403 - DNA, 3883 bp, Heterodera glycines
aatcgaccttggaattggcatttgttcgttgcactctttcactgaaactgacgggggacgtcttctgctggtgaaccttttggcccatttttgctccttttccctttcacttttttgcggattgcaattattttaacgataagctttaattgttaaattggaataaaacaaaagtggcatttttaggtttctttgtcagacagaacccaagtgattttgcccctccaaggacgtgatttttcagttcgggaaacgttgattcgaattacgccttcacaaatccatcgaattgacaaacatttgtacattttccctcaattaaatgagtccgtttgtgtgttggattcttccaaaaagcaggttcattccattcctttctccatttgtttgtttgttctgttttcctcctttttcagctcgccctcttcgattcgcttctctccgtttggtccgcttcgcctcgcttttgcttcgaatgctttgagtcgggctttgtccgtcaagtgatttgcacttcgcaaatggtcgtcgttttgacgcctcacaatctctccgttcagttccgctctttccaagtgaatttgccctttaaataaccgtcgttttgcttcttcgtttagtcaaatggcacttcacttcgctatgctccaatggaagtgattttgccatcgcaattctcctgtaaaacgctccatttgattattgcgtccgcaaattccacccaaaaaggggaaagtccgctccaatgtttctcagcacttaccgaaaagggtcttttcgcgttgcgaactcaaaagtgacattttcgagtttgggcgattgttcataaatttctgcttccaggcccttcaatgacttcatctttgcccttctcgattcgcagttttactcctccaattgtctctcatctttcgccgtttctttgcaaatttcccctgccgaactttgcctttctctcctccgccattcccttcgaaatccctccaattttcaaagtgttcaaatcgacgggattatttcactcgcctttaaatgcaaagtatgaatgaatgagactcacttggcatttattactttgattttgtgagtctctcttttggaatatttccaaaaagtgccttcgaaagtgtttctctaaacaattgtttttgttttggtctgtattttttcctttcagatcgatccaaatgacattctttctgttctccgcgaaagcagtcgggggcacttccttttgccgtttctccgaattaaaattgcgagggattcgggcgatgattcgttccgccaattgtttcttggggtaattttgggtcgaattacccaaataaccgatgaggaggccaaaaatggcgaggaaagtgaacacggaaaagaattggaagcggaaaaaaatgcactcgaaagcgaactgaggtagcggaagaaaagcaacgaacggttggcatttggctctattttcaatgccattctttgcaggcattttctgaataaattcgacacggatgcgtctgaccttcttctgctttccctccgccattctctcttctcttgcgtttgtgtgcttctctgtcgaaatgctccgctgcacagtcccacggttgcgcgttctttgctcgaattgtccgattggaacaaccgaagggtcggaagtttgctcaaatgcctttccctcgtccattggccttccgtcgattccttttctcctgcaattgtggccaaattgttcactttggtcccctcttgcaatattgtccagcttaaaatggtgaatagaattgccaaacttttggcgcaaaggtcaatttgggccggggaccgacggacggtccctaaatgactttccttttcagatccatcgaattggctcattccctccaattgttctgttctctgcgcctctcccatttggctgcgggaagaaacgaacttttgaatttggcacaaaaaatggacagaaattccgtcgattgcgcctcaaattgtacggttttacttgctgaagatgtgtgcggaactgtgaacagctgtgacctttctgaccgtgaggagtttcagccgttcttttggggagaattttctgccggaattcaacgtttgctaaaaaatgaacgggcgaagtccgacggggaaaagtgcgcggcatttgccattggcagtgccattccgacagcggaaaagaacggagaaaatggaattgtcgacaatgcatcggacgctgtttcggcaacgaaaaagcgattgctggggaggaaagaacgaccgaatgcgttttctctttgccctttccccggggctgtaaaagtggcaaattccgatttaacggtggtttttccattttgcttggactgatggaaagttcagttttgtgcggctgcttgtggcactgaacatgttcttctgttgaccgatgacggccgtcttttcagttgggggattaaccgatttggacagtgcggaaacggcacggaagagccgatccatgcgccaattgtatgcctcttggaaaaagaccgaatttgaaaattgccaggaaataattggcaaatggggccgcattgtcagcatttgcgcgggtcattaccattcgggatttatctctgaaaaggacgagatttacctttggggctggggactgtacggacagctcggaaatggcagaaccgccaatctgaaacgacccgcgaagagtcgtccattcagtgctttgaattgtgtcaagaagctttggtacaaaaaacatttccattgcttcaatgtgccattctcccccccccccccctctcagtctcggctattcccactctttggcactcctcgccgatgggcgtgtctttggctgcggtgcgttctctcatggccaactcggcatcgaccctcacaatttggaagggtgcccaacgaaggccttggcccccgtccaattgccatttccaatgccaatttctctgatcgcttcaagtagtatctttactaaccatgactgatgaggacttgttttagaatatttccatggtattgctttgggcgtggaccatttgaggagaaaagtgctgtttgagtggggcgactccccccaatctttgaaaatgaacgcatttctgcaaaagcgtctcaaattgaaacagaaaagtaaacatttgtttaaaaaagtgccgaacaaaaataaatttagaagcaaaagacaaaaatttgaaaatggatggacaagaaaatccgccgacggcggagagaaaaggcgaagcgaaagtggcgaccattgcgatagacgaattggaacgagtccatttcaacattcggacagtttgcgaatggaatggcgcggcagtgaaggcgcttagtgccgggtaaaaaacaaaggcccggggtattctccgattggccattgcttcagattcaaccactccgctctgctgacttcggatggccaactgttcacttggggaaagtccttggaaatgcaattgggccatcagaacagaaaggaaaagggcacaccgaccaaagtcgatgtgcccgaaactgttcggtggtccgaagtcgtttgtggttggtccgcatggacttccccccccccaaaaaaaaggcccttttcagcccgcaatttcaccactgccatttcggtcgaaggcaaagtttttgtttggggtcgaaacgacaaattccaattgggacttgggaaaacaacgaagaaagggacggcatgccaaattcggacgattgcgcttaaatcggacaagggaaatgcgcaacggagcgtggagttgccggtggacaattgcgtcgagagtccgacgatttacacggactgcgggcatttgtggaaagcgaaacgcaacgtgaagggaagtgctgacgagggactgaagacattgatggttta

SEQ ID NO: 9404 - DNA, 4199 bp, Heterodera glycines
  unsure (1)..(4199): unsure at all n locations
tgcatcaaatatgcacaaaaatcgcaaaatatgcaccaaatatgcacaaaaaaacttgaaatttggggtgcaaattaattttaaaaaattttttcctcacaaattttatcggctgtttttgaattgcaaatcaaaaatttctcaaaattttcggcagtgaagctcactgttgatccactcgtgcatccattcagatttggatttaattttaggcataatcaaattttttccaagggatattcaactcatcgaaaaatggcaaaatatgcaaaaaaaaaaaatctgaaaatatgtacaaaaaatggcaaaatgtgcatgaaatatgcagaaaaacccataatatgcaaaatatgcataaaaactaaaatatgcaaaaatatgcaaataaaagtcccgctttttatacgcaaataccaaaaagaatgtgttttcctactaattagactacgtagaatccaagatatttttgacagccctggtaattatatatcgaacaaaaactaattaattataaaagaaaatttatctatgcaacattttaaaagatagttccatcagttgaagtgaatgaattcctttttccatctgatgaatagggttgctcttccaattcccaatttctctgcaataattccatcactaatttcaacattacttgccttcattttgaaatattgtttcatttttattaatttatcctcattggaatagttattttttgcttaaatataaaattaaataaaaactttaaaaattcacttacttttataataatttggcaacaattcatttttccattttattaatgttctttcaccaatgcccaattccattacaaattctttctgttttccgtggccatataaacttttaaattcatcaattcgttcaatgaattcccgctttttctgctcataaaaactctttttcttttgtttattttaaatttatataaatttaattcttttttccatttgtatattttatggcgacttgcacctaaaactctgccaattttgaattcaattttgttctgtatttgttttgaattttcctttttctctcaacttttctttaattgcttcaaatttttgaatcatttctctcttgttggtcatttgggtgtattccattttcttcattcatccatttgatcagcttcatattttccatttagctggtttagttcaatttttatcatttggtcttcttcttcatttttgtcccatcgttcgccgaatatttcatcgaaatttggttggattttgccggactcaattttataaataataaaaaaatttataaatattaaatgccaccaattcattcttttcagatatatttttgaataaaataatttttttaaatgattaagaaaaaattcacaaatatattttttttacatattattgaatcagttttttgattttattgatcagccaaaatttggatgcatgaaaaagacatcagcaaaacagtattttttagcttatttcctgtccagtacgggtttcaatcattttcgttccgaaaaagctccaagattggtgcaaatggtgtaataaacttttttgtttgttgtccgatatagctttttatatgaccacaagtaggttttttttgcataatattaaatcgctctaatttaaaaaattgtgctgaaaaatatgtttttcatgttttcgaaaatttttcaaaataagaacatcaatgccacaaaataagattttagggccaaaaataagaacatttcgcaaaattgcttaaaatcgcttgtgtaacaatttaatcaattaatatagttatcaaatttcatatttttcgcctcccatgatcatttttaacaatttgtaggaaataagcaaatcgtaatttttttttagtgtattcgggatcaaaaaaagtaagatttttaaaatttttgcatttaaaagccatgcgacgacttttttcgcttttaaaaacgcttttttttacgcggagcgcttccaaaaattttgggggactggggcgtctggcggcgccgataggcgctgacgggaaaaatttgtaatttttaatgcgatttgttaacagtttttgtcaaaaaataaccaaattttgagctaaccctatattttcttgataaattagtgacattctgccataaaattatgaatatatttatgaaataagaacaatggcccgaaatacggacaaatcttacaaataaggacatttttattttctaagatttggaccctccaaataaggacaaatcttataaataaggacagatccgagccttgtgtttaccgcgtaaaatgctatccacacaaaaaataggtaaaaaatttagaaaatggcccgtatatttgggttattgcacttgatatttaattatttgattttggaatattttacaatttcttaaactagaaaatggtatagcaatacaacatatcaaaataacacaaacaatttcaaaaatcacatgtcagaaatagatactaattcctgtttccatcttttcagcgtggaatatccaattctcaaatccttagcaattctttggtcggtaatttttggatttttttctttgattttaaagtattgcttcatcttttttaatttgtcatcgttggaataattattttgtgcttaataataaaaatttaaaataatacaaaacaaattctcttacttttattataatttggcagcaattcttttttccatctcgtaaatgtgtctttggaaatgcccaattccttcacaaattctttctgtttgcgttggccatataaacttttaaattcatcaaatcgttcaatgaattcattctttttcccctcataaaaactctttttcttcgttttatttagatttaattcttttttccatttgtatattttttggcgattttggcctaataattttgcaattttccactcaattttgttattgtttttccattcatattttcctttttgcttcaacctttctttaattgcttcaaatttttgaattgtttctcttttttgttgatcatttggaccatttccattttctccatccatttgatcaactgttgctgagttttcattttgttcatcattttttatcacttgttcttctctttcatttttgttccatccatcgccaaatatttcataaaaatttggtcggattttgccggattcaattttataaataataaaaaatattataaatattaaatggcaaaaattcattttccaattttgaaaatgaataaataattttttataaaatgattatcattatgctatgaagaaattattcacaaatttttttttatacattattaaaaaccaatttattgattttggtagtattaaaacattattaaaaacaaattattaaattttgcttaagattaagattatttcaaaatattaattcataacaataattatgaattttttttttgtttaagcaaattctgattttactcggaaaatctgttaaattatcgggtgggttaaagttgattccgggctgggataaagcacttctgcggttttggagcttcgctagaaataacatntaacactaaagcgagttggaattaaaaaaatcttagtctttctttcaatttctatcacttatatattatggctagggctatgattttaggtttttgcctattttttcctgagctctccgtggccttaaatgcacgaaaaatatgttttttttctgttgttgttaagctacttttcgagttatagtgcctattttctaggattttatatttagagcctaaaaaacctaaaaattttgaaagaaaacctatttttgcctattttggcgtttgatgagcaatttgttaacaaaaatgaaataaaaaacgaaaaatacaacccgaaaaattttcaaaaatgtacccttacaatgaaaaatttctcaaaaattcattttcaaaatttatttttttattttcttgacaagaagttttattttaaaaattatgtatcttaatactgatttggcttaatgttgttatttttttgaatatattttgtcattttacacacataaatttgaggctttttagtgtctattttcccatttttagtgcctattttcgtggttttttatgacctaaagcctacctagtttggcagtttttagagcctaaagcctacctattttggcagttttttgagcctaaaaat

SEQ ID NO: 9405 - DNA, 556 bp, Heterodera glycines
atgcatgaccattgcaaaaaacatagcatgttcaatgcgttataacttttcttatacttaagtaaaaaattttgtaaaattatattgtgataaagatcaattaaagctgttgatgataccatgaaatattaatttggttgaatttgagccaagttatgaatttatagatattacccattttgttttcgagcccattggccgttttacgaaacgcgcatgggtggccttttttacgaaacgcgctagcaccattcgaatcactggaaccaaactcgactcgggaataaaaaaaaataaaacggtcaagatacaaatgacaacttttttggacaagattcgaaagcagcatgaagttgattattttcgtttgtaactttctttaaatgttagaatttttttgttttctcgtattattacattattcagactttgtgctttcgaatgataccaaaaagataggttttattcgaacatgaacaaagttattgtataaaaagcagctattatcaattaattggactcactaaagtgcattaaattataccgaatattattt

SEQ ID NO: 9406 - DNA, 2169 bp, Heterodera glycines
agcgctcataatgggatgtataaaggcgattgtagaaggaattgacagcgctaacattgtatgaaaagctttttgagcgtaattacgattttacttacatcatttttttataggcttagatcacatgcgattttcggcactctgataattttagcgctcataatgggatgtataaaggcgattgtagaaggaattggatgcgctaaaattgtttgagaagctttttgagcgtaattacgattttacttacaccatttttttgtaggcttagatcacatgcgattttcggcactctgataattatagcgttcataatgggatgtataaaggcgattgtagaaggaattggaagcgctaaaattgtttgaggagctttttgagcgtaattacgattttacttacaccatttttttctaggcttagatcacatgcgattttcggcactctgataattttagcgtcataatgggatgtataaaggcgattgtagaaggaattggaagcgctaaaattgtttgaggagctttttgagcgtaattacgattttacttacaccatttttttctaggcttagatcacatgcgattttcggcactctgataattctagcgctcataatagtagttagagactccattttcaccggattacggtagccccccataggtgtgggaggggtgcatggccaactgagcgccagccatttgagcgccgccaagtgagcgcgggccatctgagcgccagacttttcagtactgaagccaaaacctattgcgcgactttttcttgcaaacccaaacctattgcagggggtgcgcgacttttttgactgcgcgactttatgcaaattattttaattaaatttatttaattttaaattattttaaacgtcttaaaggtcaaagacgttgaatttaaattcatttaaaattctccaaaaattccccgcaccaagcggattcgaaccccagggggggggcggccagactgacgcactaaccactcggccacattggcaatggatgataaacattaatttgctctcataaaggaaaaattgacgtcaccagcggcgggaggggggcgagagcgggcggcgagaaggggggagggggtcaaataaacaaatcaattattgaattcacaattttctcttttaaaagcaaaaagaaatgggggaccgtataataaaatataatttagaaattaaaataattttaattaattaattattattcctaaaataaaatttttattacttctaaaataatataaatatttttcagtgaattaacaaatacatttaagtttaattattgatttgtctgttaattatttatctcctcaaaaataattacagcaccctttcaggtgttgggcatttgtttatttgaccaataatttttaatttcacatctttgcgttgcccctccctcacacctgctcatttgtgtaatttgacaccacttcttttttcttttcgttaaaaattaaaaagattgtctggaatttgtcttgcgccacaccgctgtgccattcatttatgtaatttgacaccagtctgataataatttcgacaaaatttatttttatttgtccatttattacgaattatcttatatctttcgatccaaattttggacatattgttttttcttttcctttttagcaattttgctggtttattcaattaaaataaataaatatttgttcatctttaaagtaataatttttataaaatttagacacaaaaacaaatcatgagccaaaaccgtgacgaaaactcgcagccacatgtactcgatggtccatacccaccggcacaagagggtgttgagtttgtggaagatgaagcacctttgatgcttgaggtgttggagcgtctgatacaaggagtgagttttgttttgaattctttaaaaaaattttaaaatgtttccattttggcttatgctaattgttgattttgcttaggggatttgccaacccgtgggcccgttttcgtttgcacttgccgactgtttggccacatttcatacatttgccatactgttcgactgtgagacacgtgtgccatttgacgagcagcacaagcgatacgtgttcgaacacagggacaaaccgcggctgatctacgtttcggaagatggaagcgctatacaagttgac

SEQ ID NO: 9407 - DNA, 3390 bp, Heterodera glycines
gcgggcgtcgcgaaaaattagggggtcaaataaataaatcaattattgaattcacaattttctcttttaaaagcaaaaagaaatgggggaccgtataataaaatataatttagaaattaaaataattaaaaggttaattaattaattattattcctaaaataaattttttattacttctaaaataatataaatatttttcagtgaattaacaaatacatttaagtttaattattgatttgtctgttaattttttatctcctcaaaaataattacagcaccctttcaggtgttgggcgtttgtttatttgaccaataatttttaatttcacatctttacgttgcccctccctcacacctgctcatttgtctggaatttgtcttgcgccaaaccgctgtgccattcatttatgtaatttgacaccagtctgataataatttcgccaaaatttatttattatttgtccatttattacgaattattttgcatctatcactccaaattttgttaaaaaaaaattttttattgtcccaatttttaccattttgtgttttttcaacaaaataaatatttgttcaaatttaaagaattaatttttaaaattttagacacaaaaacaaatcatgagccaaaaccgtgacgaaaactcgcagccacctgtactcgatggaccgtacccgctggcacaagagcgcaatgagtttgtggaagatgaagcaccggtgctgcttgagatgttggatcgtctgtcacaaggagtgggttttgttttgaattatttaaattttttaatttttccattttggcttatgctaattgttgattttgtttagggaatttgccaagccatgggcctgttttcgtttgcacttgccgactgttaggccacatttcatacatttgccatactgttcgactgtgagacacctgtgccatttgacgagcagcacaagcgatacgtgttcaaacacatggacaaaccgcggctaatctacgtttcggaagatggtagcgctatacaggttgacggtgtggtgaagcaaggggaatttgtgatgagcatcgagacgatgtatctcgataagcgaaacggagttgatcacttttgcacattcctgcgcacttttggcatttgtttcttgatgtgccattgaatgtgtttatttgttgcctattcagagcagtaaattgtttgcataattctgtttaattattttttgtttacaaccaaaatattgatccgcatttttatgttataattttaattcatttttgaaatttttatttaaatggcaaacgaagacttccgcttgtccgaatgcatccgttttattgagcgaacagcccaagagtatgattgtgttctgccggttccacggcttgggtttgtcacggaaaattttcttaataattttttttaaaatagctcaaggcgcgatgagcacctggatgcctgtgttcttatggaatcagtgggctcaggccatcggctctacattttcgagtttgaggattgcctccaggtatttttaaaatatgaggtcaattaattaaataaataaataaaacaaaaccccacaggtgaaaggacacatcgaaaacgaagacggaacaagtacacgcgtgatgattgagcactatgataaatacaatgggttatgtggatttgaatcgtttttggcgtcatgtgcttttaccttttttggattttttgttcacgtttcctatgaagatgatgattgatttaattttaaaataatttttattgtatattgcgtttcacaaattcataaacaaattcatccgaattacttggccttttcaaaaattgcataataaactcaaaatcaaatcctaaggacataaaataaataaaaactaaaacataatgaccacaaacattagagaaaatcgattgaaattttcttcgattaaaataaattttccgaaaattatttgccaaatattttttgatcagatcgtttggcatctcgccataggagtcaaaaaagtaggccacccccggcgaacgcgcccatattgcgcaccaatgggttcccggcattcccgacgggtcctgaagtggcaaaatttatttaatctattttttggcactcaccaaattgacaattagactgcagggaaatttcgtgcactttggcaatcggtcggccggaaaagtgccaacaaaatattttctcgtcgcccggttctcaaagagagctctgtcgatgaaccgattgtccattcctgcgacgaatccgcctctccctcaaaaacaggtaaaatcccgcagccgcagtacctgctgcaccaaacaggtagatgaggcagagaaaaaagttgattggcgacttctcgatcacatccggaaaacacagtacaatcccttcgtgtgcagcattggaggagggcatttgaacaaaatcggaggaataattctcaccattcatactgtaaggtcactagtgattgatctgttccggtcaatcagaatgagcccgtcagcctcggcataggctattaaagtgaccccctcgttcggaaccgcttcggaaaaccgaatgttcaccgctgtacagccctccttgatcagctcaaagcccggcgagtcctcctgcgcattggtcatttggaagacatagaggcagtaggcagtcttgaacatgctgtagctgatcccgttgctctcagttgtacaggccatgccaaggtgctcctgggtgtcatggtacgcccttgcgtacctgttgttcttgtagtccaagttgtacggaaactgtgggtacgtcctgccagaggcggtcagttcaatatcccgcacctgaacattttttctgccagaaatacatgtcaaagcggcacttacgttgtggtggttgaagtaaaaggggttcttctgattgtgtccaatgtaattttggttgggcaccagcccaatgatgaccctccgtggcacttcctcggtgaacagattggcagaaaaatcgtatcgtccaccggtaatgaacagcgacttcatcagcgtattccggatgccgtatctggcgggctccaggtccaacttctttgcaatgtcaaggctgagtccgtccatcagatcaaccgtcttcactatcagcctgcagtcgacaacttcaagcgtgtacttgtccctatttgcggcttcctgatgtatcataaaatcgtccgactgcagggcgagctcaatgtcaatctcaacattgctgatcatgtacaagtcctggttgaatatgtcggcgctaagcttgcttatcgcttgaaagcccttgctctcctccaccgcctttttccttcgatcgtttactttggtcgggtcactgtcacggaaatagcctgccacgccaaagtatgatcctttccgttacag

SEQ ID NO: 9408 - DNA, 1079 bp, Heterodera glycines
catgtataattgcaaatataaactcataaagcaaaagaaatggcctttattatgagcaacttttttgaaatacaaaccttaaaaatagggcaaagaacgaaaattctggaacaaaattaaatctccgttttattagtttttgtacgacttttgcgttagtgaatttcataaaagtcaaaaattggcctactttatgcggttttcttgaaatttagagctctaaattatataatcgttataaaattatggagcaaaagtgcatgtataattgcaaatataaactttcataaagcaaaagaaatggcctttattatgagcaacttttttgaaatacaaaccttaaaaatagggcaaagaacgaaaattctggaacaaaattaaatctccgttttattagtttttgtacgacttttgcgttagtgaatttcataaaagtcaaaaattggcctactttatgcggttttcttgaaatttagagctctaaattatataatcgttataaaattatggagcaaaagtgcatgtataattgcaaatataaactttcataaagcaaaagaaatggcctttattatgagcaacttttttgaaatacaaaccttaaaaatagggcaaagaacgaaaattctggaacaaaattaaatctccgttttattagtttttgtacgacttttgcgttagtgaatttcataaaagtcaaaaattggcctactttatgcggttttcttgaaatttagagctctaaattatataatcgttataaaattatggagcaaaagtgcatgtataattgcaaatataaactttcataaagcaaaagaaatggcctttattatgagcaacttttttgaaatacaaaccttaaaaatagggcaaagaacgaaaattctggaacaaaattaaatctccgttttattagtttttgtacgacttttgcgttagtgaatttcataaaagtcaaaaattggcctactttatgcggttttcttgaaatttagagctctaaaattatataatcgttataaaattatggagcaagaagtgcatgtataattgcaaatataaactttcataaagca

SEQ ID NO: 9409 - DNA, 1287 bp, Heterodera glycines
tgactgaatttgtcggctcttcatttctctcgtcttttttgatcagatcggctaaagtgtcctttctggctgtttctttccctttactttccttttcggcctgatcagatggctttttcggcgcaatcgctgcacctttccattcgcgttctttcgcgaacatttcgcgcaatgtaaaacgctgaggtgacgaactcccgccgaactttaatagacacggccattttttaacgtcaccagcacaaaagcactgaataaagaacacggaaatgaagacacattttgcaaaaattttgttttccatctgttttttgttggaattttaaatatataaattagcaaaaaaagaaaaaattaaaatgaaactgactttttacaaaatgaattaactccagcagcaggggatttgcagaataaaacacgtagcattagccaatgaaatcaattaaatgtttgattttacaatttttttatacatattatcaaatgcggctatgcaaatctaaaataatatttgtaaaataaaaatgaagaagtttctccaaatatgtatgtgtatagaagaggtacaatccagtaccgatttcgaaatttaaaaaaaaaatttgggaaagccttcggcactaacaaataagctgtaaaaaattaaaagaaaaagaaaattaattaatttaaaataaatttatttttaaattacaatatgcatcattatttcgattttcaaggttggcatttttcatattttaaaacgcgtgaatcggtaattttttcaaaaatttctttaacttaaaaaccaaatcacaatttttgaagcatttcctaacattctttttggttttttattcaattgcttattgatcaattcaactttcatttaaaaaaaactgtgaatagtcaccgtttaagtcggaagtttttttctcttcataatttaaattcgcctgatgaatattttttaaaggcaccgacgttgccaatagcgctgccggggaaaataggaaatttttgccagttttgttaacagtttttatcccataccaatttttattttttgaactgaattataaaaattctaatgagatatcatgcggtgcaaaaaaagagcaaatgtctcgaacaccaagattgggaccgaaaacccgagagcaagaccaaaaaagcctagacttttctcgaaccgcgactcgaaacagtgatcgcttgaacagcacaagtatttattcgaaatttgaaaagtctaatttccagatttcctgaattttgagggctgggaatttctttttaaaa

SEQ ID NO: 9410 - DNA, 2542 bp, Heterodera glycines
  unsure (1)..(2542): unsure at all n locations
ttttttataaatattaacatttaattaatcggaagaatgtgntagacaccggaagtgaaattggtggagcagcgcactcatgtggcattttaaaattttgccaaatttttcacatgaattntattatttattaattattttttttatgaaatattcctttattacaaaaacattcataatttgattataaaaacgatttatttattcttaattcgttattattttattatttttttttaaatttaattctaaactatgaattttttgaaaacaattttattaatatttatttatttttctctgaatattattgaaggtaaataaaattcttgcactaaaatgtattcaaaattaccggtttcagttcatagtatgttatacagccagcagacggacgcagaaggtgaaagttcaaataccaatgaattgccaccgtcactcaatcattttggtttattaaaataatttagaattaattattaatttaaatattttaaagtcatgcaaaacgaaacaaaagagatgattggacaggaatatgcaattgcgtatttgaaactgttttatcaaattttggaagaaaccgattacgcagtgaattacgtaggcattttccaataccttaataaattaatattttaaatctgaattaaattaagacacatttggaagaccaaattgataatatggtagaaaaaattaacggtaaatttctacaaaaaaaagaaacttttggcgatcatttgtggcgagtcgtcgtgaaaatgtcgcgtcaatgccaacaaattggcgtagacattgagcaaacaatgcaacatggacaagaagtatgaattaaatcattttttaatgttaattaattttctaataaaagtttgaaagaaatttcggcaaaaaaatgtgccgcttggcaatgttcgtttcgctggcgcaattcataagcattgaaatgaaaaaaattttgtaattttaacatttaaagaaatgtatacattaactattgaatatattaataaaataataattactgccaaataccggtaattaaggaaagaatatgccaaaggaattatcccacgcgcttgcgcaaaaattcgtcgtctttttggacgttcggctgccattcaaactgctgcagatggtgctggcacgggctcaacaacaactccttctatggtacaacgagaatgtaaagcaaaattgatggtcatttatgtaagtaaaattaaatataaaattagaataatcgaagatattttaaataaatctttatttataattaataaaaaaaatttcttaattaattttctcagatggatatcaaaatgaatgagatttactttgagaagatatttgattttatgattgtcgccaaagatttaatgataaaaacaagagcagatgtcggtgatccgcgtcacatccaatcagcccgagtgataagaaaattaaattaaaaaacacgcaaatcattacttaattattcggattatttaattttatttatttatttattttctaattttcaatttaagattaaacaacaattagaagatttaatcaaccaagaacaattgctggccattattgaaacaaaaatcgaattcgaaaaagttgtcgaatgatgatgataaggaaacaaacgatcatcggacttttttgaatttgtttttttttctccatttaggaattatgttagcctatcagtcattgaaatatttatatgtatatcatttggaagacaaaaaaagaagacaatctttggccaaaagtctcattttttcaaacatgtttttaaatgataaataggcaaaaatctaatattttgggttacgttaagaatgtagcatagtgacaccaaacaggtttatataatgtgcgagaccagcaggctcgggggacgtggcatgtgctcccccccccccccccccgctgaaatgaaaaatgaaaattttttcaagaaaaaagtataatttttttgaaaattttgcataatttcttaccatatattaaaattcccaaaaaaaattttccggggacgcctatcggcactgccgggtcccagtgtatcattattttttgaaaatttgaccacagaatgtcaaaaagttatcatttttggcgcaaaacgcttcaaattcttgctttttggccatgaaaaataatattggagaaaaaaattttgaccctaagaacaaaaaaagctcttcgggtgcccttcctgaaaattatttctggatacggacctggtgatgccaatacttatcattgcaaagtgacgacaggtcttaccggaatttgttaaattttgtcaaggtaccgcaaaagcttaacttatttatgtaacacaaaaatgctcattttagtcgacttttggaacggaaacggtcaatccctgataataattggatgaattttgtaagaaaataataatattacaatataacaatttttattaattttttatgcacgaatatcgataattgattttatatgaatttattcatttcatcatttttaatattttcctacttttttaaca

SEQ ID NO: 9411 - DNA, 1714 bp, Heterodera glycines
ccaaacgtgccccggggcccaactgatcgagtcgggaaaaagcgcatgaaatggagggggggaggggaaagtgatcacccgatctggaagaagtcatctcgtcgattagagaaaaagctagacgaattggaattgtgttgtgctaacaacagagagcagagagagggaaatgtgtaagcgctaaaatttaatttgacgaattttttatttaggaaatttgaattgaaattttctataaaaatttaaggggagggaaaaccatgcctttttagattaaaattgcttcaaaagtttttcggaaattttatgcattgttttacattatgtaggtcgaaattcactcccattgttttccccatcggtcgattccttatcctgctgctgtacaatacaatccctaatccccgtcagttcttttttaatttggagataagtgcctaattttattaaactggttcatcaaatctctccttacagcgattgaaacaacggaatacataaattagtacagtaacaatacacagatggcacatattcagacattgctaacatcgcatgatggcattatgggtgaaaattatacatatacaaacaaatcggatggatttgatgggggatcaatttcattgcacaattatccgtgatttaattagtatcctctgcaaaaattctcgtccatttcgtttgccatttttctccatgccgttgttgttattgttgtaccatttctcatccgaccaggcgtcacgtcattcagtcactgtcgctgcttgaggggcttctggtcgcattcccatgggtcgtattgttggtggcattcgtcgtcgccgccgtcaatccctccagtgccgcgatgttggcattcaatgccgtcgtcaattccgtgcgcgccgcggcattggcatccaatgccatcgtcaattccgcgcgcgccgccgcgttcgtcactgcaagaccttgaaaaacaggacaaaaatttgttgcttcaaaaaaatgcatatattacgttcaagcgccatcatgacttctctctgctcggcctcggtcataggggcatcctgccgcgtacgcgcagtactccgtccacgctgtggctttctcggacgtccacgctgcttggtcgacttggaccgcttcgttggcgttgctttgcgcgccacaatccggcgacgtcggcgagacgctttcctggcggacgacgcacggcgcgacactcggcgagacgctttcctggcggacgacgcacgacccgttcccctgtttctcgttgcccttcggctcgcggaacgacgacccgtatttcgtgaacgactgcgactacgaccagcagcagttgaagtcgtacgacgagttcgctgaacggtggggaggaggggaaaatgaatgaatggtggcggaaaaagcggatgaaaaatgaatgaaaatggaggggaaagggatcaccgatcttgaagaagtcatctcgtcgattagagaagaagctgtagacgaattggaattgtgttgtgatagcaacagagagagagggcaaaaaatgtgtaagcgctaaaatttaatttgacgaattttttatttaggaaatttgaattgcatttttctataaaaattttaaggggagggggggggggggggaccagtcattttaggtgagagttgctcccaaaaatacgcggaaatttatgcatggaaaagacccaaaatcagagttttgctg

SEQ ID NO: 9412 - DNA, 932 bp, Heterodera glycines
tcagtgttagtcgccaccgccccatccgcagtcgtcgtcaatgttgccggagttgtcgtagcagtcgcctcagcgttggtcgccgtattcgtcgtcacagtcgtcgctccggttgtcaccgccgccccatccgcggtcgccgtcgttgtcgcagcgatcgcatcgaacgcctccatcacttcctcaatggttgccaagtgcgcgtcagtgttggtggctgccgcatcggcactcgtcgtcgtcttcttccgctgggcagcagcgctcttcccccgtcggacaccgcgtcgcgtggcaccgcgtcgagtcacggctgccctcggacgtccacggccacgcttttgtcgaatgcccggcgctgtcgtcaatttgcgcgtgcccttcggtcgtccgcggaacggtttgagcgcgggcggacgacgcattgccaagccccgcttcttgttccgcttccgtatgccgtagatgttgcgctcccgctgtcgacgtaacgcgcgctgctccagtcgtatctcgcggcgtaccgctgcaagcgctcgatcatcagcgtcgagacgcggacgacgacgacgcactgacgcggtccgccgtctgcggatgttggttgagacgccatatcgtcgacgagttctctgaacaacggcggaggggaagacgtaaaatgacggaacgaggaatacacaaaaataatgcaaaaaaaaaaacgccagggactgaagcgggcgcggctctattgcagttcacatacgaccataaattattttggcaaatttaatacacaataactttttcttgaagcatccaaattaaacatttttagtgtcattcgatagccataagcttcctctattagtctgcaaaatttcataaaattttgttcggtttcaaaaaagttatggctagaaaatttaaaaaaaactggtttagaagca

SEQ ID NO: 9413 - DNA, 2815 bp, Heterodera glycines
  unsure (1)..(2815): unsure at all n locations
atagttaaaaatcactatttttggcgttttatcactattttttcactatttcgacattttttggaaaattccttaacaaaaatgcaataaaaccaaaaaatacacccttaagaatctacctaaaaaaatttcaaaaaaatacacccctaagaatcaagctaaaatttttcaaaatatactcctatgcaatgaaaaaaaattttctcaaaaatttactttcttggcaaaaaattttaattttaaaaaattttttaggtaactattttgggttttttggtcttaaaaatcccagtcctactcatttgcaactgcaatcagtgaataaaaattattttggcttattttttggctgaaaattatgtcactattcgtcactattttggactttttgtcactattttggcatttttactcactattttagttaactatttcgggatttttcgtcactaaaagttgctgccctagtcataatgcaaacgtaatgaagaatcgttaaagttaataaggtgtgtgttgcaattggtgtcaatccgatttgattatgaatgggaggcaattttcgggaccatgatttggccaatttttgctgttatttgaaagctctatcaaaaacacacttaaacagtgacacattcattgagcatatcagtgagaaaatatgtggaatggtgagcggtgcacggtgttggttcagcacaacggcggcgccaagttcagccaggtacagtgcctcctcaatgcgcagaaagtcaccgtccgctcgccgaacgcccatcttggccacgtggtgggtctgaggaaagaaaaaaacaataaatagtaacgaatacaatgcgattgtatattaatgttggaaaacatattcagagtagaacataatgtcatcattggacaagttttaaatcatttttctatttaaacaaaataaacatacttggcgttgtgcaagatcgctaattagactcaattagcttgggaaatntaaaaagttacaaaaaaatataattaattgcggctgttttcggtgtctgattaaactccaaaccatactcatactcaatttatttgaataaaattaatgaatttttatttgttcgagctgcaagagttgatgcaattctaatggattttgacaaatctcgtgtccaaataatttctgggctataagatgaaaattcgaatttaacaaaatcttctattcgtttgaattcgggttagagtccgaaattacccgaaatgtcacattggtgaccttgagaacacttcagacataagaaaactcactgcttttccaatggatctgagcatgggtttgtccggccgatattccaatgtcaaatggtcatttcgaagtcgaattccattcgccattggactctgattgtcgaagtccaaacggcgtttcatcaatttctcgaaaactttttttcggataaaatacttatgaaaaaatataaaaataaaatggaaataaacaaaattcagaatcctaagaaaatttgccggcgtttatttattcgaataaattgttgaaatagtcatggaggaagtcagtcaaaaaaataattaatatgagtataacacataaaaaaaaattttgtagtcctgccatttttattactgtacatcaccttcctgtagtgcgcaactgaaaattgagccaattattaattaaaataaaaaattttatttaatatttttcgcaaccatttatctggtttttaaaatagtttatatttataaatttaatatacgtaacgaagtttccgaataaaaaaaaaattaaaatgaaaaccagaaaattttttttaaatgtaagtaagttatgaatagagttcatatgcaatataaagttgttcatttggcatcaacgtaaaaaataaaataaataatacataaatttaaaaggcacataaaacaaaaaaaagattaacaatttaaaaacgatcattttttggcataattagtttccaacaatgcattaatttttcgttcattttcaagcatattggcggatgaacgtgccaaatgttcacgcacttcgcgaatgtcgttgtccaacgcgcgcaacgttgtgctcaacgcaacaacttccgaactgacgccagtggagcgttcttgcaactttcgttctaccaccagcgactgcttacgacactcctccaactcgcgcaacattgtgtcaaaatcgtctgcagcaaattccatggtccgtaccaagggctgaacgttctgtgtcgcccgttgcagaacccgttgcactgactcaatctcaacgcgaacccttcgctgctcttgcaaatcaggctcatccgcttccacaaatgggccatcctcctgcacatttttttcgggggtttaagagtcacacaaggtgcttataatcggagaaaatcgtttgatcaataaaattttttgtggtcaaaatttctttgaattcaagtatataagcataatatatgctcagttttaacctgtaaatgcttctcctcaagcatgcgtgtgttctctacaattctgttcaccaaaatgccgtgctcatcaccctgtcgcaaatttgtaacatttgcgccctcagcagcagcacccaaaaacagttgatcatcatcatcctctgctatcaaaaaattttcagtctctttggtcgtttccttttcagcattttcttccagaattaaggcgacttgttgttgttgctgtttatcagtagatgccaattgatcctcctcctctgttaaattgttatttgttggaataacaattttctttggctttggcggtgccatccgagcaaccgcagtgccaggccttc

SEQ ID NO: 9414 - DNA, 2120 bp, Heterodera glycines
  unsure (1)..(2120): unsure at all n locations
tgttgtgtaaaatgatgttgtcgtcattcatctgttgtgtttctgctgatggtttaggacattntcatcaagcacagcagcatcgttggcatttttaattgacgatgctgacttcttttttggcaacccctcagaccgcttcttccttttctcccggtctgttgaaggcttcttctccgccgcagtttcattcgaaattcggtggttgccatttgttctgctgattttgctgctgctcactttgtcctttgatcgatgctttgttaatgatgaacgatgatgctcttcctccttcttctccttgtccctcctgctgctgctctcttttttgcttttccttttctcgtcatcatcatttttactctttgatgcggatggagaagaagccgcttcaacagtagtcgatttggactttgatgaagcggaggaatgggaagcacttttctttaccgctacatccccctgctgctgcttgttgttgtcttgcttcgcgtacattgtggcctcagtggccaatgactgtagcaagaaattggtcatttctgcttccttgccggccacaatttttgctggcttcacgtcgtcaaggtgaccgtccatgttcagcgcgtcaattaacttttgtagaaaggccattttattgtcgcgcgacgagccggcttttgttgagtcaagctcatcactcgtgaacagaccgtccaaaaagccggtcacacgtaatgtctcatgcacaatgtcgtggatgaatttgaagggtggtcgctgcaacagctgatcagtgagagttggccgttggatgagcgtggaaaacaatgccttcgtttgatcagttgagcccatatttttttaactttttttttctggcaacaatgattgatcaggagctatttttgtagaattttttggataaattaattatggctgaagcaaaaaaaaaaattataaaaagggtgtaatttaatttcaaaattaatccggtgtttaatccaaagaatacaaggaaattataatggaagaagcggtcttaaaatggatttatcaagagattaaggatcatccccgacggattattagattacaattattgtattttgcaacaatgattaattgggcattgaaaagatcttactaaaaaaacccccatcaaaaactgaaatgagggccagattaaaattccccagggggcactaacagttcaattgtgataataatacgaagaagcaatttgtgtgttcagccgagcggagggaggagggcaaagggttgtcatagagaaaggaattaatgaaaaaaatttttttttcaagtgtgtgtgaattgcgccgctgctgtgcggacgtgtatgtgcaatgatggcattttcattcatctcgccaatgtgcgtgatgagtgccgtcgccctttttgtattacacttattttttgatgaagaagccaactaacaatgcggccctgtccggtcggttgcctctctgctgctgctgcgtgagcggtgaatgaatgaatggtatgatgaatgatggatggacggacggacggcacggcacacacgcgcacactcacatacatacaaattttggcaccatgagtgagcatgcgccgagagagaacattcattgtcctcccccgttttcgctctactcttcgcttaaatttcataaaaaatggcacccatccatcatccatccatacataagcaaccataaaacacataggttcttctcggtaacacacccacacagtgtcgaatgtgccgccgtgtcctgtgcgaacccacccccctccaaagagaaagaggacaagacaaatgtgtggggtataaatagctcacatgtacatgtaagacagacagtgcgcaccaatttgggcaaaaatgagggcggtggggaagggtacataaagacggtcatacttttggcacacatgtgcctagaaaaaaaagacagagaaaaatgaaagaagaaaatgccggaacatcaggcagcacacagaccaacaacacatatgtgctgctgccagatataagtaagtattgccatagcaacaaaaggcagtggtaatgattttggctatgtcagcagccagccgaagaattttgggaggggggggggggtgttttg

SEQ ID NO: 9415 - DNA, 1656 bp, Heterodera glycines
ttaaaaaaacagtctgcccccccctctatatgcacaccaaaattggtaagagaattaaataaacaaaagtgtataaatttgtttttttgtacaaaaaaaacaacaacaaaaacaaatgaaagtttaagtcaatgaaaaaagcaagcaaacgaccaatattttcaatttgtatttgatagtgtaaataaagcatacaatagatgccaaatgaacaacattttctattaacaatctatattagaatttcaatgatgaaaaatatggtaaatataaacaaaaaacaaaactatattttaaaaaaaactaaattatggtgcacaattttttttccaacgtgtatatatttatttatattatttatttagcatacttgaccataactaattactttggaaaattataataactcacattttgtatattggtgtgggtggtgaatgatgatgatgttagaagatatgagcaattaattgtgtgggcgttgtttgtgttccgtccgtcaattccttgtcctgccaggctcctccgcttcattgccgctggacggttcagcaacagcatcgttgtgttgttgttgttgctgctgtttgtcttcgtcggcggaaggcaaacgtggcatatcctttaaaagcaaaatagtttatatttttaaatattaaaattctaaaattatatatttttgttcgattatttgttaatgttcttaacaagaagaaattttagtttttttcaaaaaatattttaaaaaacatgtacttctggcaatctgtttaaaaattcctgtattttaatgtcattttttaaaatttggatagggaatgtgaaggacatggatgtcttggacaaaataggaaaatataggtcctgaaaaaacccaggttgccgaaaaacggccaggacctggaatccaggaagaacccaggcctgaatcaaggtccacaggtcgtagtatcccaaatagcactgatgactgacctgcacacagtgaatgacaaccgctccagcaacccatgtgagcaaatgggtgggcagttcaagtcgcctgcagtagtagaacaggttccaaaaaatgattgggtgtgcaatgcgcatcccgggccgtgccaacaccagtgcaccatcggcggcattagtcaccagcgtctccagctcacggcgcaacaccaacggggaaatgtaggggacggtaaaggattggacaatctgcacaatagaaaatagatagagaataaagcgaaatttcagcatttaatggtatagtggtctatgtgcttgactagaaaaaaccagctttaaggttcaatcccagtgagtgcgggaacttataaaatttattttttaacctacaacattcatgagcaaagcaaattttcttaattaaaatttttacaaaaaatatttcgcacctttcccccttcaaccggttggatggatgaggatgatgagacggccaacgtgtcgtcatcagaactattgttcaactcttgttgtgattgaggcattcgcgttcgaatgcacaccttcagcgagggcaaaaatgtgtgctgacaatgggggcatttggtgttcaaattgccatcatcaattgcccatccaatggtcaaatccacatcatacaccagctggtcacagttggaacatggcgacgtgaacaga

SEQ ID NO: 9416 - DNA, 3065 bp, Heterodera glycines
ttccatgcgtttcctgaaataaaggccattcctaaaacggtgttagagttggagttggggagggaagtgggactgatcaccccaggaccccctcacaaaaatggttggatttctaagggttgggagtcccaaggcctaattcagcgcgttccactggcatgtgtgttactggtagcaccggatggttaggcatttggcctgggcggctaagggacaacccataggaaaatgttagtgagggaaaagcatggaaatgatggccatcagtgagtgcttcggcaataaaaagaaagtcctccggaggcggtaaaaaggagaaaagaagagagtgaaaaaagaatgccccgataaagtcagtgaataccctttgggatgcccttttggatgaaaatgcccattaggatgaaattttgaaaatttgggatgccccttaggatgataaatagataaaaatgactttcgggatgccctaggatgcccttcgggatgaaaaaaaagaagaatgccccgggatgcccttttggatgattaaatgcccattaggatgaaaataagtgaaaattttggatacccttcgggaagacaaatacatgaaaaagaaaattcaggatgcccattaggttgaaaatgtgaaaatttgaaaatgcccagtaggaagataaataagtagaaaaataaattatgaattaggaatgcccttctggatgaaaaacgagagatacccttcgggaagaaaaagagaaaaatcgaaaaaaaatcaaaattagtcagttaaaaaaaaaaaaaagattaaatgtgaaataaaagcaaaaaaaaaaaaatgaaatacaaatatacaaaaaaatacagtaggtccttcgggaagacaaagagatgattgataaaagatatattaaaaaaaaaaatacatagaaaattaattttaaaccatatacagtatacaaaaaaggggaactacagtactcaaaaaaaaaagggggggaattttgccggatatgttgatgaacaaagtacgctcgcagtcagcactatcgctctggcccatctgctgagaacattgctcgcttaacgttagcaatgcattttctctcctcctctcttccccccggcgctgttttccctttgtaatcggaagatctgttgcaattcacacatcttttcacagtcatctcttcccttcttcttcttagtcttcttccccccccggcgatgatgggcggaggatggcgtcgcttggccgtttactcataatacgccaataaatatgcggatttatacagcacatttcattcttcccatcatcattcgttttgtgtcactttattattgtcccatttgctagaaatgtttattaagattttcaatttaaaattaattttttttccacattcctttagaaactcaatttcaatttaatttaatacaactcttcagtgcaaattgtggacattggactgtcaacgaaagccttggcaaggacaaatcgctttggcatttttctgtgagtttactgtaatgggtactgtagcagttaagatgggtaggatttttgaatttttgggaccattttggggacaaaatctgttgaacttttgtcaattattttcatggtaatcctgataattcaaaatattggccaaacaaaaatgcggattatttaattacttgttggtgataattttactttcaaattataattaatgggttcctaaagggcttaataaatcaatttattttgtgttttatgagttataggagtttttaaattacggtaaatcatatgtcaaatacatgacatttgttaacattttgagcaccatttcaggctcttccttttgctgtggattttgttggacttggactgaattactggttgtttatctgcttgaaaggacaattgcaaatcgcttcggcattttctgtaagtcaacagtatactgtaatttatgggttaatttttcaaatgacatggctaattaatgcaccgtttgcattaattaattattacagattcctaaaaccacagtaatcaaaattgggttaatcttttcaaatgtacagtaatttccctatgcttttggttttctttggtcaaatttgagtattattggttcaaaaacgatgagttagcaataaaaagagtaactgttgacattttatgattaatgttttacttttaaccacagactcattaattcgaatgtgacattaatttcaattattaatttctgggaataatttcaggtttctgttcgcatctgactgataaatcggactttgtgagccttggcatctgcaaattgcctttgaagcccaattaagtgagtccaattaatcaatgacatccaattatttcacacattgggggtgagtgattaattaattaaattgttcgtacacatgcattttggcttcaaattaatgcatttattaaatttcaaaaatggtaattacagtaatttttttttcttttcgataaaatcaaatgtgtgaaaatcaaatttaaaagtttgttttctctctctaattaatcaaccaatccaaaaaaaaataattttgtatcaatgatatgataatgcttaacatatatgtctataatcttttgtttttattttggtgcatttctaataataattgaagtttattgggataaccttaaatagtgttttcttcttaaaatttttttggaattattgatcattggcatttttcaattataattaattgcttaaataattaaagttgtaattcattcagatgaacgaaatggttatactgtattacaattaacactgtaactcattcaggttttggcattgtgtttttgctttggaatttgtcgtcgtcaaggacctgagcagcgtttggattttggatttggaatttgacgcaacagcctttgaacactttgatcttctgtggccaagggttggtcaaatcactgattattgacttaattattcaaattattcaaaataataatacaagacaagacaaaacaaaataaataaataaacaaacaaataaacaaaagggaaagaaataaaattaaattattgcttcgg

SEQ ID NO: 9417 - DNA, 1576 bp, Heterodera glycines
  unsure (1)..(1576): unsure at all n locations
attaattataacagattcttaaaccacagtaatcaaaattgggctaatcttttcaaatgtacagtaatttccctatgcttttgattttatttggtcaaatttgagtgcattattggttcaaaacaatgggttagcaataaaaagagtaaatgttggcattttatgattaatgtcttacttttaaccacagactcattaattcaaatgtgacattagtttcaattactaatttctgggaataatttcaggttttctgttcgcatctgactgacaaattggactttgttgtgagcctcggcatctgcaaattgcctttgaagcccaattaagtgagtccaattaatcaatgacatccaattatttcacacattgggggtgagtgattaattaattaaatggtgtgtacccatgcattttggcttcaatttaatgcatttattaaatttcaaaaatggtaattacagtaattttttttcttttcgataaaatcaaatctgtgacaatcaaatttaaaattttgttttctctctctaattaatcaaccaatccaaaaaaaataattttgtatcaatgatatgataatgcttaacatatatgtctataatcttttgtttttataattttggtgcatttctaataataattgaagtttattgggataaccttaaatagtgttttcttcttaaaattttttggggattattgatcattggcacttattaattcaaattaattgcgtaattatttaattattataattcattcagatgaccgaattggttatactgtattaaaattaatactgtaactcattcaggttttggcattgtgtttttgctttgggatttgccgtcgtcaaagatctgagcagcatttggattttggatttggactttgacgcaacagccttttaacactttttgatctttgtggttcaagggttggttataatttcgaattaattattcaaaataataatatacatataaaaaagggacaaataaaataaacaaataaatagaattaaaaaataataattttttaatcttgcctcggcaatacaaagcggaatggatatgtttatctaaatatatttggtaaacactaaatagatgcaaaagaagtaatttaaaaaaaaatacttaggcatttaattgtggattttattgatcttggcacatttaactaagtaaaagattgagtagacttaagttacatttatgaaccaaaaaataaataaaactttttagaacttgattttaaattgagggcatacctctcgaatgcattaaaaaaaatatcagtgtcaattctctcattagtctataaagtggacctgaagagatgatgattaggtgccttctagaaaatgtcggacagtcaacatttttacaactttcagaaagcaaatgaaattatcaaaatcagtcacgatggcgaactctatcaaaattttcatcaagggacacagttactcaaatgagccaaaacatttagacataagataattcagagtaatgagaaaaatgaataggaaattacgcggggccattacgcntcggcaagccaaacaaaa

SEQ ID NO: 9418 - DNA, 918 bp, Heterodera glycines
aaaatgtttgcaatttttttgtttgacgtagacataaaactttgttacattttttgtttacctaacttgttcggatcgaatgttggatgtaattttctctggttgaatgtttggaacaaaatgtttgctacatttttgttcaggtaaacatgtttcggtgaatgtttgccacaaaatgtttgcaatttacgttttgtgctacattttttttgtttgacgtaacttgttcgatcgaacgtttagcaaattttgtttgacataaatttgtttggacaaaatgtttgttacattttgtttgatgtcaaacttttcagtgaatgtttggcacaattattttttatttggcaaaacgaatgtttgcacgcacattgacataaacttaacacatttgcaacattttttgttagaagtaaacttgttcggatcgaatgtttgaaacgtaaatttgttttggttaaatgtttggcaccaaatatgtttggcttaaacttgttagggtcgaaagtttgtgcgcgttttatggtttaattgttttgacttgaataaaacatgattcattcggcgctactgtaaaagtgggtctttttgaaaattaattcaaaaggggggacccttttgttttgcaaaattttttttgtgatagtcataaaaatttattctctggggtttttggggtccccgatcacgaatccttcaattattttgatcaattccgatttcctaatctaaatttgaacaaaaaatcataatttgaaaaattcaaaattccgatttttattcgagttcgggttagggattagaaattagtcaaaatacatgtcagattcgtgattagcgacctttaagaccccggataaaaaattatcatggttttttatcacaaaaaaattttgcaaaacaaaagggtaaccgcttttg

SEQ ID NO: 9419 - DNA, 2619 bp, Heterodera glycines
tatgatgtccaatttgtttatttactgtttaagataatttccgaggttgacaaagaccgatgcatcgcattgttgaggacattttacgaccgggaaaatccatttgcgccggaagagaaaagaaaaacaaaaaatggcggccaaaatttcgtgacaaattattgatgaatattaattatttttaatggttcaaattattctgaattgattgatgcaaaaatggattaaataggaattgttatacatattcatttatatatttttaataattatccaattttaattttgtagtgcttaccatcattttattttttttgaccaatggccaccaaaaaaagacaacaaaaaatgtcggaggaaaagcaaattgggcgaaaaaaaccaaggagtttggaggtaattcaatcctttttctcttttgtatttcttaccgaaaaaaactgaatagtgatcacaaattccttatttttaaaatccattaaatttagaaggaaaatgtcgaaacaaaaattgacgacgacgaaacattgttgaaacggttggacaatgtgttcatggtaaagcatccgccggaattgctcaatttttggcgacacgcggtcaaactgaagcccaaaaatccattgggtatattatttttcaataattaaaaaaagaattaaatttgcaactttttgtagcgggggttggaaaattttttttttttttctattttgttgcatttctccattcttgggataccattggcctacctacacatgtccccctatacagatgccttttcggaattggactcgttggaattggtcggcccttttttgctgcttgccgccgcccacagcgaacggaacgccaaaaataccaaaaatggcgccacagcaacagcggacgaagacgcacagcaacagaaccaccttttgttgggctcacgctttgccaccgatttgcccgagatggaaactctgctggtgcaccggggcggccgcttttgctattggcgcgatgtgccgggggaaatgccgaacattttggtgcatgtcgccggtggaggggagggacatgaccatcagccgcaacagcacttcccggcgatgaccatttgcggggagcgcgacctttttgcggcactccaatttgtgttgaacaaattggtggacacgggtacaacgacgacggcaaaggcgaagagacaacagtccaacaacaccggcaccaccaccaccagcaatactgggtaataatgaagcaactaattgcccaattagaaagggtccggaattcaatgaaaatttcaacaaaagtttttttagcgattttttcaaagaattctaatgaattagtatttttcaaaaaaattttcccaatttttttttgtataaaaattttgtgtactttcactaatgacagttttatttacttattttttcatccctttccctttcaatgcgcagcgtaaaacctgatcaaaaattgtcacatttgttccccgacaatttcggcatgtccaactatgggcccgactatttgcaaatgttgaaaaagcgacgtgccaaagagtctctcggcatgccattccatggcattggcatcaaagtgcccgtgaacaacaaaggcattggctaccgaccgctgtcggacgacgccaaggaaaatggtaaaattttcttggtacgcccattttaacatcgtaaaatttacgggtttttttcaaaatttctcacagtaaatttagtcaacatttcagcacaactgaagcgaaacatcgaaacaatgggcacaactgacaatgaagagaagaaagctgagctgaaggagaagttctaccagatgtattcatgggttcaggtgcgttttatttttattcggaaaaaagttaccgaatttttgcttggggtgtaccacacccggcaacaaatcctttttttttgattttcacattatttttttgtcgcatatttttaaaaacaactttcggtgaatgtgtcgggtctggcgtagacgtcgccaagaaaaatttagaaaactacggcttttgtgacgatttttgtgattttttttttttgaaaaaggcgaagttttgttttcttttaagttcgcaaatgatgaaatggacttcggcatgggcctggaatttgggcacgacctgttcatgtccaattacgcgtgctttgacggaatggccaagtctgtgctgatgacttcgtacgaactgttgggccgcaaacagttcgccacactacttgagaagcacatggaagtgaggcgtcatgaaaaatgtttttgaatgatcgacggaccagaaaatgaccgacgaatttgtcacatttattcattcatttatttttaccaaatcgatctcacacacattcaatgaatgttctctgctttgtttgcccttttcattttgacatttatgcatttgtttaattaaactattttttttacagttcggagtgtgcttttggtaatgttctgtgcttggcacaaccccaccccagggtttcgaccaaattcgaatcccgaacccggattcgaacaaaagtacaaaaactcaattttaaaactgcattttaaattcaaaacccggctaaaaatgcggaatcaaacagtaacgcatta

SEQ ID NO: 9420 - DNA, 2545 bp, Heterodera glycines
ttcgaacttttgttcgagttcgagtcttcgatttggtctttgtcgaaatggatcctggattcaaaatttttttaaatttcttagtgtttagagcacctaacttgaaaaccaaagaggtaagtagtcagcttgatatttccattaacaaactcgcctaaatttttaggcatgtttcccatgatagatcaaatttcaattctgttcaacattttgtcatcaacatttataaacgatcaacaaaaaaaaaaacggtgtaacaaaaaacattctgtatttcctcaaatgtttgacgggtacaacatcacacggattcgcttgcccatggcggtcggcggcaaattgtgacgaaacttggcacgcaccactcccgaattcccatgcacgcgcgtaatacgtccccaaattgcacgaacacgcgtcttcggcccaccaccgcgtgcgattgttttgtgccccttgtacatgtagacagcacgcttcccaagatagaaactggcatccgactaaaaacggggcatttattgcacttacaactatctaattgaagcgccgaaaaatttggaataaatgcgtgaacagaaaatagtcaagaaagggggctaatctttcgcggatttcggtccaacatgaaaattaacatttgtattcagggaccaaaataaataaataaaataaaacacaaaatgaaataactttcactcactactactaaaactacaagcatagcaattccaaattaatgcaaacagaaaccttgtcattgaccccgtcaagcttcagcagggacgtgttctcgtgctgagaacggtgtccgcgtttgtacccggtaaacaccgccttcacataaaggcgacgtgccgacttcggtccggcacggcgacggatgggctgttgttgcgattgttcggcggcttcgaccattttcccttattttgaataaattcgcaaatggctgcaaaaacagtttgaaaataaaaacataaatcaaatatgcaaaatattaatgacacagcatcagactgtaaaaacaatggatgaaaaacgattgtaggaaaaaatgatcaatttatgcatcaaataaaaaaattaaaaaaaaatccggacgaatcacttttttttcttcaaaataattccgcttaaaatcgccgcctgcctattttttcttgacgatgtagttggacaattctccgccttttcctgctccaccgcctcgtcatcgtttaatcggcgctcaattttaccaccgtttgcccgcccaaccagtcgttccacttcacgctcgtcctcctcctcctgcacacgaatttggtccgcaaatgacatcgcccgttgctgctccgtctcgttgatgtatgcaattgcgtcaatcttctcatagcgacggttcgactcctgcaactcctcaatgtgtcctaaatttagagaaaaattcgggttccgatgttatttttattggactcggaatatcagactaattaaatgacaatcccccgttttaataaccaattgaataccaaggtgtgactaaacaatttttctcgagtttccgggtttgaattgtgtcacttttaagcattggatccggaatttcagacaaatcaaatgaaaattcccgatttaaaaaccaattgcatatacttttgtgatgcctttgacatttttggtggctgggaacggtttctgggaaacctaaaaaattcaaaaaccctaacctaatgcctccatttcaattttgctcattttggtccgcttctccaacattttcattgcgtccgccttctcctcctcttccttcacttcctcccgcctttcctgctcctggtagaacttgaatgcatcaaagagccgtgttgcgccatgttccgcttggtagtcgacattttcaatgtccgtcttgaaagttatttcggctaagcaattcggacatctaaaacagttggatgagtcaaaaggaacgtaattttatgattttaattgttgtttcatgtactcgaagattgcaaattgcataaaacaggaccaattctgacaccttaaaacacgacacacggattcgtcttatgaccaaacaacttttgtgtacaaaatttggtatacaaaatccgtgaaaaacgctgtaatttaatgattgtgattcattgtaagaccacaaaatgactccaagccagaaatacagttaaaaattgtaaaaataaacctgaaatagaagcggaagatcttcaagcccaaatagttctctccctcggctgtctcgcgtcgcatgttgaacttcttgcccttgtaaatgtactcattgcaagtgttgcaccgcatgttgaacggtgtcatcacacgttggatgaactgacggttccgtggctgtttggcctttggaattttggccgggtcaaagtccggcgggtagtatttctgcaatatgttacatgttttaggtggtgtgaattggtttgaaaaccaaatttcaagaacttgcctggaagacttttcgttcggttccagtcattttggacgaatattactagaacagtgaaatttgtttatctct

SEQ ID NO: 9421 - DNA, 1175 bp, Heterodera glycines
aaattgtgctcactttgcatttcatttggcaactcatttcgcgtcaccgtctctacttcacttgatgcaaattgtgctcactttgaattacgagcaatttgctcacgcattcatttggcaactcatttcgcgtcaccgtctctacttcacttgatgcaaattgtgctcactttggcattcatttggcagctcatttcgcgtcaccgtctctacttcacttgatgcaaattgtgctcactttggcattcatttggcaactcatttcgcgtcaccgtctctacttcacttgatgcaaattgtgctcactttggcattcatttggcaactcatttcgcgtcaccgtctctacttcacttgatgcaaattgtgctcactttggcattcatttggcaactcatttcgcgtcaccgtctctacttcacttgatgcaaattgtgctcactttggcattcatttggcaactcatttcgcgtcaccgtctctacttcacttgatgcaaattgtgctcactttggcattcatttggcaactcatttcgcgtcaccgtctctacttcacttgatgcaaattgtgctcactttggcattcatttggcaactcatttcgcgtcaccgtctctacttcacttgatgcaaattgtgctcactttggcattcatttggcaactcatttcgcgtcaccgtctctacttcacttgatgcaaattgtgctcactttggcattcatttggcaactcatttcgcgtcaccgtctctacttcacttgatgcaaattgtgctcactttggcattcatttggcaactcatttcgcgtcaccgtctctacttcacttgatgcaaattgtgctcactttggcattcatttggcaactcatttcgcgtcaccgtctctacttcacttgatgcaaattgtgctcactttggcattcatttggcaactcatttcgcgtcaccgtctctacttcacttgatgcaaattgtgctcactttggcattcatttggcaactcatttcgcgtcaccgtctctacttcacttgatgcaaattgtgctcactttggcattcatttggcaactcatttcgcgtcaccgtctctacttcacttgatgcaaattgtgctcactttggcattcatttggcaactcatttcgcgtcaccgtctctacttcacttgat

SEQ ID NO: 9422 - DNA, 2148 bp, Heterodera glycines
  unsure (1)..(2148): unsure at all n locations
gcagaacagcgactgttttccagcaaattcancccgctcccccccgtcgcaatatttcatgcgaccaaatgtgtcgaatacttagagacaacaacatcagcagcatcaaacccagacactttctgctcccattctgactgtacctgaaagccgttttcgggcagaagcaccaactccgtcagtgtcctattctgcttatggtgtaacacaccaacccttgcgggttggacacggtacaatacaaaattaataattatatcgccttactaccatatggtaataattatatataaaatcgccttatcaccataagggtttggattcaacaaaaacccactatttaaaaaaaaatttgagtatttagttcctccaccatccggtcttctcactgcgcatcagtttccgattagtggcgctattcctttcgcggttgctcaccctcatagtcagcaggcagctgcttactttgttcaacagaatagagcgcctcaaatcatttaccaaacattacagtaatgatgatgaaacttatttggagagtccttggaaaattgaggaatgggtgtacttcaccaaaccctctaaatgataaatgccttcgggactgagccgtaaaatggtttaaaacacacaaaagtgcactatgggtcaagcccagatcgtgtcaaaatgatgtatgaggtacagtcattcctcaatttttagtgaattattttagttgattaaattatttatttactatttttgaattatctaggcccatctcttccgtgtcgtcacaactttcaacacaacagcaagctgaccacgatggtagcctttcccatgcgctcgctggtgcaatgaatcctgaggatttatgataatcttctcaatttacctaatttttattttctatttcatttataaataaattggtttttgtagcgcagtcgacaaaagcttaaaaagaaaccaggctttattaaattataacgacaaaattgtttacataaatatatcgagatattgccaaatataaatatcgaaaccacaaaagttgagaccgatgctgtaacattgcccagtaaattctaaatacaacaacatcagcattcatttaacttattccaacctcagtgggttagccgaatatgtgacaaatgtatttccatcagacattacgaactcattcaaaaaaaggtcaacagctccgacgtatttccttaaaactgcaacgctcttcagtgccaatgccgtttttaggccgagttctttaagtttgccttcagtattcaagttcaaaatagctttgaaactgtctctgtggtttggatgtccactgatgccccattcgtcaaaagtgatcagtccatcgggtttcagccgtcgaatgtaagagtaaatcagcgcagaaaggctggtgatattccaatcgcgaaaaccatccgggaatcttcgctcttctggatccacaaaagagatgtatttgggttggatgccataaacagaagcagacgaatacaattcatttcgcctaatcgttccaagtccctcagaattccccgacgtaatgcacaacaaatgcaattgaacaccgatagatgaaaggaacaacagagttggtccaaaaaacatcctgtgaatttacccaataaatttgaagcaaattctatgcccatacgtttcatcatccgggtgcgcaatgagaagaagccatcgttcgccaaatttagcgggaaaaattgttttgttgtcaaaataaaaatggagagcaactgataacaaactgactaagaaagcagtgaagaaaaatttaaaagctttttgcatcctttctttaacacgagtggtttaaattaaaatatacataggtgtattaaaactaggacagtctcgaaaataggtaataaatggaacaagcatgacaaaactagacttcgacctggacccaggcctgaattttctttgatccagatcccgtaaagaaaaccaaattcattttagctttagtgctgaacaaaaaatcacttaattttttcccttcccctaccgtctgctaccctaattatcgcttccaattgtaccctaaggcaacaaagcaaattttgagagatatttgggtatctattaaccagttttgacccacataaattttttttgttttta

SEQ ID NO: 9423 - DNA, 1503 bp, Heterodera glycines
gcacatccaatcagtgaccagctgggatggacatctttgaaggccaaataaaactgaaaatacagttgtaaaattaaataatattttaccaattaattaccgtattattattgttgttatttaaagtggccatttttagaatctaaattggcttgacaatatatcggacgacgacctaaattttaatttatttaagcataattgcggtttataagccgctttataatttaaattcagtgtgaaaattttgtaaaaatagatattaaaaaaatattgttaatattatcatttaaatgtttgcaataaattgaaagaaaatttaaaaagaattatgcattaactttataccattttgtgtaagttaaaaatattttctgaatttttttttcttcttaaaagtgtggttatttgaaaaggactgtttggccgagttgttagttaattaactaaatatgtaatcatcaaactcctaacatctaattaattgaaataatgaatacttgtcatcaatgacgcattttcataattataatttgatagataaattttttcttcaatttaataaagcataaaaaaaaaaataataaatgagagaaaattttcaaaaatatttcttttatgagttaaaaatggttgatatacttattagagctctgtgtggctttttgccagaatttaaaaaatcactttttttctcaattatatcaaattacggcttaaataaaaaaattaacaactaagtgttagctctgtatgtttcgggtcaattaatttatgacagattgttttttctcttattacgaaaagatcatttaatattaactttttcattagttctttgtatgatgtcaactcattcacctgctatatgactttcctcacaatgtacctatgtacaataataataaagaaaaaaatttttgtttgtcattaatgcacgcgttttccgcttggtttgaggtgtatacgatgacttttataatgcctatttttgcatacacgtttttatcattaaatcaaaactttttatgtgggtcaaactgtataagtaccgaccgatatttgtatgcgtttttttgttgcatcaaaaacatcccccctttccgctcggctttagccattctttttattttacaaaaaaattgtatccgacttaaaatggctggttgtttggatgcgctcccacatcaggcacacttcgactgggataccaaacggaacacatattcagccgttgcatctgggtttctggtagttttttttctggttgtttgttgccaattttataatattttcagttctttttggcttggtggcttatgattgacacagcggtcactgcgcaaaaagcacattggacaaattggtaaaaatggtaccagttaactttggggggtttttgtcgtcttttaacatgaatttggtattcattttgaccgaatccctaacccgaattagaaacatgtcgaaaatttgcaagattagttttccgaccttttttcg

SEQ ID NO: 9424 - DNA, 1574 bp, Heterodera glycines
atgtttatgtaaatcccataagttgtcctatatgtaaacgagttgagtttaagggttaattctgtctccaacagcgcaatccaaggcaattaccttgacgagggagtcctcggagtgaaaggtaatgtttattatccaaataattatgcgaaactcgtcacaattaggtgctcgcctttggcttatgttcggttttatcggatcgttcgcctgtattgtggccggcgtttgggtcatgtaagtccacttattattttaaataggtaattttctttctttaggttcggtgacttcgtacttaaagaaggacaaaatgacaattggccgggaatcgcgctttttctccacacattctttatttttgtggcttcattggtttacaaatttggacgcaccgaagaattgtgggagtgaaaaagaaaagaaggaagacgtcttcagaccatttcgactttttccctgtaaacgatgtactcttgtaatttcccattgatttccaacttttacacttgtcaaattttctttaatcaaggaatgacattcaaattagttctgcataaaacaatttctttctacgaattcgaaacaaatacagtattttatttattctgcctaaaattacaatttctttatttattgttagtaaatgtttttcgtttacctccgtttagtctccgcttatgttttctcatcagtgtgtcctaaaggcatctctcttttctcgacgacaatttatacgattctcaaactctgaggtggaatccctttttgtccctttttcctgtatgtttcttatcttttaaattccgcagttgaggcgttcgacgcgtttatttcgtcatttccatgccttacctccctctggtgttccagttaatgtaagcgaccaagttaagcttacaataagattttaatttgcaaaacatgggttcggattaattgttctttcggattgtgattatgtttaattgaagattgttttctttttatgccttttattggtgtagggcctcggtggcgcgacgcccagtggcttggaaatggccaaacgactcgcgcgccacgtttggcctaagggacagtggcgcgtgaagggccgtgtacttttcgccttttccttgctcatcgctgctaaggtcggtgatccatttagttattcaaaatacgttttctccagcttctgaatgcgaccgttccgttcgtccttcgcgacatcgttgacttttttaatgggaaactcccggcggagctgtcgctcggattcgcattgcctggcgaagccattctgtcggcgggaattgctctgataattgcctgttagtgtttttgacaatgaccaaaaattttttttttaattttcgatggcgccgcgaggggcggcacttcgctcttcaacgaagtgcgttttttcggtttgactccttcccgcaataggccgttttccagcttcgaaacgctgtttttgcgcgtgtcgcccagcggtcaatccgcgacatttcccgtaacattttcctgcatttgcacagcctcgacatgtcttttcatctcaatcggcagactggcgcattgtctaa

SEQ ID NO: 9425 - DNA, 2498 bp, Heterodera glycines
gtaagcaactgaagggaaagcgcggatcaaacgaacccccccccagggggagggcacctgaatgaagcaagtgatcagaccgatccgagtcactccccgcttttctgccgcgaaatgattctctcgcttcttcctttcttggtgagcagcggcactcagcagactgttggcctgcacttgtgccttctcattggccaaaagatgacgacggtgtctgtttggccaaacccaaaggcgccacacaatcattacggtcatgaaaaccttacaaattaaggacaaatgaatgagtggggtggggatacggtagcaacggcacagtatggcaaattgaatttaaaaaacttaccaaaagtgttaatggaagcaaaatggagaggagaaggtcggccaaagtgtgcactttctcgaaaaaacccatcacaaaatctaaaaagggaaggcacaacagaaaaagggcaacactttggaaggactgactttgggaagtgtttattttgacaattgtgcgattgcatcggttggacagcgaaacggtgcgattgagtgggtaaatggaggcgaggataagcctaattagggggagggcttcatgaaattgccccgggaaaagacatacgcggcgaagaaaatgaccaaataactgcgccaaacggtctgtttagtgcagagagtcttcgacttggaggggaagaaaatgtggatgtaacactcagctgaaatgggaaaaaggttcagtcgaacagaatgaggagaatgaatcttctggggccatcatcatcattagccaatttcgcttttaatagcgcactttaaattctgagagaaatgacttttcatagtgccaatctccgttaattgaatttgagtttattatggcgttttcgtctccaaaataatgttcaatttgattttctctggctttcaggttgggttgaataatatgtactttggctttgccaattggcttatgatggtttttcaattcccttcggtgcgttccatgcccacctgtcattagtacggtcagccacatcgcacagaagccgaaaacatttgtcaggtaagcctgtgcaaattgaacatcacttagggagggttcacgtccatatccgctacctgatatggccaaaatgtccagtagagaatgtcagttgagccaccgatgtcccaaaagcgaatgacgcgtagtgcctgcggcaccatcaccaccatcatgcacgtgttcatcagctgatgggcaattcaatcagtgagaagccaatcatttgcatgccaaaacagaccaattttgtgcagagcattcgaatggcaatgaaaaagcgaatttgatccgagttgtaaatgagcagattgatgcaattgccaatgagcgcgaaacaaaacaacaccaaaaagccgtggcccatcagcgactcccacaaaggcttctcatcacagcgaacctgagaaagaattttgttgtccgacaaatttataatttgatttattaattaataattagcatttgatcaattacagtgtttttctcaccaaaatatccgtgcaattcaccgcaatgtttctgccaagtgtggaagtcattgcggactcgagaaatttgacggacgccgctgggcccggcaaatggccaaactttgcgttcggattttgttggaaacggttgatctgagccataagaattcccaacgcagttttgttcaaagtgttcggctaaacatttggcgaagtgtccttttaactgatcgctctttcaatgctttcccttaccaaagcgatttctccgttctctgatccgtcttcttccgcctcgccactgtcgtcgaaaagctcttcaaagagttgacccgcttccatcgaaaagtcaaatattatttttaacaattaataataaacctaaagaggagaatttaaaatgtcgaacattggggaaaaagacagagagagggaatggaggagacgaagaaaggaagagagagggaagggagacgaaagaaagtctgagaggggggggggggagaaaaggagggagcttttgaaatttgcatttcgaagacacgggggcggaccgattggatgttacgctatggagtttgaatgtgccaagggtcgtcttggctttatctgctcgccccgacaatgccttgtttgtaaattgttattattttgtacaattattcgtatttttccctctcaattattttccctccatttgtgtgtctttacgaaagggcggtgggcgcaataatctcaagtaatgggcctcgctttcttttctattgtacagccctttgaaagggcaaattattgtgtggttggcacggcactgcgcaccggcggatggacggagggaaaagcggcgagaagccacggaagggtagcaggaacacacaaatccattcattcaaaataaagccaacccatgtcatcgaaccgccgaatgggatgggatgagggggcaatgggagggagggggggggggggggaaggggagggat

SEQ ID NO: 9426 - DNA, 3828 bp, Heterodera glycines
atattaaaacgtttgctttgagagcattctttgaattttgtaaaccgaaaaagataattagcaaatggcaacaaaatattcactttgctgtgtttttctttgcttttatgtgcccaaaagtcgaagacttttctgtcattaaaaatagccgaacaaaaatgatggataaatgaggagattttgaagaaaaaaataaataaagaaaaagaatttgcattttaaatttaaaagaaaaggggaggaagaaaaaagaatgaatgaatgaaccggaaagggaatgaataaaaaaatatttgccaaacaaaaagtgcaaatagcgaaaggctaagtgtgggaagtgccggactattggtttatttcaatttaaatccatcaaacaataaatgttgtgggagaatgcgcaaagcgataaatggcaggcatccatcactgatgggagcgaaacacacgcgcgatggggcgaacggagttgggccatgggatggaattggcccttggtggataaaacggggcatgggaaggtcggcccttgggacagagtcggcatgggaaaattggcccattgggacaaagttcgctgtgcgaggctccttaacttcaacgagcatgagattggtcattggagctgatcaatttatctgtttgccttccgcaaagggtacaaactgtcttcttgaaaagctgataccgttaagcatctgccgtaatgacaaagcaatgctctgacggaaagggacggtacagaaacggtgacaaaatgatactcatattgaaacttttatttaattatttgttgaaagagggaagagaaattgcattgctgggtttcttttggcatttgttttggcgttcttttggcattttgggcgcgcctttgaaattttgccgttttcagtttatttttctgctgatcgtaaagtgacgagtgaaatgccatccacccaaaaaacttaatgttttaatccaaaagcacgagaaagatgcagcagcatgaatggatggatgagtgccgacggacggaccaccgccctcctaaaattcgtttggatagtgtcgaattacccaattgagggcgaagaaaatggagaaagaataattttgtaataaacataaaatgaaatgaattataatttaaataaattgaggacgagcagaacgagcagtttcatcaaaaaatataattctctttttgcgcccgactgacctatcagtgagattaaacagcttaagaagtgcaaaatgagcaaatggggagaaatgccatttgaagattgacaaaatgggagaagatgaaaaaggcacgggatatccgaagtcatgcgaaggattaagatgaaccgacccgcaacgaacggcacttttgcaaagggcggctaaaattgaagagggggggggggaagcacaggtgggacggaattaaagaaaggagcaaataaaaatgggaataaaaaatgaaatatgttctttaattctggtttttaaaaaaagtaattttcatttatatgtttaattcatttcggcttactttttggaaacttcgcttcttaagaatgttttttcctgaatttttttgttaaaaacttaaagatgaatataatcttttatatccgtatgaggacaaaaaaaggataaatcctgaaattttatccctaatcattggatagacaaagccaaaaacagtaatataattttaattgtattgtttgtgcaattaatttgggaaatataattatacaggaaaagaaaagcgaagtcgaaaaaaggaaaaagaaatgaggaaaaaagcatttgaagaaaaagcaaaggaaaaagcaaagatggaaggagagataagcggaagaaaggacaaaatgtgccaacagaggaaaatcgttgaaatttaaatttatttacaaaaaattatattttgtcgcatttaagcgtggtatgtttttaaaatgttttttaacttatttttaatgaattttggacaagatttgttaaagatttaaccatgaattgaaaacgatttattctgagttttaaaaacatttttattttcgtggatgaatttacaagattaagcattttcaaaaagttatgtcatccttagccagggctcgtaaatcctcaaaattgacctttttggataaaatctgttaacaagtcttagaaaattccaaagttttccactttcggcgctattatcaccgcgattcctttaaatttttcttggattttctccaaaaagataagaaattgatgaattttgatttaaattatgtttcctatttcaatgattcttcgagcctaaaagtgaccttcctgggttatataaaatgcataaaaccagtgctgccattgggaaaaccgctttccaaggacgggttttactgatctacaaggacccaatgggaaaaattcgtcgaataaaaggacacttaaagttttatcatatgcaatgaaaatgattaatttttattcaaattgtttgtatttttcgccggaattattttttccaatattttttttccgcggatgattttcctcatttcacctcacgtgactttttgcggcgtgcttttctcaaaaaactttttgttgaacaaggggttccggcgtgccgataggcgccgccgggaaaaacgaattatttttgtgcgatttacagattttgcactgaataatgccacaagttaataaaaatattgatttaaaatttgaaaaaatgataagttttgaatgttttttttcgaatgatcatttccaaggacatccttggaaaaaggactctttcaattttccaatcgatgaggcctaatccaaggacgaatggcaactaatgaggaaaattagcattttcataatgaacagtcaattcgttcgtttgtttgccattgtctatgaattttggtcacgaaaacgggttgaatgaacaagcaaaaatcggctgatttgttcagtgagtcacccttcggccggcttcatccttcggcttcgccgtgtcactatcactcacttttcgcccctcccccgcggcgtttgccctttcctccattggtcccttaccattctctcattccaacatttctcaatcccaagaataactaatttgctccatatcgcgttctcttcctaagacatgtcaatacataaatgacacaaaacaaaattggcttattcggcgggagaaagtgggcgaaggggcgggggaggggagggggggggactggcaggcagggctgcactaaactggcaatttcaatccctaatccgttattttatctcaaaaccccttagtttcagtaagccgtacgtaatgcttcatcccttctgctgctggtgcggatgaatggggtggtgaggtgaggtgacctgatgttttaggccatgacctccccggccgagtaatgttttgtggggtggggtttctccgcctccccctaataattccgctcatcagcagcccttcctcacccattgcatttccttccattcattcattttgcattctctgaaaaatggccagcggcagtggcaaagacggaagaggaggaaaggggggggcataaaaggcaccgtcggcggaatggctgagaaggctatttaatttcattaaaataatgcgaggaaagaaaaaaaattagaagaggtcaaataaaaagacgtaatgaatgaatataatttatgtaaaattataaaaaataaaatattttaatggaaaatgagcttcaatttactaaatggcctctcaaaagaggacatttcaaggacaacaaattagtcaacggctttggagttttaaataggagatctcttttcagcaatttgtcgtaaaagtttgctcat

SEQ ID NO: 9427 - DNA, 5273 bp, Heterodera glycines
cagcatgcgtttgcacattgttgcagtggctgcaaaccgtgcccatgccgtactcttcccgtttcattatgcacaaaaaaggcacaaaaaagtgagaaaaaaagacacaaagtgtgattttatatgggacaagacaagacaagacaaggatggataatgtacgtttgtacgtggtgattggccaaattcaatcaagtaaaagtgccaaaaattaacttcccattcattgaaggagataaattataattttttatgaaattattgtacatgttttggtgcccttttgatggcatcactataaatgagaaaaaataactttcaaaaaacccgtattttttatccagagtcattattgattataatatttttcgaacactatatatatatatattatgaacagggaaaccgaaacaaattaaaatttgaagaaaaaaaacataattctttcgttttggcatgtaaatatttttgtttaacgtgaaataattagcttttgttacaaatttaaaataatttactattgaagaacaattaattaattttttattatatgattttcaaaattttaaaaccttcaatatattttaattgttattgtttttttcaagatttttgttacattacatttaatcaattgttccaagttttcttcttctatcaaaccagcgcccgatgggccctgtgaaagcgccgggggcgctttcaacacttggcaacagaatgaaacatccctaaagattaattgtcataaatcatttaacagctgtgttaaaagtgtgttttataataaaattcgatttaatcatgtaataataagaaagggacaaaatgttaggtgccgggtgggaatcgaacccactcaagcattctttcacttggccaaaactctaccattgagctaccgaggcagttcagcatgtaatcaaccccgcttttacaaactggagaacaattttttttaattatacatttaaaagtaggaaaaaactctctatgaattaaatatataattttttgatgcttttcctatttttgaaaaatttaaaaatttttatatttttttgaaaaagtgttattatgaaaaaattaaattgggggggggggtgcaaaaaggctcttctcggcgtctcatttttcgcattgaccgagaccgaaaatccgagactcaaggccaagattcttgtccagcaccaagaatgaatatgaaacgaattaattattgctgcatttcgcatttgcctgtcccactttatgttaatatttttttcaaaaattttcataaatttcctttttaccaattccttcttttttcaaaaaaaatgatgaataaatatttcagtagtatatagtcccaaaaggttgcgggttggttgcgggtgtttcccgcacgagcccgtgcctatgggaggggtgcagccctttgaagttgccgccccataaaaaatccacgatggggggtgtttcaaaaccaaaacctattggaccactttgaagctgccgcctgccaaatccgatttcccaaattgttgcgggtgtttttttcccgcgccgcgcagcgccgcgggaaggtcatcaatcatccacctgtcaccaaaagtgacaggtgaaggaaattcttttgccaattaattcctttttgatcccaaaccttttggggtattttctcaaatcctgagattttttatatgattttttatcctgaaattaaaactcattttgaaaatttgccaatgtgcgtttttttttttttttgcatttcctcaacgccctccctccccgcgcacgatgccgccgccgcgcaaattaatcaataatggaattgtagaagtgtaaatttaattaataattgcagcaaaataattcagataaataaattaatgaattgggcaataaaattaactatttaaatataaattgaaaatgaataataaaataggatgggaaaaaaactttcaaaagtaggtcatctgccaataaatttgattgatggtttttccattatttagcaatctgaactgactttttttttttgtttttttttcatccaaatatttcgcaatatgagaccaatatttttgaaaacctgtcaccaaaaaatgattgatggttttcttatttaaatttaaccattatttttagttttttggtcaaagtatttcgcaatagggcccctaattttgcacttgtcaccaaaaaatgattgattggtctcttatttcacaatttccccgttcatttcgccatatgcacgtgacttttttgtttttttttgttcccaatatttcgcaatctggaccaaaattaggtaacctgtcaatcaaaatattgacaggtccaattttgcacatcactcgtctcgtataaaagccgccccaaattcacccccaatcagttcaaccaaaaagttggatttttgctaaaataaaattgtgcgtaaatatttagaaattattaaatattattaaaaatggctgcaaaacgcaatggaacctctcaacaaagcggaccgtcgactaaaaaatgggatttccgatcaatcgggtaagtaatttttaataatatatttaagagacaattttaatcaataatttttcaggaacaattttactgaagaaatggaaacttttaaattagtggattatcgttcaacgatttgcgaaaaatttggatttacgaagaatattgtggaatttacgatcaacccggacgtgggacgccccgataaagcgatgcaggatgcggtcgacacaatgatacaggtggcttttaaaaatacggaagaaaggatgatgaggaaagtacgaatgtttggagtggccattacgggcgccgggcttgctttcccggtgtgggtgccgtacagggcgtacccgcagaacaatgcggaagttattatgcaggaaatcaacaagctgggacagagcggggatggagaggagaataagaaaatgctgttgctctcggagccaatcacgatgaaaataacgtgtgtgacaatgcccagtggagaggggccgaggaatgttcataaatttgactttggattcaaggaacaccagcggatagggtaagtgtttttaataaaataaaactaaaataaaaaaatcaataaataaaattaaaagaaatacattaaatttatttaatgaagcaaaaattctttaaagaaaaaatgaaaaaaaagcaacaaaaaaccgaaaaataaattaaaaatattaaaaaataataatttaatgagccaaaaaaaaaataaaaattaaattttaaaaaaatcaaaaaaataataaagtaaaaaataattaattaaaaaatattaaataaataaaaaataaaatttgaaaaatcaaaaaaaaataaattaaataataattaaagtaaagaaaaaaagaaataattatttttaattaagcaaagcagcaaaaaaaaaaacagaaaaaaaatttaaaaaataaattaaataataaagaaaaaataaatggaaataataataataataattttattaaggattacaaatgcggataaattatgtctgttttacgcgctcgtagcctcgaaattttatctggaattgcatgtggacagcttcaggagatttatgaaaaatattgtgagacagagggatgcagctattgagcttttacataattgtggaattgatattaacgaatatagctatggtgtggagcaattaccgaatgttcagaaatattgggtgggtttaaatgaaaaaaagcaaaattaataaatttttcaggatgagatttaccccggaaagtaccgggttgttgcatttgaaaagtcagctgatccacggaaatcaatccgtgttttgtggaagggccctatgggacgtgaaaatgtagtgccgatatttttggagaatggtcactgggatggtctgaagaattacgtctgcttttttaatcgtgggagaaaattttgtattgattgtgagtgcttttttgacaaggatgtcaaacatactttcgagtgccgggcaaggtgttattattgcaatagagtgaggggaatgccatgtgaaaaggagagtggagtgaagattgaatgcccaaagtgtcaccgttacttttacaattgggagtgttataattatcatcatggacatcagacttgcaaattatggaggcgttgcgttatctgtgacaagacttatcgatttaacccgaagaaggaacatgaatgtggtgagacttattgccaactttgtagtgtgagccatgaccccaagcgggggtgttatattatgccgatcgaggagaaggaggaaaaagatgtctacagaattgtagtttgggtaagatttaataaagaaaatcaacaaaaataagtctttaactccaggattcggagacttcgcaggattctatttacaagggggaccagaaggagcatgttattaattatatttcggtgagagtgacgtgtacggaatgctgtgatgacaaaaacaggacgaattgcaaaatttgtggggaggagaggatcaaggattggagcgaggcggagggacatgagccgaccaaggattttgtggagtggattttaactgcttttacgaattacgatacgtacatatttgcacataacgccggacgttttgacggtaatttcaaaatttaatttttaaatcctaaatttttaggtcattttgtttttaattacctctgccgtaccgggaagaacccgctaccgctcatcaatggattgaaaatttatgaatttaaagtgcaaaactcgaagaaacattcaaagctgatttggagagactcatgtttattgatgccggtgaagcttgagtcgctgaaggcgacatttaatttggactgtgaggacaagccctttttcccctattattacaacaagaaagaaaattatggaatacgattggaacatctgccaccgatggaggactattcgccgggatctatgaacaaggataaatttataaaattcgaaaaatggtaggaaaatagaaaaatttttgaataaaattcttttttcaggtacaatgagaacaagggggcgcccttttatttggatgaagaattgagaaattattgcagaaacgacacggagattttattgttgtcgattattgagtttcgaaggatattgattaacgacattactaagggatttgacccactaccgaggagttgtacgaatgcgggggttgcgatgaatatttttaaggcaatgtttttgttgacggagcagttatcgattgtgccggagaagggatatgagcg

SEQ ID NO: 9428 - DNA, 571 bp, Heterodera glycines
ccattaaattaacttttttctttcctttggcaatggccacacttttggtataaagccaaaagaacaacaacaaagggctaagcttaaatatcggtggaaattcctcgcctctgtcattgaccagtcagtcatttttcccatttttcatttctccctccaaaaagcgctcttcccttccccttctcattccccccccccgctcgttcttacatttcgtcttttattctggccaaattctcccccccccccggcccgtccttcccacttcgcatattcgcttttccttcccatcctgactctgttgctgctgctcctccccaacctctccctgctgccattccgttgtttatctgtccccccccccaattgccatttcaccaaacgagctcattctgcccgtccatcgattttcagatctaaatattacatacatttgctgtgctgttgttgcctctgctccatcggtgcttacttttcataccgtccgacccctcttcccccccccccctctcttccttatctgtccgctgctgctttgcttgtgcttgctgccatggtccgctccttctcc

SEQ ID NO: 9429 - DNA, 3943 bp, Heterodera glycines
aagtttcattgacagtaagcaattctttgtcagtcgttaggactcaatttatggctgttcttcagaagaggagatgatctcgcctggccatcaccaggaccacttctccaacccgtcctttggctctccgtcttataattcgagtccggacgaggaagagcagaaccgacgccaggaacagtcgtcgtcgccgtcattgagcgaaattgaagaaaaggaccacactttcctgaaaatcgacgttgagaccgaaaaggaaagttcgcctcaacaaatgcgaagtgcgggcggcggaatattccctcaaaactcggccaatttccaccgatacaacgtcaatgatcatcgcgcaacggtcaaaatggagacgaccgcggaaatgggcggagacggagagaaatgcggctgtattggcgaaatgccaccgacttcttgcgcagagaatgccatccccacgtcggcacatgcacctcccatctcaatcccatcgtccatgccgccttttccttccaatccgtcacagcaaccacaacacaccgtgagcaccaccatcttccaacaacaatggttcacccaatggctggccaacaatccgttctttgcctctgctcttgatgggtacttaaacaacaacaacagcaatatcagtgccattggtggaggcggtggcattaaagggctgctgacccacactcagcaacagcagcactcaaacgtcgcttcacacaaccacagcagcagtcagatggccatgctccaagcactgattgcggctgcaacttcgtccacttccgcttcgccatccttcgggaattactcctccgtcgttaatgcttcgacaccgatgagcaatggcgggttcaaattggcaccccaacagcagcaccaaccgccgcctaaaaaggcaaagacagcgaccggcggagggaagggaaaagcttctgcaaatgttgccgccgctgacgcttctcatcaccggcgtcagcagcaaaaggacacgaaaattgacggcggaattggagcaacgacggacaacgatctgctgagtgtgcatatccctcacaatcatttccattcgccgttcagcagcaacggatcggctaacagtccgacatcggtgagaaaagtgtaaaaagtaaaatggcggagggaatcatttgaatcccttttaaagaacgacggcagtaaaatgtgcgccctcatcgattcccttcttcacataaaaaaaagcagcggtcagaacagtccgattgatgagcagatcaaaacgaaaggaggacgaacgatccgagaggagacggaacggaggaacaacggaagacgcgagtgcccacacgagcgacggaaatggcggaaattgtttacggagacgagccggagacttatttcgaaaagtcggaaaagagcgagttggcacaggcgagtgaagacaaaattgaaacggtggtactgattttaaatgcattcccaaaatgggattagcattgatgggcactgtttatcgcaattccccttttaggctgcttctcccaacattttccccagcatccaaaggctaatgttggcccattccgccgaaaattgctcttcctcccttcattttccttcttcctcttctgctgatcatcaacaactttcgccagcggtctccgattctcagacgagcggaagcagcaacggaatgacgacgacgacaacggaagcgccgcgaggaatgaacagtccgccagcagcgacaaatccaacgaagtgccatccgacgggggaaagtgatgtgagtgatgagggaaccaattctgtggttatatcaaaatcgaatgggacaataatgactcaataattgcatattcggagactattcgcgttactaagaatggcttcagcaggacacaccgacaacagtgaccagcaaaggcagtggcgaattctcaggcaaaaagtcgcggggaaaggcggagagaattcgtcaaattgtcactcggatcaccacagcagcggaagaagtggcagaggaaaaggttcgggaagagctgatcgactgcgcccgtcaattgcaattggttacttcatctgccgaagaaaaggacgaagaagcgtaattattccgacaccaacattttgacacaaacaaatttatttcacataattgcagaatgtcatcccttttaaatactcattattttgcctgcgttttcccaaaaatctcatcttttttatgaaacgaaccatccaaaaataggcacaatttttttcgtcggatcgatcattcatccgtttatagttcaacacatttgatctataatactttgatttttttgcgttccattgttgttactttaaagaaacattgtatacttttccggcacaatatctcactagaaattttactgtcagcggatcgacccctggctcaggaaacattcaaatcacttttttttcttcattaatatttgtgactttaatatagaaaaatgctatcagattaatttacttctttttatgataaataaacccaacaaaggtttttcattaataatttggcatttattttatacggtttttacacttcaaaatgttagagttcgtttcaataaagctgttgcgaattgtgagtttgggaagggcaatgttggggaaagggaaaatgaataaagtgttttgtgttagtgaatcgaaatatattatatatcgggtcatattctgaactagacattccacaatttgggtaagccgaaaatatcgactgattcagtagccaaattgattcttgcgcttggcagcaactaattggacatatttagaaacgaatttctcgactttttcggccttcagtgaatggcgtttcttcagtttcgcgactcctttaatcataatctctttgtattcgtccttcgttattcgtcgccgcctaaaattgttacaagtaaaatcagtcagcaaaactataatattcaaaaaattgctttcgaatgacaatagataccgtaagtttaaagggataattctaaatcggtatgattcggtttctttaactcatttgattttttcctcacttaaaatagggcctcaatgcgcgcttcattagttcatcggccatttgtacttttttgttgcgcccctttttctcgcattcctttgcatttctttccttttcgcttgtttcgacttcatcttggtcgtcttcgatgtccatcggagagtccgccaaacattgggaattttgacaagcctaaacagtccacaatttatttggttttcatattaaaggaatgttgtcctaattaaccaccacaatcacataaaagcgaaacggacaaaccctcacaggaggcggtggaggaggtggcaccataaatgtgtccatggaagaagtttctgatggaagtggtggcacgggcaaaggctgctgttgttctgccgatggtgccaaattcgccgttagcgatggcacattttcgctatgtttgtttgtcagctgactcagaatagtattgttcagaggagcggttggatttttttggtgattccccaaaaaagcattgacaatttcgatgctctgctgctgtaccagcaagtgattcggtaggaaagtttgctgctgatgatttgcgaagaaaccgacgaaaccattcggcaaaggctgcttttgctcatgcacgtcaaagaggcgaagtggcggaatgtttgggggcacggcaaaaagctgatggcctcggtttttgaggaggctgggcacttcaccgagcaaagattgaagatttgaggatggcaacagaccttttagtgatgacacaaaaattagcaggataaaatttgcatgaaggtaatacgcacgacaaaaaaaaaggggagaaacctgctgattgcgttggtgttacatttaatagacttggtaatgccgcggtcgaccgaagaaggggcgcgggtgggaaaacatttggat

SEQ ID NO: 9430 - DNA, 5334 bp, Heterodera glycines
aacgacgcgatgggactcctcgagagatgcggcacggagtcggcgcgacgcagaaagggatgcacgacgcaattcgtacacaaagacgagtcggatgagcagccacacatcggcacggcgcaagaagcgggcggaagagcgcgttatgacgacgacgacgacctgaggacggacaacgaagtggcgccgcgcgggccttacactggtgggagcaatggtggcccatgtttggcattccatcttattttggcatttctcctcccttcttggtttctcgtcatgacaactcacacaaaggcactcgtacataggcttaggctaggcctaagaataaaagtatataaaaaacttatggtcattccaaagaagtttgagtcctaatttttggccaaaacttttgaactcaatgaaatttattgaaattttaatgcttaaaaaattatgcaaatacttttcaatttaaaaagaaaatttaatttagttgcttcttaaaaaagttatataaatcataaactgtccaaatattccattgttgaaaacgataatatgatctgataatgttcgagcttttatttgaatgatttacgggttcttgtcgcaacattctcagaattaattgtaaattttgtagggactgaaagtgaatacagcggcactgaatacgttggcaccgactcggagttcgaacacgcccacccccggcacagcgttggcaggtatttgccgagtgacaccgaaactgtgacgacggatgaccagcaggaacgctttatgtccgagtcggaagcaagcgaatggagtcgcgggtacaaccagcaggagcagcggcacttctcgtcagcctcgtcatttgcaagcagttcaaactttggcgcaccgacgggcgcagcgccggcggcgccattccgcgggtacgcgtcgacaacagaaacagagaaggcaagtttatccgtgccgcccagcagcagccgcagcagtaaagcgccaccgtcattacccactgtgccaaagccaaaggattcccacggatatttcggtatggtgttctgttgcggccgcgaaaaagctgcgtgcaattgcggattgtcgaattagcggctttttgggccccggaaatacaatacataaattgcgttgcgcgtttttcgcatttacatttcggaaatttaaaaaaaatttaattaaaacaatttaacgatggaatttgcaaattaagcctcatctgttttatggcatacaattagtttatggatttatccaaattattataaaaaggaaatcgaaatgtttttactaagttaaaattattttttattaagttttaattgtttatgttaagccacagattcgtcttctgctggtcctttgccaaaaaaaggcggcgctaaaatcgatttggcgaaaagcagacgcacaattaacaatggcacgggcgacggcaccgatgcaaaattgcgtaaaccatgaaaagatttgttggagagtttttgagggacaacaaaacatttgagcaaatcgaattggaaattttgaaaaaaaaattcagtttctgtctaattttgaattcagtaaagttcttccgtttgtgaatcaaaagtttctggtccgaattcactacaaaatcatacggaattagggccctaaacccggcgtgggtcggatcgcttgtctctctgtccctgttcgggctctccttggcattatctgagatatgatttaatgctttagctaagctaaactcactgttatacgcccggatttatgcttatgcgttgaaattaaaattgcttcaaataacggccaattaagcatcaaagatcaaagatttcttcggcccaatccgacgtaaatgatgatgccattaaatgtaaattcactttaatctccagcttttaattgatccgaatgaatgaatgcttcacattttcattccccccccccgtcgtttttccgttttgtctttgtcccttccctttccatcgtttggtccgtcgaatcgcagcaaaatgcaaatgcttcgactgctgtaaattcaatgaatgggaggccacactgacagcaaaaaatgaatgaataaatgaatgaattgaaaaaataaatttaataaatttgatggcaccggggaaaggcgccgtgccgggcgatcgtcgcttttgtcctcggcttcccccgcccatcgcattttatcgaattcactcgaacaaattgattgatttattcttaattaatattttccccaaaaagcgatttgtttggtattttcctaaactcttaaattaacagtaaccattttatcaattttatttgcattctgttgtcaatgcctttttttattatttggtcatttttggtgcctttttcagaaattgagaaatttaacgaatttactaaaaaactttcttcttcttatattttaacttaattgatcaaaatttctgaattgtaaagtcgaaacttttacaatgttttattaagactttgatttcttctttttcctttccgatttgctcaaaagaataaaaatgagttcgaaatgggaaaaaatatttttaaatgattttgtaagtttagaagaaataaaaattgccaaatttttacaatattttcatgccttttttaccgtatttcccccctatttgaaatggtaaattatgccgaaaaggggtgcgtccgtccgttccgttccgttccggtcacttttcccttccctccctttctttttatccgttcgttcattttcatttgcctttttctgacctttcggccattttccctctccaataaatgcgaaaagcaaatactcacaaacagaaaatgataagtgataacaaacatatcaaaacattggccagcaaaatcaacaaataaaaaggcacataaaaatatatgcaaatttatttttgttttatttggcgatttattggcgagaaattccaatggcatttttctatttttggaattctcccgttttgaagaagcacagcaatggaggaaaggcgtacggcttctgcccccccccattcccttcccggccatcaattcgcatttgaaggaaaattccaaatttttatttctttaacttctaaatttgtttcccctgttgaaattggacctcacctgccgttgaccgtttggctatgtttttggtttttccgatgaaatcccgtcgtctgagatgagggagttctcccgttgttgttgccgccctcccatttcctaaagcccatccgtgttgttgttgtggtgccattcggatgacagttgcctttggcccatccatccctttaagcggtgtgattggaaagcaaagggaaattgacacatgagaagtgatcgatgagtggggggggggcttttggggcttttgggttttatccattgctttgatttggtggtggacgctcaatcactgacagccaaagggaagaagcaaaggatttgcaaaaaacaaatgctatcacagagaaagaaaagccattcgttcgctttgtccgatggcatttgcttttcggtgcctgctctgaacaaatcctttaaacttgtgtccaattgtctgtttttgtgaccgcattttctattccgtttagtttattacaaataaatgccgggggattatttttctgaaaaatattttttagccaaaaaaccaaattttaattttaaattgggatccctccccggcactccatcggtggcaaagatggtgcgaatcggtattttgggtatggaagtccagggtctgatcagggacagtaataggccgagaattggagacccctcccgccggggtaatgagggatttcaaattattttccaaaccggcaaattataaatccggcactctaattaggtatcattcattttttcatgatattttatttttaaattaatttcgacattaaagttaatctcaattttatttctttaattcaattgacatgggaattgatcagctaaattttcacctttttccttcaatgttcgtcttcttcgcagttctgaccaccgcatttatgtgattaattaacaaaaatattttatttatttgcatgaaaaaaaataaaaaattaaatgttttaattgctcaaattaatttttagttttggcgtcggcggatatgaaccgatgaagtgtttagtaagttaatgtttttccaaaatgggatgtgagcttcgtttaccattcgtttccgcttttcttttctttttttggcttttcccatcgcttcaaattttgcattttgggcattctcaccgctcttaatttatttcttcttttagcattcatcaaaaagcaaaaccgaccattttgggttcaatgtgtgtgaagtgctcaatgaggacggaacaacacaatcgaatcaccaaaacaattcagcaatttttttctacgaggtaaaaatgattaaaaaataaaataaataataatatattttaccaattttgctttattaattttacctcaatttgttcagtttttgccggtaatgctgcttatccaagcggcacttttctatctgccaaaatggacgcaggaaaaattgcttcaaaaatgtgagtgattttaagaaagggcaaaaaaaataaatctttgaatttaaaatatttaaatttaagtttataaaattcagcttgtttgttgacaaatgccgtggcacaatttgccgtggttaacgcattgaccggccgagggcaccgctggtggggcattgaagtgggaaaatcattgctcaatggtgatgaaataaaggtgaaaattgaaatatttcagcaaatttatgtattttcaaagcgcataattttatctaagtaaaatttcttataaatttcaaagataaatcgcgaaactttatcaagttttcagtagttttactctatatgcaattatttgccttggttcgaacactttcggcactttggtttaaattttaattagaaagttaattaaattcgtttttttgtcgaagacaccgaaagaaactctcttaatcactgcacttttgcccttttaaggatttgcccattttcccccgtctgatcacttgtgattctgtccttgctccgaacgtgttcgtccaatgccatctgcgcatcgcctggttcaacgagaagattttcttcctcatttggtaaattaataattccattttcactttttctaataaaataatttaatttcttaatgattctcattatcaaattgcctctgtaactttgctcatttgtcaggtgggcacttttctgcgtctcccttttgactctgatcactttcgtttccgcattttaatccaggtgcatttttattaaaatgaaattgttttaaaatttttatttt

SEQ ID NO: 9431 - DNA, 2003 bp, Heterodera glycines
ccttaaaactaatttaaaaaattgacccatcccctgcaaatgtatgaatttggaaaatttgaattttcgtcatttaaacatcttttgcgacttttaaacaaagtttttcttctgtgatttgttttagcttattgttttggcctcttcactgcgtttattgtgcaatttgcaccaaaaagagacgtggcgaaggcattcatccatcgtttgtggaccttctgacagaaaaaaggaaagcaccgcacgcaatgacggctcacttttggctttcgaagtcgagaccgactgattttcaaaattgaccaaatcattttgatgtatattcaattggttttacgagtttcgcaacttttcatgttccattatgacctcatttcccatctcttgacaaattattcagctatttaaacatttgaggcccaaaaaattgtttattctcacattaggccatgtaattttaaaaggcaattgaaaaataaatttgttcttttgaagatgacaaatgtggggacggtaagtaattttcaaaaaaaattacgctctgttccctcctcattgttttctccgttttctttaatggttttggatggccaattggggaagcggtgcctcgacggtgagaacgccgtcagtactcaaagttgagctgaaaaaattggaggggaaagtgtggccagatgagattgtggagatgattctgcccacctgatctgttcagggttggtgccgcgggggagcataaattcctgcaaattgttttggcgttccgttttcccactctccctcataggcttttcccgggttaaatccaattattttcctattactttgtccccgttccgttcccggtttcattacaactcatacaaaggcatcttgtacgtaggcttaagctaggcctaggctttgtacgggtgccattgattctcctctcccacgccgtcgctccgtttcattttggactgttcatggcgttctgtcccctccacaattccccccccccccccccctctttatctcttccgtctttcacctgattgtactcccgatagaccgtgcggcttggcgttttctcctcgtgtttggcatggaccaacaaacggttgtccaccgttttcaccgtcacttcctcaggtctgtattgggcgacgtcgaatctgaccatttggggagggaagggtaattaattgcaaattacgtccatttttatttgtacctgagcctcaacgttttcccgtcactttcgtctttgatcagtgggctctttaggttttccaagtacgggtcgtaagtcggcgaatggcgcgccatcgccccgccgcccgcgccattgctcagtgaacttcctccaccttggggggcacaagttgagtcggggtgacttttctgtgttccaaaattgccattttcttcccttccttttccacttttggttctttttaagtatttctgaagattgacgagcggaaatattcgaaaatttaatttcgctttcatttttaagccgccaaaaataaatgtttgtggttaattttaaaatgcggggaatggccgaatgaatttgagcagagcaaatccccgaggggacaggcgaaaagccatgccaagttaaggggccgggggaggggagagaagtgaatgccctccctcccggccactgtttccccggggcaacaattcgccctccttgggctgtgttgtttagtgcccgcgggaatttacttgggaaatccgcttcccccccccccccccctcccaccttcaacccaccacaatatttagtcaatttaccataaatgggctgagtgcccgccgttgtataaggcgaagaacgcgaagcggcggggcggtacccctcgaactcgtggcgaagacgctgaaatgaaaggggccgttgcttatcgtcggaatggcacaaattgttcaaatgatagcaatggcatttctctcccccccccctccaattcacctgcatttcctcgtccactcggcgcatttccttc

SEQ ID NO: 9432 - DNA, 1976 bp, Heterodera glycines
ggggggggctgcctccggcggctggcagaaatggggcgaatgggacgaaaaaatgcgaaggaatgggaagggtgaggacgtaaaaaaggtttgctcaaggggaagggaaagtcgtttaatggggggggggggggagacagaaacggaaattttgaggggaatgagaaaagggaatcgaatcgagcggagagagaggggagagcaaacacaacggcgcaacagcagagcaacactcatttgtcagcacaatttgcactaattgttgttgccttttagttaagctaaacaatgtgtgaattcgttgcctccgctgctcgtcgtggtaaaagccgaggtgaagccgagaaagggggggggaatgcaaattgggcccattgagtgacaatttgataggtaatggagacggaattgccttggaaagagtgatattctgtcattaaaatatccgttttgtccattagctaattatgaaagcatatgagcgggaagagtgaagctaaactaattacgtaatcggaggaaatgtttgttaatattcttcaaatggaaaaaataatgcccaaagggaatgcatgggctgggcgaagcggaaaagctgtgaaaaaggagaaagtaagcaaaaatttgaacaatagataataggagatatacatatacatacaaatgaatatgagtttcttttttattcattttgaaagaacgaaccgccaaaaacatattgcgcgtcaaaatgggataattggggttaatttgggattattaatggcttcggatggttttctgtcggctcttccgctgcgttttcttctgctgcaccaatcttcacagtttttacattcgtcaatcctttctttatttttgctttgatcggtccatttagttccaattgttcaaaggcggcaacaacgcatacatttttctgattctccgtgcccttatccgtcgtccttcgtccgtccgtctggccaatggtccaaaatctgccaacgacgctctttttccttcaaaatgccttgctcagtcccaatccttcccccctcgtgccatcaaacctggccttagctgccatcgtccgttggccaacgatcggatgtctctgctgcttccgccgctcaccgtttgcttttctttcagcggagagcccacaaacaatccaaattcttcgttcgcttttgtttggccgatcatttgcagtgccacgagaagggagaagagaatgggcaggggacacaaaggcattgggcagggaatggagggatgagccggatttggtggtggaattggatttgaaaatgaaatggaaatggaccgggaagagtgggcacgggcggtgatgatggagcagagccattcatcccctcatcattgccaaaggaaggaagaatggcatttagcagggcgaatggctgatgcaagcaatggcacgagcagattgacccttcccaataccagcccatttcggcactcaaattggcttccaaatggaaaatgatgggcggatgatgaagacaagctgaaaggaagcaaatggagaagcaacggggttatgggaaaagcattgggggacatacagagataaggaaaagcatcctctgctgctgaaatgggatacgacgtggagagaggtgggcaatggcgtacttttgaggttgcgtaaacgccatggacgaaattggcacagattggggcgggggaaggatgacggaacggaaggagcgaggggaagggatcggataattaattatgagaaaaacaacaattaattaattaattattttaattattttctagtttttttcttttcattttacatcttatcctctatactttctttgcttgattggctttttcagagtttcatctttcaaattaccttctaaataatataggtatatattttttgcttttaaaaaaatggaatttttattagtttttattaataattctttttgctttattattttttgaatattttt

SEQ ID NO: 9433 - DNA, 849 bp, Heterodera glycines
  unsure (1)..(849): unsure at all n locations
cttaattctttctatcagcaaaactatgttctcgtctactcattggtccgtttgagtccgtccgtttaggctttgttcgattccgtgccaggcacgcgatgggaggccaaaatgctcacgcaaagcgttgagccgggcgaggagcctcagcgctccaagtggagtccgcgcgcggttctgctcacgcgctcgtcgccaaccgaaatcttcttgaaagtgacgccgcgagatgaccccacgcaggcggacgccttctgggatttgccggcggattacgaggattggccatggggcgtggacttgcagtatcggctgaccaggctgggcagttgtcggaagctgtccaaagcggacacggagccggtgatcatggaaaatgttcaggacaaacaggtgaccgatcgattgggcagccaattgggcactttttaatgggccaatgccgctgaaggtccttctcgacaatttgcatcccgggtcggaatacgaagtgaccgtcactctccgacaaccgcccggcgttgaccgccgcgtcgcgcccaaaaaggcagtccaacgcttccaaacggcggatcagccgccgagcggcgcaccgaacaaattgcgagtggagggacgatgggataccaaattggcattcggatgggaaccgccggagtgcttagagcagaacggcgagatcagtcagtacgagtacgagctgaacgggttggacgagtggaaccaggggacacgccagggcgtcagcccacgcacacgcgcagacattggcgaactgttgcccggctcactgtaccgcttcagggtacggtgcttcccncagaaagcgctttgtcctatccattccca

SEQ ID NO: 9434 - DNA, 1248 bp, Heterodera glycines
cggtggactctcttacgatgaagacgggcggggcaaaaaattacacagtgatggtaccgggcaattccatcaaattcaccgaattgcaaccaggtcagtcagtgccagttggttgacagaccaaagggccaccaaaaataccaaaacaaaatgccattgtctttcagataccatatacaacatcaccgtccaaggcggaacggacagcggatacggtgctaccgtatggggctcatgggcaacattgtcgctcggcaaaacgtggattctccggctgaaggaccgcacgccgggctccctgaccgtggagtgggacccggtctggggcattgcgcaccgcggatacatcgtcagtgattggtttggtggtggtactgctccaacttccccgactttttcagctgaccgccaaggctatccattccacccatccgcaccttcgcatcggttccatgcgcaccgtcgacgtgccctccaccgccactgagctgaccattcgcggactcgagcccaccagcacgtacaatgtgacgttgcagctaaaggaccaaatggatggcgcgtggtcaatctactcgacgctgcagccgggctgcttccttcccggcgacattcggcactgcgaccagacaccgcacgccacctcaatgaggtgaagaatggtggccacggcgccgacataattggattttgggacgggcacttgtcagattccttaattactgtgattctttaaactgaatttttccaaagactgagatttcccccgggtcagctgaaataatgagggttcgaccagactcaatgcgaacaaaatcagggggaacgacccccccccccagacatttccatgatttgatagactcaaacccgagaatcaaaactcaacattttcggattgaaaaacttgatctgtgatccgagcattgtttgtcggcacgaacagctcatgagcttgcttcttcctttgcttcttctttttccacagtgaatgaatgccccccccctcgttcagttgggagcccgtgttgggtgcagcggcgacgcattaccaagtgcggtacattcatttgcaccaaattcgcactttgtgggtggaggagccggaaaggcaccgcaaagaattggtccgttctttattcttttatattcgatctgctaattgagtttagctgtgccccaaagatccgtgtaataggctttgctatttggtgttcaatctggcaaatcctccggaggaatacgctt

SEQ ID NO: 9435 - DNA, 2266 bp, Heterodera glycines
  unsure (1)..(2266): unsure at all n locations
aaatggccatagaacgggaaggaaatcaaaaagaaaaggataagccaggccaagttgggactgaatgcaagcacaggatggagacactaagcccaaaaaaggtaaaaaaaaactgaatttaaaattataaaaatggtaatttatggaggaaataatacgaaaatagaaaagcaaaaaatgaaagggttaaaagtaacagaaatttgataaaataaaatatatctactatacaattattaatcttaagactaaattaataatttgggtagcatattaggctcaaaaatcataaacacttaaaaacggcagagaaatagcaaaataagatataaaagggcataaaacgcttgaataggcacaaaaaaagcaaataaatttttacattgatccaaaaaaatctttgaacaagcatgaaaaaccatttcaaaatgctcttaaaaaatctgtaataataattattatgctgacttaattttgaagctggtcaaaagtattataaaacaacttgatcagatcactccttagtgttgacctggacactaaaaaatatattgaaaatggggggggggggaaatgggggcaatttgggagccaaatccaacggatgaccgaccgaccattcactacgaccactctttcaccaccactcatcctttggttgttctcttgtcgttctttctcattcacgcttttaatccatggcttacaacaaaaagatcagagccgacggtaagccaaaggttaattggggggggggggacggagcttatttgttagttggtccaaaatgtcactctttgcattcccttggctttacagtattctatcgtatttgcttttcctttttatcgtatttcttttactgtaccccctcttctctctgtgtgcttcttctttttcttgtcatttcaatatcttttcttgtcccctcgggcattcctcttcttgtccccattcctccggccattccgtcccctttgatctctccgacagaagttgccgcttcgtccccgccgtctccgcaccgtttgtcccttcggcatggctttgtgctggttcttcccgttttgattgtgctggtcttttgtctcggtttggtcttctgggcacttccgtcgtaagttgttgttgctgctgtttccgtttttgtaattggcatttgcccacaaatcacttaccaaatcacttttccatcggtgccattaaacaaagttaacccaatcattagcacggaatttcttcgctccttaagaagtgcaaatggtccgccgttcttgtctttgattctgttttattttccattccataatacttatcgtctctatcatttttattggttttgtcccgcctctccctcccctcattatccctcattaaccccttaattacctcccctctcacagcaactccgttcctcgccgcaggttggccctggtggtggctgttgctgctccttctgctcctgcttctttgcctgctcctctgctgtctgctcgcgtggcttttagcaaagtgccgtcttagcctttgattgatcctctcactgtcccctcactaattacccccctaataatctttcacttttcctttcccaatttcccttttaatttttcttttgtttcattcacttctctcttcagaaaacgccgccagcgatatgtgaacggaagagaaagagaacgacttttgagggacgaaaagacggaacattacgaacgaagccgaggcgattttgaggacggatacgcacacgggtacagggcggcgagggcaggcggacgcgctgaagaggactaccggggcagggacgaggcattccgggtaggaacagcggatcggcacgcgtaacccaccaatccgatgtttaaggaggggtacgcaaaagggttgcgcgacgcgggagaacgcgggatgagcacatccatggccaacttggcacaacggcccacccagcgcctcggctactcctccggatacatgcagggcttccgggacggaaactcgggcgttttcggtgatcgcatcagcgagagtctgttgcgaaggttggaggagcagtatccggacaacgaggagttcagagccggttacattgacgggttcaaagacggagtcagcggaggacgcgtgagtgaatgagtggttannacgactgtccaacggngacatattttggccattataatcccccagtttggccatttcagacctttcgagactcccgccgcattcagcaaagtctgaccgaattgacagaacgactgac

SEQ ID NO: 9436 - DNA, 786 bp, Heterodera glycines
  unsure (1)..(786): unsure at all n locations
gagctgttggcncagggccaacagttggtcagcgagttggaggagttggccagcggacagagccgtcgcagcactctgcggcggcactatacgcccggcgactatttgcgttacgaggacggcggttccggcgccgagtaccacagtctcggccgacgacgcacaatgagcgcgtcggcgctgggcaggggtaagcacaactgagcttggacgagcttttctaacgctgcacagatgctaaagggtgtcctgcactaaggtccgaaagagggaattgaaaatttaaagtttcaaaatttttcccagcgggcctaacggctccaccggtcccaaaattcccctaaaatttcaaatttgatcttttcgaaaaaaaagcgcgccgcaaaaaaaggtataaaaaaaagcttggccgggaacaatctggaccgtcgtatgaaaatttggttcctccgtactcacccccctgcgccacacccatcgtaagggccaagggcctcgccctggcacaccccgtgaactgaaagtgtgggaccattgccgtgtctaccgaattcataagtcgattatacaatatccacttcccccgagtgaatgtgtttttctcgcttttccctcttcgttctcggtttgccgtgtgaacctccccgtttcccataacttctccagaaagcgcttccgttggccgtgcttttttcgctgaagagcggcagcgccactattcgggcgcttccctcgagggcatcgccagcgacgagcgcgaggcggtgctgcgagagtcgtacactc

SEQ ID NO: 9437 - DNA, 2490 bp, Heterodera glycines
ctcaaatgtatacctaaaaatgcgctaaaaatgatcactccacatggttagccgaatatcctgtcaatatttccctattacatacgatactgtgaattctttcgcctctttaattcattcgtgctttgcttcggattagtctaaaaatttctggacgccaattttacatattagccattttttattttattagtgaccgcaaatttttacatactagccattttttattttattgtgaccaagcatatctttcctcgtatttctgggatttttttcagaatgtggtcatagaataggtgggttgaattatttgtattttttatgagtattatgtaaggatattttcgacaaaacataaccaattccgagtttcatgaggcatcaacttcattcttttcttgtcctgcccaattgtctcaaatgtatacctaaaaatgcgctaaaaatgatcaaacccgtttttagccgaatatcctgtcaatatttccctattagaaacgatactgtgaattctttcgcctctttaattcattcgtgctttgcttcggattagtctaaaaatttctggacgccaattttacatattagccattttttattttattagtgaccgcaaatttttacatactagccattttttattttattgtgaccaagcatatctttcctcgtatttctgggatttttttcagaatgtggtcatagaataggtgggttgaattatttgtatttttatgagtattatcttatataataaagttgagtgtctgtccggatgtgtccatgttttgaattagtgtggcgttttgtttagtttttgcgttcaaaaatgatttgaaaaaagtagagggagggaaaggtaagaaatagtgcactgtctgattgtctgtctacgcgggcagcggcgggtgagaggggcatacagtgaacagacgcgtgctgctgtgcagcagcagtctgttggacgcgtgcgtgtgtgtgggagaaggagggagtgggaaaaaaagatagtaaattgcaatggaaaagaaaagagagtaaaagaaagaaaagggagagataatgggaaatttctctcgcatcccttccttatttataacccatcttttattatataaaataattaataaaagaaaaaggaaaatggctttccacgattttatgagaaaaattacttttacttttctacattatttaatgatttttttgttcgcgtttttcatttgaatttgttaatggtataaataaatttgttatttgataaaataatttgatagttaaagagcggtgtgtttttatttgtttgcattgaagaagcataggattttgaatttgttttcattttttaatctgaaagaattcgacttgaatttgatttgtgattttattaataaatgactatttgtttacacttatttttgtattaacgtttgccaagtaagttttaaaatttttttgtcattaaatattaagaagaaatgtctgaccatatgaaaatgctaaaaaggaagaaaaataagtgcgaggccgtgaagcggccaagcccgtaccttccagcaagaaaaaagacaaagtgttaataagaaatgttaggaagtgaggcgccgcttccgagccctccccccgcccggtaaaacatcttaaggtgggttgagtcccagtgattgaaatgctggagggttgagtcacagtgattgaatgctggagggttgagtcccagtgattgaaatgttggtgggttgagtcccagtgattggaatgctgttgggttgagtgccagtgattgaaatgttggtgggttgagtgccagtgattgaaatgctgtgggttgagtgccagtgattgaaatgttggtgggttgagtgccagtgattgaaatgctgtgggttgagtgccagtgattgaaatgttggtgggttgagtgccagtgattgaaatgctgttgggttgagtgccagtgattgaaatgttggtgggttgagtgccagtgattgaaatgttggtgggttgagtgccagtgattgaaatgttggtgggttgagtgccagtgattgaaatgctgttgggttgagtgccagtgattgaaatgttggtggattgagtgccagtgattgaaatgttggtgggttgagtcccagtgattgaaatgttggtgggttgagtgccagtgattgaaatgttggtgggttgagtgccagtgattgaaatgttggtgggttgagtgccagtgattgaaatgttggtgggttgagtgccagtgattgaaatgttggtgggttgagtgccagtgattgaaatgttggtgggttgagtccagtgattggaatgctcttgggttgagtcccagtgattgaaatgcaggagaattgagtgccagtgattgaaatgttggtgggttgagtgccagtgattgaaatgttggtgggttgagtgccagtgattgaaatgttagtgggttgagtgccagtgattgaaatgctgttgggttga

SEQ ID NO: 9438 - DNA, 992 bp, Heterodera glycines
gaggcatcactttcattcttttctggtcctgcccaattgtctcaaatgtatacctaaaaatgcgctaaaaatgatcaaaccccgtttttagccgaatatcctgtcaatatttccctattagaaacgatactgtgaattctttcgcctctttaattcattcgtgctttgcttcggattagtctaaaaatttctggacgccaattttacatattagccattttttattttattagtgaccgcaaatttttacatactagccattttttattttattgtgaccaagcatatctttcctcgtatttctgggatttttttcagaatgtggtcatagaataggtgggttgaattatttgtattttttatgagtattatgtacggatattttcgacaaaacataaccaattccgagtttcatgaggcatcaacttcattcttttcttgtcctgcccaattgtctcaaatgtatacctaaaaatgcgctaaaaatgatcaaacccgtttttagccgaatatcctgtcaatatttccctattagaaacgatactgtgaattctttcgcctctttaattcattcgtgctttgcttcggattagtctaaaaatttctggacgccaattttacatattagccattttttattttattagtgaccgcaaatttttacatactagccattttttattttattgtgaccaagcatatctttcctcgtatttctgggatttttttcagaatgtggtcatagaataggtgggttgaattatttgtatttttatgagtattatgtaaggatattttcgactaaacataaccaattccgagtttcatgaggcatcaacttcattcttttcttgtcctgcccaattgtctcaaatgtatacctaaaaatgcgctaaaaatgatcaaacccgtttttagcggaatatcctgtcaatatttccctattagaaacgatactgtgaattctttcgcctctttaattcattcgtgct

SEQ ID NO: 9439 - DNA, 875 bp, Heterodera glycines
  unsure (1)..(875): unsure at all n locations
gggagaaagaggggtgccttataatagagaagagaatataagcagccttcgctgcaaaaatcccttccttaattgttcattctgtcttttttatgctgttctttagcttttcgggcacattattagaataacataattaaatgaacttttaacttttaccaaaataattattatacggcaaacacagtaattttgtttggcatttaatttgccattcttttctttggctcgtcattttctgccgaaccctctcgccgactgattggcaagtcgtgccaatagagaagctctcttatccgcccaaggtgtttgtgtttctgttgggataaatcgctgtgtccctccaaggggggaaaagcggaagacaaacggagcggtggcgcggaagggaggcgaactctgatgcagttgccgaaggggaaactgaattggggtggggagggaatggcacgcggacacggccaatggcaccctttgtttgccttgacaattttgccatttgcttttcatgcccatccgcccaccttctgctgcgttgttccaaatgggcttgtccaaatatcattcaaagacatcagcgcttcgttttgtttagctggtgcccacaacaaagtgccgtcggaatgcactgccaaattggctaatgccattgtcgcaaatgccccgaaaatgacgcacaaacaagaaatatttgcgttaaaaagttgcaccattctcattaaaaatgcacctaataaattggctaaattttgaaaattattagtttgccatttattaaagaatttaaacgcttaacccaaaaaacttttttaataatccgtgagatttgcaaatgggcggngggggggggggggagcaaaaagtaaactattttt

SEQ ID NO: 9440 - DNA, 3953 bp, Heterodera glycines
ctactcgaatttaaatcatattattatttaatttaattctgaaatttattttaattaatagttttcaaacgtaaagaatttttcatttttcaaggaaatctttctcaaaccactgagtttcgctggataaaagagaggggggggggggaatttctgaaaatctcaattcacaaaatgtgccataataaagccaagccaatagcaaggacaaaagagcactggcaaagtgcatttcgtttcttctgattttaattcattttacaaaattgcgttcatttgcggcgatggtaattgcagcggcaaatttgggcacgacgtctaacttttgtcctatttttattctcttttaaatccatcaatcctatttgggttcatttaagtcttttaaaccgaactttcgagaaatgccagcggtgcaaagtcgaacccgtaaaattaattattattcaaagcaaaatttaatataatttttaaaattctcggatttcatttttcgggatcgatcctctcggggttcagtctcattctcagggccaagaaaggcttttgaacatcaaatcgctttcctttcctcgtcttctctgtatctttctctccgttctctcctcctttccctcgtccctcgtccctcctcccctattcccctctcctcccgtttctctctctccctctttctctctctcccctttctctctctctctcctttctctctccccccctcctctcctctccctctttctctctctctctccctctttctctctctctcccccttctcttctctccactcttcgccccccccccatctttacgtttctttacaccgacttcctcgcttaactgaactcatttctctcatcagttccgctgctgttagccttgcttctcctatcccttcgttttcatcccattcactttcttcttcttctgctgcttcttctccccatggtccctcctcctccgatcactttttgacttctcccttcttactaattaattgtggccagttccatggatgttattcaattggccaccccctctcatttcgcctcaaagggccaaattgatcgggttggcctcaaccgtaacaaattgttcgttgccctgcgaaatgcgcgtgagttggagctttggtcagtgcactgtttggtcccgtgctcgtggaagtgccttttctcttacaagttccacgaacttttctatgctcattgtgcactttcctctcaacaaaatgcaattttttcgatggtcgcagcattttttgtgcgcttcgaattttgtcgctttcaatttaaccaatttcagaagaaggatggcaattcagcagaggatggcggcatcaaaattcttcgctatgatttaacttacgaaaagctatccgaattcgatttggacttcgattgtgtggacactttcgagggagtcactctcgaaagagtggcaatgggctgcggacagacggaaaatcggctgtttttgtacgaccggacaatggttaccggcgaaatccctttctggcaaatttcgctcgattggacaaaagtctgagtgccattggtttttgctggcattgaacaaaatccgccgttaagatgaccttttccatcaaatcagtcccaattttggatggtcatcatttctgtgctcattgcattcgctttcccgttgttttggatggcgacagaagaattattttgcgaattactgaagactttcaagttgtcgtttatgaaggaaaaagtgaacgatgggaggagctaaaagcggacgacggcactcaattggatgttcgtttgtagtggtattcgagaccgaaaacttctcgagaccaagacttaaaagcccgcgactcgatataaaccaagacccaaaaaccgagacttatcttgagtcgaaaccgagattctcgaacattagtgttctttctgcctctctcagaattctaattcgcttttagctttccacaataactgtcagagggatttccgaaacatttggtcacaattggcatcgcttttctgccatcgagtccaagctgtctatttttgcagacgaagacatttgcgtgttcaaagtgttgtggaacggaaaacaccacttttacaaatttagtgcttcattcgaacgaaaaagttacaggtgcgaagcagcaaaaaagagataagattgatgtccgcttttccggtgtacaatttcctaccctcttgcgtttgggattggtcaattggacccacaatccaaaacataacccaaaggttttgttctcaatcccttcatttagcctcgagcatcgttcatgtgccagcttggggaagccgcttgagactctttgctttgtccattgtgccagctcaaaaatggccttttttaacaaacacttagttgggtttgtgttcactcagcccccttctctgagggagctttgcttttggacggtgcagcgacaactcgcgccttggtgccctcgggggaaaatatggaggggcggaaggacgcagaaagaagtgcaagcgatgttcaaaataagtcaagccattcaaattgttcagtgaaaaggcatggatgtacggacccataaatcaaggctgtaaactatgaggttttaacatcaaagttcgttattttttggtcaaaatctgttaataaattacacctaaataatgtggcaaaaaattgaatggctaacaataaacagtgaattcgatagcgcaaatgaaaatcaattgcgctttttcgtgctcaaaattttaaaaatattgatttctgacaaaatgtgctcagcaatcatcatttttttatttggaataatttttaaaaaattagtcttcctgaccagggatggcatggaatttcgacttcctacttccgatttatgacgttttttgggtcggaactccgatttccgaaaaattgttgggcctcggaatgccattcctgttcctgaccttaaatgagactttctaaattttctcctcctcattaagagcataaaatgatacaaagatagtccagttttccaaaaattattaaaaaaaatgcttgaaaaagtaaaaaaaaatttttgtacgaatccatgtaagaagcgcctattgtacgaacaaacaagtgtacatactgtattaatatccaaaaggcaaaccaaacgcggtgagtagagactagagcccgaagcaggaccggatcctgcgcaggattttgcaggattaatccggccggatccggtccggaaaaaattttgaattccaatcctgcaacaggatccgcaaatttgatttttgtgcgggatccggcaggatccgcatacattctttgaaaattttaaaagacggaatgccaaaatttttgaataaatttataataaaatcaatcaaaataaattcaattttcatctcaaatttcacctagaatttgcaaaaaaaattcccggcggcgcctatcgacaccactggatagacattaatcctgtagattgagtcaaaaggtgtgacatttggtcattttttggtcaaattcagttaattattgataaaattttcaaaaaaaaagaaattcggacggcgcctatcggcatagacggacctctttgttcctagtttttgaaaaaattgcgccgaaaaaaagcatttttgaaaagcaaaaaatagtcaaatttattgactattaacagatttgattccgatctctttttaccgtctgacccattcgaaaaatcttaatcgcccttttttaatgcatcccgccagcccctaaaaatttctttttcaaaatgtcaggtattttttcttttttggaaatttaattgaaattttttcaaaatttctaagaatccacaatcctgcgcgggatcctgcaaattaaaaatgcaggattaatccggccggatccggtcctgcaaaaatttttgaattccaatcctgcaacaggatccgcaaatttgaaatttccgggctcta

SEQ ID NO: 9441 - DNA, 4138 bp, Heterodera glycines
  unsure (1)..(4138): unsure at all n locations
agccaagaaaaggatgcgaggccgcgaagcggccgagccattcgattttatcattcaacaatcgtactacctagcgggggatgcgccgaaggcgctcaccccgctagtgaataaaaaaaatgattgcatttggacaaaaaaatattcaaaaaatttatttggccatgtgttcgtttggcactttgtgcctgtttttcgcccgtaaattctcagatagcattcaaatttcgcataagaattttatgcatgaaaattgttttgtaaaaatgtttttaatttctatttattcatttatttttaaaaattgagaaaatattccccgccgttaggaatcaaataaatataatttctaaggttgaccttttaggcaaagatctttttgtgattttctgaaaaagttttttcactaataacagtgatctgatctgggtgaaaatattgaatgtgatttacagtatgtcaaaaaatacattttttataaaatgngaattaaaattcttatccaaaatgctgacttgaattaataaataattacaattttcactaaaagtttattatttacaattattaaaataaaatctttgcaattgtcggtagcaaaacaaataaatattttgaaaaacttaataagacacaaaaatatcaacattaaaattccttaaatttttaaaaatttacaaattaataaaaaaaaaacttttttttctttatgatactagggctcggatttttaggcaaaagcctattttttttcctgagctccccgtggcctgaaacgcacgaaaaacatgtttttttgggctgttgttaagctacttttcgagttattagtgcctttttttaggcttttatttttaaagcctaaaaagcctaaaaaattttgaaaaaacctattttggcgttttgcccaaaattattaacaaaaatgcaataaaaacgaaaaatacacaagaattgattttttgggaattttaaaaatacatccctaagaatcgaccaaaatttttttcaaaaatacactgctaagatttttcaaaaattcatctccaaaatttatttatttattttcttgacaagaatttgtgatttagaaattatttatctcaatactgatttggctgaatttttttacttttttgaatacattttgtcattttacaccccctaaaaatgaggttttttagtgcctttttcccatttttagtgcctattttgggggtttttttagagcctaaagcctacctattttggcagtttttagagcctaaaaatccgagccctacttatgcccatatttgaaaaaaaatttccaattaaatatttcagaaagtgatttattcgccaaattgaacttacaaatgaccatcttttacgaaattaccaatggagaaaatccagcagagggaaacaatagaaaattgacattaaaatggcttcaaaatgatggtagtgcaattttatgcaacgaaaatttccaaaaaattcatgaaaatctcagaatcaaaaaaacaaatggagatgaagcattcattgagaaagcagaaaacaattggaacaatttttgcgcaatgtttaaaaatgggaaaagcatcagaaaaattgagacaaatttggtggaaagagcaaaagaatccgtgctaaatttggagacaatgccccctgcattggtgaaaaatatacgaaaaattgcgcaaaatgaaaattttaacgcggaaaataaacaaaaaatggccgaactattggaccaattcatcgttgggctgaacatcttccgaaaattggttggaggtcaaaagcatttaccaatttgtaaataaaaaataaatgcaaattttagacacattttggacagataaaatcgtgaagcaccagcagcagctgcagttggcacgacgaaagcgaagagcgaacttaataaagtcggcggagtgcctcttcagcattgggcttggggcccttgcggccactttgggcattgtcctcggcgcagacttgggccaaaagaggcacaacgacgtcgaatcctatttcgaactgaatgaacggctcgaagtggccggaatattcctttgtttcttccttttcgtgttctgtatcgtatacatttgcaaaacgtgccgttcgtgagagaagagacttttcgaaatgatgaaaggaattcaacacaatttgttggtctagaagggttttatgtaaattgttttttatctaagataaataaaatttatagattgtgaagaatgtatccgatgctcgaaacggccctcccgacccacctaaagtcacgataatctccaaaaaatcgactaaaaaggtcataaaaacccgccaaaagaaaaaaaacaccaaaaaaagcacaaaataaatgcaaaaaagtccagaaaaattaggtaaaagtgaggaaaaatgccaaaataatgacaaaaagtctgaaacagtgacgaatagtgatataattttcagccaaatattgagcaaaaataatttttattcacttcgaattctaaaacatccgactatcgctccgcccagcggaattggaggagcgcaggacaatgcaaaaggaatgcacggaacgaaggaaggccgaaccaaatgccgactggatcatctacgcgggaaacattgtcaagcgatcggagataccggcaacgcaactcccacaaacaaatgccccgcctcccgtcgagggaaatggacctgaacagaagaaggctaatgaaaacacatccaaatcgcaggttgacatcagtaccaaggaatttttaagcacccttaaccgcgaaatgcaagccattaaaaaacaatatcccgatcttgatcttttcaaaagacagttctgccaaacctccaacaattaaaaaaaataaaataaaaatctaattgtactacttcaaaattttcttaccaaatcttccaaaaaagaaaaaaaaatttattcacaaattttgtcttttttttatctcactattatcatccatataatttgtcacttactctacgccactttatttgaacagtcgtcagagtaagtggtgttcgcccttctgatgacttttttatttttatgaataaataaataaataataaaatttaaatattacatttttatgtattttcttgtcggtgtcaatggaacgcaaaacgaactcagaaaaaagagaaacaatttgcactattgcttctgtgatattattcacacagctttgtaaaattttggatttttcatgtgtcgaaagattagcgaataaatgtttcgattagagtccggtaaaaaaaaattccgggagcgggatcgggagttcaaaattttccgggacgggagtcccgaacgggattcccgtaaaaatcccgctcccgttaaaatcccgtccatttttaacgggagtcccgggcgggagcgggagtaattcgaaaatttaattaaaaactcacaaaaatatttttaatgcacaaatttaaaggacaatcaatttattaaattaaaaatatatagaaaaatttataaaggagaaatttgaaataaaaaaatcttatttttgtgtcaaaaatcagaaaattttttcaaattgcttaaataaattattttttataattaattcgaacaaaacatttattaactttatatttttgactccctttattaattttacaaacttttttgcggtgtatttcttgaaaaaactttttggtgaccaaggaggaggagggaggccggcggtgccggtaggcgccgccgggaaaaaattgaaaattttaacacaatacattgttagattctgttcaaaaatgaccaatttttgcaaattgagcaagttttttaagaaaattaaggattttaaggatccggcggtgccgataggcgccgccgggaaatttttttgaaattttggatatatatttaacagattttcaatgaaaaatcattatttttaccaaaaaaaatcaattcttaccagtacatttttactcccgtttttgggtaaaaatttccgggagcgggagcgggatcgggagttcaaaattttccgggacgggagtcccgaacgggaatctcgtaaaaatcccgctcccgttaaaaatcccgttcaccgaaaaaagcgggagtcgggagcgggactcccgtaaaatcccgcgg

SEQ ID NO: 9442 - DNA, 4029 bp, Heterodera glycines
tgaatacaaagaatttgagcgcgtatcatcaattggaaaatctatcgaatcacagggccgtagccagaacaaaatttcggagggtgaaattcgaagacacttacttttttactcttcggacaaaaaattaataccccagcagtgctttagttttttttaatttctgcgccggtgtgaaaaagcaaatatttctagtcttttgcgcttaaaaatgataaactaaaagttataaaaaaaatgttaaattgggggaccggcagtgccctataggcgtcaaccgacaaaatttctgtaaatgttaatgaaaatagtgaagaaaaactgtgccaattctcaaaatgcccacccccccccttcccccggtggctaagagcctgtccataaaacaaatcataaataaataaaatgatcaacactcatcccttgttcttcctcgcatcgctttgttctttcaaaagccttaaacgccctaaagcaacagatttgtcatcatttcccaatttgagtttgggtgtttcatcatccgcaaacctaacttttcctaaatttgtaattgcataaatttacattaattagtctatcgtttgcgtgccattttagcaccgaacacattaaagaaccgtgaaaaataaagttttttttctttttgcattattactttataaccaatactagttatttatgaaacataaaatttaatgaaaagaaaaatcagggttcggatcagtcaaactccattcccaaggacgcgtataccggtttccaaggagatacgggaaaatcccattaaattcaatgaaatttaaaatttttttatcataaacgatgaaaaatgattaaattttatccaaattgtttatatttttcgccataaaattctaagaatttgttaacatattttgtccaaaattgatcaattttaacgcttttttggtgtgtttttgaactatattttaaaaaatagaaagagggattccggcggtaatgatagacgccgccaggaaaattttgatataaaacaaaaaaattgtaatatggaatttttttcgaatgctcatttttaaggggttcttgaattcttggatattttcaaattttcaagtgagggcctgatttccaggacgaccttgccattcaaggacgaacccgaaccctggaataagttaaaagtttagtgataaagtcgtaggcaaaaattattgatgcaaaattgcaggcaaaaaagaaatccaaattcaaataagtttagtattatgttcataaaaagcatagattttcttaaatttgcattttaattaatatgaatagctaggattttcaatattattcatattagtgacccaacccaaggtcccaaaaacacagagaatttcggtttatgatttaaattttaaaaaatttaatttacgttttcctttttgtactgatgagctgttagcagcaaaaactgagcttgatgatggaccgccgtcttaaatgccatttttctttctgtttgtttgttaaattttaaatttaaagaaaacaaacgaaatgaatttgaagaggcgatttgacccgaaaatgttgactcatttaatctgttagcgcgggaagaatttctgaaatgataaatcaaatgaaacattggagaacaaacagaaaaaaagagaaaaaataatcaaaaacagtgacgcaaagttgaaccaaaaaaaagaaaaaaattctaaaaagcaagacttaaattaattgtttgaccataattcttttgaagttttgaaggaagatagacaatatttggactattgaatgataatacgaatgttttattagtttgcttttatttaatagcccaaaaatttttctattgatatacaaatgttttgataaaaaatttggaaatctcgattttaaaatttaaatagtcgataattattagagaacaaattttgagacatatgcctttttttctgcgcattagttccgttatattaaacataaaaaacgcagtttccacttggcttgaagcttctacgttgacttttattatgccaaggtttttgccttttttcgggatttttcttcccttaaatggctttttttgggatttttgggggcttttttgggggggtttttcccaaaatttccctttaaaaaatggaaaaaaaaacggggaaaaatatccccaaaagggccccgaaaaaatttccaaaaaaaaaaacccccccaaaatttggaaaattttttcccaaaaaaaaatccccccccaattttaaaaaaatttttatatttaaaaaatttttccttttttcaaaaaattttaaaattttttttaatattttttttatggggcccaaaaaaagtttttttttttaaaaatttttttttgggggtttgtccttccctcaaaacacacaaaaaaaaaaaaaaaaatattaggggctttttttcttttctccccttaataaaaaaaaaaaaataaaaaaaaaagcgcttttcttcccccccccccccccccccccccccctcttttatattttaaaaaaaaaatattggggaagagaagggcccccctttctttttgggggtgggtgggcactattatttaaaaaaaaaaaaaaaaaaacaaaccctccccccccataacaaaaaaaaaaaaaaaatattttttttttttttttttttttttttgcggggggcccgcccccccccccccccccccccccgccccccccacccattttttgtgggggagcaaccccccctttccgagaaaaattctccctccccctatcctttttttttttttttttttttttgttttttttcccccccccatatttttttttgaaacccccccaacccacgccactgataaaaaaaattttttttttttttttgtggggcccccccccccccccaaccccttcggccccacatttttttgggggagaccaaaaatcctctcgggaaaaccttcccctaaacccccttttttttatttttgggtttgggtttttttcccccccaaaatttttggggacaccccaaacggaccctggaaaaaattgattttttttttttcggggcagtccccccaaaccgatgcccccagatttatgggggagaccgaatccttccggaatagcttccctatagcctgtacttttaattctgcgatggatttttgctccccataattgtttgagtaccccaaacggacacttgaaaaaatcgatttttttgttttcggggcagtccccccgaaccgatgcgcccagatttatggggagaccgaatctttcgggaatagcttccctatagcctgtactttaattctgcgttggatttttgctccccataattgtttgagtaccccaaacggacacttgaaaaaatcgatttttttgttttcggggcagtccccccgaaccgatgcgcccagatttatggggagaccgaatccttcgggaatagcttccctatagtctgtactttaattctgcgttggatttttgctccccataattgtttgagtaccccaaacggacacttgaaaaaatcgatttttttgttttcggggcagtccccccgaaccgatgcgcccagatttatggggagaccgaatccttccggaatagcttccctatagcctgtactttaattctgcgttggatttttgctccccataattgtttgagtaccccaaacggacactcacttgaaaaaatcgatttttttgttttcggggcagtccccccgaaccgatgcgcccagatttatggggagaccgaatccttcgggaatagcttccctatagtctgtactttaattctgcgttggatttttgctccccataaatgtttgagtaccccaaacggacacttgaaaaaatcgatttttttgttttcggggcagtccccccgaaccgatgcgcccagatttatggggagaccgaatccttcgggaatagcttccctatagcctgtactttaattctgcgttggatttttgctccccataattgtttgagtaccccaaacggacact

SEQ ID NO: 9443 - DNA, 4309 bp, Heterodera glycines
caaaaaattctaagaaaatttataagcatttgtacggctctcagcagtttccctgcaaaatttggtgagcttccgatcagtctagaatgttgggtgataaaatgaaaaaaataattttcgaaaaataatgctggactggtaagtgtgaagaactgtgttcctccaggcaaaaaatttatgaaaatttatatgcatttgtagggttttcagcagtttccctgcaaaatttggtgagcttccgatcagtctagaacgttgggtgataaaatgaaaaaaataatttaaaaaaataatgctggtgtgctaaggtgaagaactttgttcctccaggcaaaaaattctaagaaaatttatatgcatttgtagggttttcagcagtttccctgcaaaattgggtgagcttccgatcagtctagaatgttgggtgataaaatgaaaaaaataattttcgaaaaataatgctggactggtaagtgtgaagaactgtgttcctccaggcaaaaaattctaagaaaatttataagcatttgtagggttctcagcagtttccctgcaaaatttggtgagcttccgatcagtctagaatgttgggtgataaaatgaaaaaaataattttcgaaaaataatgctggtgttgtaagtgtgaagaactgtgttcatccaggcaaaaaattctaataaatttataagcatttatagggttttcagcagttcccctgcaaaattgggttagctttcgatcagtctagaacgttgggtgatcaaatgcaaaaaataattttaaaaaaataataatttaatcaaaaaggaacaaaatttaagagtatcacaaatagaaaaatttaaaaaaatgccttgcatacgtggagaatcgaactttagacctattcaatgcgaagtgacaactctaccgactccaccattgtgaatgtaagatgttccaactctcactttcttaatccgttatgcaaaaatgtttacaaaattaattttattttgtgacaagtgtataactttttattggtaagtgatttcggattttgaattacaaaagaacaaatcccacggcccggttaagctgcacaaaaaaagaattaaaatttgtcattcgaatgctcaaactttctcgaaactaggggaccggactggctagaaacggcactgatactggatagtctcggttacggtcttttttaggagaaaaatccggtccaaacctatttattattatccggactcggcgacggctgcataaatgggacatatagttgtttttaaaagttaggtctcaaatcccgggacggtccagtcgccgggatagacacctggcttagtccggcactgatatgaagccgatgccatgacaacttgtacaatggcatctcatacaaaaggcaaaaaaatcaacaaaagagcgcgcagctgatccattttacgaaattttttctgaaattgctgcatttatgcctttcattagtgttacgcgcgccttgtttattttgcgcgctcttttgttgattttttaaattttttgggtgctgataactccactcagagaagagctaaaaaaatctgaataggcttggactaccgtaccaactattatttttataatggatctgttaaatgcaaaaacgtcaacaaaatttgttataactccattcatagttgagatagaaaaaaaaacaatatgcttggagagcgcttgaagagctgcaccggatgcgagtgccgccgttgctgtacgcttagcggttgctgtgcaatgacggaaaattgcttgaaaaatatacatcagaaaaaaggaaataaaatcaggaatacactctcccgtatcgcctgtagacaaaccgaagggtatatggacgaacggcaagtggactgtttaaacgatgcatgtggatgctaaaatagttttgtttttttccttttccatctctgtttttagcgaagaaatttttattttaaaacaaatttaacccatattttacataagagtttttcgggcggggatataccataaattaggacaggtaaaggagaataaaattttatcttcaattcacagagttgaaaaaaatgggcacatattaaacaggaacagtagtcaataataaaaacattcaaatccatcgtccatccatggatctgagttgtcggaggaatcttaaaaaagaaggaattcgacaacaacaaaaaaagcctttgtcgggaatttggcatttaaaacacttttctgcaactgttcgaattttcaatcgttttcagcttcaaaaaattcccacaaaagtcaaattccaagcagtgagtcaaaaaattcaacttttaattgtgaattcgtaattttaacggtgtaccagggccaattcaaaagttaacagaataaagaaaaataaaatttcagtgcttccggatggttttccatcaagttaggaaatccttgaaaatgtgcaaaaataattataaatgatgatctgatcaggaaaccatttccaatcacaattcttaaataatttaattaaattttactcagtggcgcgggcggtggcgttgagtcttcacgcgggttgaatttctgttgggctgggttcattggtaacacaggttgtaatgctgcaattggatttgatgttgacatagcctgttgaccattcttaaatttttgatgcaattaattaattaattaaacacttttttaacatggtttattttttgattttattttttttggaaaaattttaatgggcgttttttaattaattttttattttggacttaaaaactaatcaaaaagtaatcgataaattaaaaaatgaattatgtaaaattaattaaactaattaaaaaataaatcaatttttgaaaatcaaatttctttttttttcccacccgcccaaaactcactttggccgcgatccgacgagacctccttggcgcatccgatgttgaaggcagcaatgcgtcagtgccattctccaccaatgtttgcaagtgatcgggtgggatcacattggccaatgttgtcccgtttgacacacggcgagtaattgagcctgtttggaaaaacaatcaaataaatataattttttgagtttaataaaaacactaaaaatttttttaacaaatttcgttaaatttgccaaaatttccctcctgctgatgtgactatcggcaccacagctcaaaccatattttatttaaaattatatgaaaatacaataattatttaatttgaaaaaacttaaaagaataatttattttgtttaatgatgaattaaatatttttaaaaaattaaaaaacttttttaaattcaatatgtgaaaatattgtaaaattcttgcaatttaaaaaaattttaattttgcttcctgataattgaatgaggaataaatgatcaaattcattattgtaccattcttgtccttggcagtgatcatgtctgacgggtcacttggctgtcctggatcggctttgtttttggccacaatcgctttgtccgcctcaagtggttccgacttgccctctgctttcagctgtaaaagggggatgagagaaagtaaaatttgtaatttatccaaaaaaaaattcttcagcattaaaatgaaatttaaaaaaaaaataaaaatgggaaaaaatttgaaaaaatttgaaaatgctgattttttaacccaaacttaaattttggatggaattattaataaatttaaaatacttgtgtggtaagtgtgaagaactgtgtacctccaggcaaaaaattctatgaaaatttatatgcatttgtagtgttctcagcagtttccctgcaaaatttggtgagctttcgatcagtctagaacgttgggtgataaaattaaaaaaataattttcgaaaaataatacttgtgtggtaagtgtgaagaactgtgtacctccaggcaaaaaatttatgaaaatttatatgcatttgtagtgttctcagcagtttccctgcaaaattgggttagctttcgatcagtctagaacgttgggtgataaaatgaaaaaaataatttaaaaaaaataatgctggtgtggtaagtgtgaagaactgtgttcctccaggcaaaaaattctgagaaaatttataagcatttgtagggttctcagcagttcccctgcaaaattgggttagctttcgatcagtctagaatgttgggtgataaaatgaaaaaaataattttaaaaaaataatgctggactggtaagtgtgaagaactgtgttcctccaggcaaaaaatttatgaaaccagtgaacatttgtagggttttcagcagtttccctgcaaaatt

SEQ ID NO: 9444 - DNA, 1519 bp, Heterodera glycines
  unsure (1)..(1519): unsure at all n locations
aaaatgatcgcatctccgcncagttcaatcggttctttgcnaattcctccaatggcttttgccccaacgaattgtccgtccaaaattggtgatccatccaacgcatccaaacggaaatgaaaacggacaaattgccgaccacgcgggtggccttggaaaggtcaaaaaaggcgtccaaataatcgtccatcagccgccaattggagaacactaaattaacaaatattaattgcttactaatgaaccggcaattattgtgattaacacacaatttcggtctctcagttccatccgaaattcgtccataaatccctcttggccattgaccaatttacgaatccgcgtttttgccccgcgcttttctctcacaaattcttttaaactcagcacattcgttctgaagaaaattgtcaattgtctgccatgagtttgaatgagtgaaagatgagcattctaaactttattatttttacattatttttgttataaaataaatcctttatccacctgataagctctgatcagtccctcctccgtcatgcaatttcgtcctgtgttccaatttcgaatttcttcctcagttggcatttccttggctccgttgggaagtgccgaaatggctgatgcaaactcgtaaaatcgttgcaaaatgcacacacttttgagcagctcttcccgcatcagttctgtctgccgaattccgaccaattccctccgaagtccgcggaaggcaatccgttggactttccgcagcttttcccggaaaagggccaacactttcccttttaaggtgggcgttttaacaatgagccatttgagtcggtggaaaagcacaggcaaagcgaaacgacattcaattcgcaaatgctgatcagtgcccgatttggtggccaaaagacgcttataaaggaccgtctgagtccaagggaggagcaaatctgaaaaagagggaaggagcggaaaaaacttcggaaaagaaatttaccaatctgcaaaatttcgggaaacatttcgtccaattggataagatattcttcgtccataatttggccaactcttattttgactttttgcatggcttttgagtcggacgaatcgcaaaaaaagcgccgcacttccaaagaaacatcgatcagatcgcaaatgacaaaaaagatcatgtaattggtgtcgcttttgctcccgtacaattgtaagaaagtgaagcaatattcctctgctttctcttcgtcaaatttcggcttcacccaattttccgttcgcttcgtctcctcctattaatttggtaattaattaatttaattaaataattaattaccaattcgaccattttctcactgatcaatcgcttttgccatcgttcgctgttttcccacaaaattttgttgttcacaaagtgtttgccgaattcgaacaancaaagcagtctgccacacttcggntcgcttccgtccatcagctcctccactgcttcttcagcttttccattccatccaaaaagttcgcccgcggagcgatc

SEQ ID NO: 9445 - DNA, 2412 bp, Heterodera glycines
  unsure (1)..(2412): unsure at all n locations
ctgcctgcaggtcccaaaagagaaaaacgcacaaantcggctcctaatttgctctttccggtgctcacgcccttttcactcagcagaacgaattggtaatgcgtccacagaatgtcgcttcggcccaatgctaaaattaggaaatgccatggcttttcgcctctttttctctgctttttacttactgatttctcgtaaagcttcgcccaatccgtttttgctcgccaattcggtcattctctgctcagattccaccaattgcttaagccgtgtctttgccccaggtattctcaaaatgccaatgaaatgttcgcgtcggtaggccacgacgcgttcaatcgctgccgtgtatatttcgccaagttcggcaccgacaaatttatccattattttggccctttccgtgccatcttcacacaattcatccatccgtaaatcccacggcaatttttcgctccctttttcgttcctttttttactgataagttgggcgaattcgttcattttgattaacatgcacagattttgttcagaccccaaatcggtataagctgctgcaattgcttcggccatcgcttccctccaattcgctgtaattcgatcgctcgaatgggcgccttttcctccgccgatcagtaacaaatccgaattaaacgatcgatcgatcagaaatgccattgtcagtcgactgaattccattcggtacgctgttgaaaagcttttgtttgtcaataagctttgcaatcgttcgaatagtgacgaattgagaattatgtctaaacatttagcaaaataaaattgaaaagcttaattaatcctcaccaattctgaatatgttcgggaatttgtcctcaattttggtcacatattcactctttaccaatttgttcatcgcttctttcgtttttcgcattttttcattttcgaatccgttgaaaaattcccgaaaattttcataaatgtccaaaagttccataaagttttgtccatttatgtggccaatttgttctaataaattgttgtacatttgctcagtttgtccatttatatcgcaatttaaaaaaatggcctcatcgaccttaaataataattcattttaaatttcattaaaattatttttccacccgaaaaatttctaaagaaatttcttttctcaaatattcggccaatgcttcgcaactcttcgcataataaaccattaatttgatgaaataaatcccgaatttgtactgcgtgcaaatttcccgctttttctgcgcattttctctccaatttttcccaaatgtttttttccattcgcgcacaaattcttcgataattccaaccacattttcgtcattagcaaataaaattttggaaaaatttagcaaattaataatttttcgacgaataaaccaaagcatcgaattaacattaagcgttggaacaatttcttttgctgccgcatcgtttgaagccgactttttgaaaaagagaacaaaattggccatcaatttgttgcattcatctgccaaatttcgattcgttttcaagtgatttattatttaattattttaaatattaaaaataattaaataattaattatttctttgtttgtttttacctttttctccattttcttcttcttcttcttcttctttttctgccaaagtgtccacattttttaaacattcatttgctttttctgtccattgttttgccattgaaaattcgccgtttctttcccaaaatatttttttttcctcaaatttttgtgcgcttttcatcggtttttgttttaactttttatttttgccgccgtcatttaaatttgccaaaaataacaaaaaaagaaagcataaagaaaaggaaatcatttttgctctgacaatttttgacattttatacactgaaaatggcaaaattaaattatttaatttttagaaaaataaaagcaaattatttaatattttaaactgatgattaattaataagaatattaattaattaattattcttatttggttttatatgttggctataaaaaaggaaggaaatgaattcactcgttgcctatccatgcgactgccttttttcacgtgaaaactaatgaatgtatgatggatagagagagtggattcataaatttagatttatgttgtatttatttggaaaatgaggaagtaaaaaataataaaataataataataataaataataatttgtaactagagttgtacgggaccgagactggcacttaaaaaaagtacaactgagtacccaagtcccggctttgaccgggactatttcccggttttttcccgattttcccagccaaaagggtcccagtttttcaacccgaaaagtcccgggtccccggtttttttcaaaattccccggtcccgtacaactctatttgtaactgacaaatg

SEQ ID NO: 9446 - DNA, 3868 bp, Heterodera glycines
atgtttttcgaataaggaaaaatttcaagcctaaaattattttgcaagaaaaaaataaaataaattttgtgatcaatttttgagaaaatttttcaattcataagggtgtattttctagaaaattttcgggtcatttcttaggggtgtattttgccgactttattgaatttttagtggaatttttcggaaaacgcaaaaaaagacaccaaaacggcaaaatgccaaaaaggcatttaaaacacgaaaatcccgaaaatggcaaaaaaaggcacaataaaagtcaacgtagacgcctcaaaccaagtggaaaaggtgttacctatttatgcttaatatatcgaaactacttcgcagaaaaaaggcaaatgcctcaaaatgggagctctactaattagtgtcttaaattttgcttcatttattctcattttcttcgcgctcacaaatttccctgctgaaattcatttgctgaagacgaatattgtcaatggcaatgaaatgattccggcgcacttttgagcccaaaaagaacaccttaattcgtccaatttatcgactaacattttttatatttttttaatatttttattattttaattttattttttactctttccgtcccccggggcaaaagcactttttgtccgattagccaatgtttgactttgtcgagctttgcggggttttcatatgaacaattgcgcagtgtgttcaaacagacctgggttatgttgatttgaaaacggattgagttaattgacaaaaaaaacccttaattgaggcccgacggatcgttggaagagatcgaatagcaaagtgacgggtcggtccacgcgcagttcgggcgaaacgaacacaaaaaattcattttccgactctttcgaatcgcttccgacgaaggcaaacccttctcaacacagtcagtcagttgaatttcgaacttgattttgccattgttacccattttggcgttctgtcctctgctgtccttgtgaatgcccgtgtgcgcatttcccaccggacctttcgcaattttccacgccgacctaaacaaagcgtaaatttggaaagcattgaaaaaacatttcgaacattccgccatttgctctgagtttgtatttgcacgcttctccattgtcaaaattgcatttcaaagcttcgcaaagggaagcgaattggggcccaaaaataagtccgaaagtttcgtcctgaaaagccatggccaatgaaattaatttgtgggcaaaacgagcaggggaaaccttcgttctgcggaggacacttctgaagcgaatgccgcctgagtgttggccaaattctttccccctttgggacaatggcatttttcgttggggttttccctcgtggtaattgccttcgttttcgttgatgaggccaaacaattccaaatgcttatcactgaaaatggtcgaagttcttcgggttcgcccctccttttgccggtcattccttcccaattagcaaattctgatcaccaattcattcgatcgtgatcagaagcacggagtgccgttcccatttcatttcattaccctttcgatgcgttcgctgtttcgtcttcttttgctcctttctgtctttcttcttcttcttcgtcttcttcctcctcctcttctttttcatctctttcagtggtatcaaattccccccttttcgtcgtcggcaatttccaattgttgctttttgtttatcagaagtccatcgacggcattttttgtcacaacttccggttcatttaacttcataaattaataattaataataatttaataatatttcatttaatattgtttttctgaaaatccaaaattgattgaaatgattccaattgttttttggcattcgttttgccatttttatttcttgtgccgttcccccttcccttacacaattctttccaccattcccgtcgtattttatgttgtctatcaaaaccatgtcttctctcccaacaatattatcgactccaatccgaatacgaaatggcccccaattttgggggatttcaaatgtcagcggattcacgtccattttggattccttaattgttgcgtttttaggttttggcatttctacgtggaatgtcacaacctcacattgcggtgaatcaaaggctttttctggcacaacgcaaactttcaaagttggcgtttcgttaatggaccaataactttcggaattggttaattctctcagtgcccttctcctttggcattttcttactcaaatttcagcgtcgccttctccgtttgacacggcactttcgcttcgatcgccgccgtcgcctcaacggtcgccgcgtcacttccgccagccaacaaaaagaatccgtctgaaaacgaacaatttcgtatttaaatttggcttatttactcaatggaaatgccctttcgccagtgcattcgaatttgtcccaattgaattcggccgaatcgaaccgtcccctcacaaatgcttcactttcgtgcaaaaattgtgccgatctggcattatgccaagcgcaattttccggttgctcaaatgaacagctgagatttgtggcaccttttacacattgaaagcataaaattgcacaaattcagcgattcttttcccactttggtcttcataaaattggtacaaagtgacaagccgacgcaattctaaatccgagaagtgttgtcattttctgtgaatttaccatttgtccgatattcgcttagtgctgcgctttggcacttttgtgccctcttttctccaatgtcttttgatggcgaaaaggggacatttggcacgcctttggctactaaatgcgaagtgccaaaattagggccacaacagaagtgataatagggcgaagcggacaaagaggagaaagcggagaagccaatacagcaaaggcaatctgagggggaaggaggtgagaaaaggtgggaaagtgcccaaaaatgccaaatgtgcagtggagcaaggcgaagacgagcaacacgagccaacggggagaagggacgcccggggcattcattcggcagactttggcattttgttgagcaaattcaaacaaaaatggcaggtcaatcccaatgtacacacgcacaattaatgctttgtgcttccgcttcttctcatctctttttcttctgccaattcttccggcggatcggcgcgactttctccgttcttccgccccattcattcgctttccttcccaaaattacctcacacaaaggaaaaggtttctttcttttccgccaatgcggcggcgttggaattaggcggaaaagtgcggacaaaaaaaaggggggaggcaattagaaattgctaattgacagaagaaatcaaagagaaaccaatgaaaaatgaacgaacgaactgccaaagaatgggacggagaaagtccgaaacatttgaacaatatctgcgaatgaaatgcttcagcttatataatctgtcaaacacatgaaaatgtgcccattcaatcgttgcttaatttgttcgggtaatgagtgaggcaatttggcctttcattgcatcaatgactgctggtggtactcattttgccagtgccgaatgggctttcctccttttaatgtttaagcgaaaaaagcaagaaaagctgaaacatgggcccaaataagctaaaattccacgtttactgaaatgatgcaactcattgggctaattgcacaagtgaatttcctttttaaaagcaaatgaattctatttggaattcgtcaattgcattattaaatgcttttcatattccattaacaaataaattactataaaattaacaattatttttatgtttccgtttgcctttttcattttgccgaactttgtttttctttcatttctctcttggccaaaa

SEQ ID NO: 9447 - DNA, 3714 bp, Heterodera glycines
ataatttcttccaattgatcaaaattttcaaaatctttttcttccttttccagttcagaaattagtttctttggccgacacagtttgacgtttatttggattttttttattaacagtacgatcacaaagattaactaaagtgattgaaaatttggtattggatgtttaattttattgctccctagatttctgaccgtttatttgtattttttcaaaatttcttttcttttcttttcaaattttttaatttagaggaatttgaatttctgctggaaggactttcgagtttaatttgtataatttttggctttttactgtttattttattatccagccttattattaattgtgatttttctcaacacaaattttttattaacagtatgatcacaatgattaattgaaaaattgttatctgatcgcctttgaatacacctagagtattttgaactcgtcggttttgttttcgtccttctttgtgtgttttagctccgtatcgggctttgactcagcctttcgtttcactgaattttttgtttatttatttgtttgtttgtgattttggtcttgattagaactaaacgtctaaatcagacttttgattgatgaagaacaggcacaacaattttctatttaaacagatgaccggctttttccagttctcagatcagtgatcagcttttgttgttgttgttgttgttgttgttggtctttgtcgtttgcacttcccgggtcttggcaccaaaattgatgggatgcactggtcgatccaatcaattaatttaatattttatttgggatggggcgacaaaggacacaaagtggaaaatttggtagatttctgatcacaattgatcaatatccgcgatgcttcgaatgcccgagttgtgatgtattcagagcgagttgttgtccggcttgttgagtgaagagaaccgataggctaacagagtgaattggttgaagcatgcctaaactgaaaacccttcccctttttataccaaaattttttggttatttaatagcattcaaaatttccacattatcattttatggttttttcatttttaaattattttttatcgttttagttttttcttcccttttatttaagaaaggaaaacttttcataaacaattttaattgcttttacgttcaaccgttttattgtggaataaatttatttattatttggggcgttttattagattattttttagtttttattgcgagaagcattcgcttcgttttttatgaattcattttgttttatttatttattttattttacttttattttatattcatttatttatttaatttaattttaaaaataaaaattttatgaaatgtttattttattttggatttatttttattaatattttgtattttcatgtaaaattcttattattttaatttagttttgtttttattaatagttttatattttttcggatttaatccgacactcccaacagaggaagatttaggtttagttttggtcttccgtcggaagattattcttatgattagaggccatactattggacccagaaaaactgcaaatattaaaatgactattaatggtagtatgaaccaggcaatccataaatttgactttaagaaatttataattttagaaccgaaattcttaatattattgattatttcatcaaaggttataccagtttcgggattttgaatagtattattcaaattcgttttttgttcttcctgttgttgtacgtaaaataattttccttttatttctacttcactattacctcctggacatattagcgagcatttttcattgatttcttctatattataagttagttggataatctgttctttgtcttcagtatcacaatttatttcaaccttttgatttggacaaactagttgggctaatgcagatccaaattctgatttacatttaaatttccagtctgcacctttacatgcgtagcacccacttaaggatattgattctacagtacatttcgttttatcataaaatggagtagttttaaaaccttttaaagtaatttgcaattgtaaagctgttgtctgttttaatttagcctttatctgattattctcaaaaaacaaatgacttcctttaaaatcaattggtaatttctcgttttgttgttcgaacatttcgggtaaaggatcttttgtacattcgcaatttacttgtgtgtctccgccattacatttacatgcttcaggtggaaatttacagctaaatgttttagcggaattttcatcaggacatcgaatgctatttcttagtaaatcttcattgttaacaataatagcatcattattaactttattgattataaatttcgaaccaaagattggtgtaggtggaatagtcatagtagtaagagtcatttctatattgtcttttttatttagtattcctggttttaataatgttgaatctgcagttgatccgtcatcagattctatttcatatttgaagttcagttctattggccattgattgcatttggttacttcaaaataatcattaccattttcttccatatatgttctataaaataaacatccatcagtcgcaataaagcattggcaatgccaaccaccgcatgagggcacgcaatacgaatatcctggttttttgtttgctttgtcagaaatttcaggattcgatgaatcactttttatcttttcacaagttgaaccttgacactgtcccatggttggacatcgtttaaccgattctgacagtatttcataattacgcataaaatattctgactccctttcacaggttaaaattaattcttcagttgaaaatttaattgttttaaaagtagtatttcgtattttatcttcaagcttaagacaagttttgtgttcaggttttatcgatattaaaatggtttgatcaaaagtacattctatttttccattttcatctcgagggcaattggttgaattagcaattaaattggtaatttcgtcacagctttttgtcaggtgaataaaatttagaatcattagtaacaaaatagcagttcttgatttcagagtataactacggctttttgactttgtttttggttttaaattctttttcttattacagaaaaacacgaatttaaaaatccattttaaagttgagtaaatgaatttaattatttgcattgaaattgacagaatatagatggtaaataatactaccgagattattataataaagtgaaagtgttctatgcattgtggagctcgtaaatattcaatacaaattttacattttatcatttcacagatcggagaggcattacaatttgatttacttacttctgttattgtattattcaaaatcaatttaatctcaaattcataattgtttttgataatttcctgtggaaaaataattgtttcttttaaatttggtttgtttattgttatacaataaccttgactacaaaccccaataatatcaacgggattaattatgtttagtgttattccgccagtaatgcattcaattaaaaagttagtagatcgtttatttctaaataatgtatctcctatttcgttttgttttttcttctcaattttcggataagaatttgaaatatgtgaattatttgaataaaaaaatgaagaatccatcaatccttttagtttgttttttgctttttgatggctctctgtataattcga

SEQ ID NO: 9448 - DNA, 2289 bp, Heterodera glycines
  unsure (1)..(2289): unsure at all n locations
agatggtaataatactacgagatttatataaataaagtgaaagtgtgntatgcattgtggagctcgtaatatttcaatacaaattttacattttatcatttcacagatcggagaggcattacaatttgatttacttgtttctgttattgtattattcaaaattaatttaatctcaaattcataattgtttttgataatttcctgtggaaaaataattgtttcttttaaatttggtttgtttattgttatacaataactttgactacaaaccccaataatatcaacaggattaattatgtttagtgttattccgccagtaatgcattcaattaaaaagttagtagctcgtttatttctaaataatgtatctactatttcgttttgttttttcttcttaattttcggataagaatttgaaatattatgtgaattatttgaataaaaaaataaagaatccatcaatccttttttttttttgctttttgatggctctctgtataattcgaattgaaaaacaaagaatccaatgattctttttgtttatgcttttttcttttttggttgtcttccgtgtaatattctgtttcaattataccccattctttaattggaatttcaattttacctaatataagataaattctttctctttgatcatgatagcaaaattttgtcccttttttatcacaatgaaatagttcacaataacctggagatccaatcgttagattgccctcccctagacaaaggtaatcgtattttgattcaatttgcgcataacggatatgtaaattttttacaaaatatatgctattgtcatatagacgaatggcgtggaattttcctttggttttgttcatacacctaggattttgtttgaatgcgcatatactgggtccggcttgtctaataagtttctttacaattttcttgttatattttttaattgattgatatggtacaaatgaacattgttgtgcccattttgaacattcacatttaggtccacagtacggtgtatgattatagattaaatgtctatttaaacatgataacatgtcagaacagaattcgttattttgtaaatttttacgaacaataattccttcttcaacacaaaaactggttaaaattgttgtatagtttttaaggtctttaggacaattataattagaataagtattcatggggactacaaataataataatgcaataaaaagtaatttttgaagtaatgtagagggagttgaattaattgtttgagataagttatttcttttctttgataataagttatttagatcatcattatttgaagagttttgatcgtaatgttctcggtaatttaggcaaatagatttatgtattttacatttatcacaaaaattttcctcatttttacaatttttaatacggtgtccaggtttaagacatttataacagagtgataaattttttgctctcatttttctcattctataacctttatattttgtacaatgaatttgaagatggtcattgctgaaacaaaaagagcattttttgatttcagtatggatagaatctcttgagtttagaattagattatttatttgtttatttatttcatcattttcatcaatattcttcgaaagttcaagtgggtatattaatttaaggggtcgattcataattgatttatttggaaattcaatttttgctccccgaattatattatctgatccaattattaattcttttattattccagttttccataaggctcttggtaattcttccttaattaagactatatcatttatctttggaaaatctttaacacattgttttggatttttgtgatttatctgatatctttctcgtaagctgggtatatattcttctgtccataatttccaatagtcatctagaagttttgatgttttcttccataattctacagttttttcataagaattaaatttaggtttatatgttggatcaccaaattcattttcttctaatattggtggaatacaaatattttgatggggtaaaagaaaatcgattggccgtaaaatttgatatgaattaatatcatcataaataaaagttaagggtcttgaattaactaaactttcaatttcagtaatcattgtgtgaaatgtgtcaaaatcaattaattttttaccaattgtttttcttaaggcagatttaatgtttaaatttaaacgctcgactactccattttgccatggggctaattctattgaaaaattccaattaatattttcagttaaaaaataattt

SEQ ID NO: 9449 - DNA, 4886 bp, Heterodera glycines
  unsure (1)..(4886): unsure at all n locations
ctgcannggtcttttttanatcatgcaccagccggcaacaaaatgacattcttttttcttttgactgatttcccaaaatcgttgcgcttttttctcacattccctttgaatttgccagtaaaaatgccgttcactcatcccatcctaaagtgccattctctcattccatcctaaagtgccattctaataattccttctaaaatgccattcatatcattccatccaaaagtgtcattcttataattccttcaaaaagtgccattcatatcattccatccaaaagtgcaattctcttcattccatcaaaaagtgccattctcttcattccacaaaaaagtgccattctgtcttccatcgtttgcgcgtccttttctatcgattacctatttttgtatttttctgctgtgctcagacgaataaattttggcttctctcctttcttccatggaaaaatagcacatcaaaacattttgaagaaaaaaataaaataaaaattattttcactttttaaaatttaagttttttattaatattctcgaaaaatttcctagaaacttatttatgaaattttcggtcgccgtatataattactcacacccttaaagcatacacaaccattaaaattatgacataaatatttaaaataaatcctacattgccattaatctggtttttaacttgttattttatacaataattttatgcttgtgttgagcgtatacattttttttcggtcgcattaattaagtttattgtacgcgattctgccatatcttctaaataaaagggcaaaatggcaccaactttttccaaacaacattcattcacggcactgggctccttcattacatattgcggcacaaggagaagcgcacggattgcaatgaaagcacgcaaatatccaagaaaaatgtattattatttttaaaatgatgacaatgttaataggtttaataccaaatggccaattgatagtgttctgggcagattattaaaaaaatacgatatatttgacccgttatcttttacacagagctctgttatactatctgccaccgtataaggataccgtattagctgaactttcaagtgacaccaaacaattgaaaaaatcatttccttaaatttgatgctgataataaaaaaataaataaattggaaaattttcgaaaaatatcttagctaggggtaaatgttttttttttaaataagtattttctaccgaagtcttttgaatggtgagtttaagaaattccgatttggcttttagctatgtttgcagtgacatttggatgcacatttttccgtggcttaaccctgagcaagtctcgcggaaattggcactgctttctgcccgatttgatggccttgtggacacacatttcaaatcgcgaaaatgggcatttgtatggatgcttatttattacagcaacaacgtgaaccgtagcggtgtgagcggcgtcgatgtgtatgttcaacacaacagaaaaaggcaaaatttacttatcccttatagaaattttaaaaaaatttgaataaatatttcatagcataaattcagaaattctaaattttaactcttattataaaaatttggaaaaatagttgcttcttaaattatataaaagaaataaaatgctatttaatgtacttttttagaggtttcagaggtttacgaatcgatgaattgacgccgtccaaaaatttaattgattttaaatgcatcgagctccggtaaacagtgttatttttatattgtatagaaatttatttctactttaatcaaatctgttttcgttggtaaaaatgtacagcactctcccacccattcatcttttcagtcaaaaatttcttacgaagtataaacatttctttaaaaattacacattttaattttaattattttcttgaaattttcaaattatttttaataatttttctagaatttttctaaaattggggacattcgcaactttatgaaaatgtcagcacgagaaaaatcgctcaaagtttttgtaaattttattaaatgctaactaaataacggattttgaggcatagcctttttttctgcgcattagtttcgaggtactagtacggtttgtatcccctatttttcaaatttttttaattgtacgaattgctttaaatgacaaataaaagatgatttatgtgtttattgggtacaattcagcgatttgtgaccaaatccggtcccccaaattgcttacgccacaaaaaatccgaaatatatgtggaaaaaagtgatctgtgactgccaaatctttttttgaaaaatagaggatacaaaccgtactaataccagtttcgatataataagcgtgaaaacaccttttccacttggtttgaggcttctacgttgacttttattatgcctttttttgactttttctggattttcgtgccttaaatgcctttttttggcattttgccgttttggatgcctttttggcgtttttttgcgaaaaattccattaaaaatgtaataaaatagtgaaaatacacccctaagaaatgacaattttaaatttttttactttctaccaataatcgtttaagaatatttcgttaaacaatacgcaataaactcctccaaattattttagttactttgacagctctgtgctctcattgcttcatcgctttaagccacttttcctaatgggcatcactttacaactaatgggcaaagggatggaagccccgcggggttgggcactgcgcatccaccaacttcttcctctgatcggcatcaccaacatccacaagttgtatgttagcaccgggtacgtgagaacaaacatccaatcttaccattcatatactcacattttgtaaagtgatttaatattttattcaattttaaataccgaatatggttcaatcagtttaatattttagaatagtttaagaggttcccctacatttgcgcacctgctggacatttgcgcctatgttcaaaatcgggtttaaaacttgaatgttttcagtcccggctgatggcttaaacagcctttaataaaccatagaaagtgattgtatgcgataaattgatcataagaaaatttttgaaaaaaaattaaatatttctaacaagataaccctaatttaatatcagtttcatctgttggaattaggactacggtttttagcttctaaaaaatcacaaaataattactaaaaacaagaaaataagtgccaaaaagtttcagatttagggaactaaaatcgttaaatattgaccaatttttaacattattttttaaaattattttgacattttctttaaaattaaatctaagaaccgatcggtgattttcaatattttcttacaacaattttttccttattttagtggctatagtcgactgtgcggactgcttgtaagcatttcagcaacatttctgatcgattgtcccaatctccgactaatttattatgatgcgattatgactggccctgatcgtccctttgacaccgccaaaaaagtgcaggaatggctccagtggccacggggagatggccgtccaaaagtgttgtttcgttcataccagctaccaattgttgatgagttcaaacaggcgagaagggcacaagcaatcgggcgaaatgcatatgcaaaagcatctaatcactcttaattgactgtgatattagagaaagtgttttaaaacacaaaaagtatgtaacaggacaaaacccagccgggaataaaattcaaaaaattttcaaaataggaaattttacaacaaaaaaaatcttaaaaatattcttggaaaattctaagaaaaaaaaattaaaaaaatttccagcgattttttcaaaatttaatggtgaattactaagttttttttcagaaaaattttaaaaaatcgctgggaattttttgaaaatttttttcctttctaagattttttcttgaaaaatttctgtttgaattcccggctgtgttatgtcgggggctgtgctttggggtgcactgcaaaaaaggaccaataaaaaacggtaaattccctcctgagtcgtgtgaccagcaacatggacttccctttacgaagggaactttgccaattatgagtacccaaatcagtttttaatcatgccaattctgtagagcaccatcaattcattattatttaattttggcttttttggccctttaaaaataataataaaaaaaacaaaattaaataaaaagaaattaaaaatgttaagaacattttttcgaatattaatgtaacaaatgataattaattattatggggctgaaataagaagaaagagctcaaaatagcttttcagcatatgcaattttaaattttttgcgcattaaatttttttctgtccaaattttttttaatgttgatttttttttcttcaaattttcccttgaagattcagtaaaaatctagaattttttttaaactgtatttcttttagaaattcattaaatttttatgaaatttcttatttccaatttgcaaataatggataggaatgtgagacgaaatttttgatgaatccacagtttttggctcatttaacccccatttttgttcaggactttctgactgcaaccataccggcaaattacatcatctgttttatatcgtttggtattcatccggagaatgttgagcagtttcagctggacaacaaacgcaccaatgaacgattgaaaattgaacgaaaagtgttggatcagcaacagcagcagaagagcaaagtttgcatgacgagggcaccgatcggaagagacgagcgacagtgggcggaatggatgcgaaaagcgtggcaggaggaggaaaagcgaaatttgctcatattttggatatcggaagcgaacatggggccggacatttgat

SEQ ID NO: 9450 - DNA, 1208 bp, Heterodera glycines
tttgtttacattttctgcactttcatttctttgctttatcattgttatttctgtacaaatttgtcgcaaaattccctaaatttttgttttaggaaatcttttaaatatattattaatcaattatttaattaatacgttctcattttgatgcttcaattcatcaattccagtttgaattctcccaaattgggtgaaaatttcctgcattttctaaatatttttttattttaaaaatttttaaccaaattaattattttccttttatgttttgtggctacaatttaaataaaattttaaacagcaaagggcgcgtaatataagcaaatgcgctgaccaattaaaatactttggtggcataaatgcgctttgatgtagaaatgagtactggatgggaccggcatccagtcggggttttgccgggattcccggcctatttttgggtcattaaaaaaattaaacactgctagccccttgtttctctcctttttcaagttttcataaattatttgtgtttttaaatttcaaatgattacccattcactgttttgctttatcattgcaatttctttgtgtaattgcccgatttgttcacgcattttctcaatttcttcacttttcgctttgttaatttggtcaaccattttccgtaatttctgaattttttttaatttaaattaataattgcttaaatacttgatcatattcttgttttgtctcctccaaaaattcctccactttctaaaatataaattaatctttaaattttatttattttttacttttttctcattttctttttgttttatttgcgctatttctgttcgaattccattaatttgctgcaaatttttaaaaatatttcgttgttgttttttttggtttttctcactttttcgttctgttgatttgtctttattattttttcttgaaattctttcaaattctaaaaatttatttttatttttcctttaaaatttatttccttttttaccttctcattttgttgtttcatttgcacaataatctcgttaccaatatgatctattttgttcgacatttgttctgttttctgcatattttattttaatttatttttcattttaaattatttctcaatttttataattatattttatatttctggtttttttattttatttcccttaatggattctgaaaattgaacatttcattttgtcgcttcatct

SEQ ID NO: 9451 - DNA, 2326 bp, Heterodera glycines
  unsure (1)..(2326): unsure at all n locations
cccgtctctttctcctcccccacaaatacaatttgggcactttcctccgtctgtgtacggtaagtttgtcactttccttcatttccttgccatattatctccgcaaagtacactttgtcatcattttgccccaacggtggcaaaatgcgcaaatggaaatgatttgagaagcgaatctgatgcgtgtcaccgttcgcgactcgaatggcacgcgcaacgaattcgggttgattcacctggggaggggggaaatgtggatgccgcatttgaaaggaaaaaccgcctttttcccaatgacctgctgggcctggcatttttttcaagttaccagacccatgcggatgctttgtctgcggtggtggtcgattgggccccgccgattgggccccggtacgattgggccccgccgattgggccccggtacgattgggccccgccgattgggccccggtacgattgggccccatggggcagtcacttttttagtcgacttttggtttactttcactaaagaaaaattattacctatgtatatttttaaataaaaaatggtttttttaatcgttaactttgttgcacattaattaaaatgtatttttttcatgttgggttcgaacctggacctccgaaaaataggaatttaacccactgatccaccgttttttttaattttccccacttcaccaccaccaccttccctgaaggggaaaacacagtcaaaattttgatttttgaggtccaataacttttctatttggcttcaacacaccgctaacattaaaaattcagagtagccggccctgcactatcaaatagttatgatacatgcattttctgacacagttctgacggttcccttgttagatttggcccaagctataagcttaattttgtaaaaaaaatgtattgtacgaactgctattgtacgagttattgcctttgtaagaatggatagaatttcatacttaataaatttatgaataatttaatttttttaaaacatgtgaaacgaaaaaaaagtggctgccccatggggcccaatcggcggggcccaatcgtactggggcccaatcggcggggcccaatcggcggggcccaatcgacccggtccgtaaaaaatgggggtgtgctctgagagaaaaattattatttggagactgggagaaaaattttattgaaagaaaataattaatctatcccgctgaccaaaatcctaaattttatttaaaaattgccaaaattgcaaaattttctcattttacggacaaaatctattaagcggcgcctatcggcaccgccggccctcctaccctaaaaatttgggaaaaataatgcggcaaaaaattgaaaattcgtaagcagatcacaccataattaaggaattttaggagaactttcaaagtaaaaaaataataataaacttctaaattttaagaaattatgataaaaaaacgatgaaaataaattgatttagaatttttgattaattaaattttgagaatgattcaaaattttagaatttttcactaaaaaattttgcggttttttcagtattcgtatttcgcattttatttttcgattcgaaacactggtgcttattgttagcagggaagtaagtgtgccttcgccttcaaaaaatttggaaattggtacacatccctggtgcctaccgacctccctcactttcaatctctctctctctttctcgctctctttctctatctctctctgtctaatctctctcttatctatctatcactctctctctctctttctctctcttatctatctctttctgctttctgtctcttaccctatctctctctcttatcttctcttctctctttctctctctctcatatatctatcacttatcattctgtctctcttatctatcaatctatctgtctctctcttattactatctctctcttctctttctctctctcgcttgtgtctgtgcctgtccttacttttgtccttaattctctttcccatgccttcttcactattctctccatctttgtcatgctttttctcaataatgctcggcttctgttccgcttgccttttttcttctaagactttctcgagtttcacatattcttcttctccaatgtgttctttcaacccattcatcgcctcttcaattaactccgggatctgaatgaaaatttatgtgagtcaccccccaaaatgaataaaataacaaagaaccattaagcgactaataaatggaaatttttgaagtcttttcgcaaatttgcataaatggtaaaataaattttgccccgacgctatcctctctngcgcaaaattgcatgac

SEQ ID NO: 9452 - DNA, 1855 bp, Heterodera glycines
ggcttctggactagtcagctgaggacaactcagccaaggacaactcagctgagctgatgagacaatttggctgatggacaactcagccgtacaataaaaaattacaaaataaatcataagcttaagcctaagcctaggcttcgcctaaagcttaggcctaagcctaagccattgtacgagttgcctttgtaaattttcgtaaagctgaattgtccatcagccgaattgtgccatcagctgagttgtccccagctgactgatcctgacgcgggtcatttagcaggttatttgacattttttaaaaattaggaacataattcattaatttgatttttttttctttttttaatattttaaaaaacccacacaaaattattaactaaatttccatgtaattaccgaaggttcccggtgatttcgtcagtgaaaattaatagtcgcggattcaaattgccgcggtcggaaaaaaatcccgcggtcgcgcttacattttatttaatattccgaacgaatttatgtgttaatggaacactaaaatgttttttttcgtaaaaaagattatttgatgaaatcacatgtcatcattagggctggcaaaaacatgtaaaaaaagttgtcagaatatgtacataaatatgtaaaaaaaaaatcccgaaatatgtatgaaaaaacaccaaacatgtaattaaaaatttttaaatggttatttttttgggaaaaatccttcgtaaaggatgaaataggcacaaaataccatagaaattacctaaataatcttagattcacatttttgtatatttaaatattaatttttggtatctccttttttgaaaaaaccgatttttaggggtacattttaaattaaaattttcacaagaaaatttttataaattctcaaaaaaaaattaggaaaaaatgctaaaaagtccaaaatatgtaccaaatatgtataaaatcctgaaatatgtaaataattatgtataaaaccccgaaatatgtaaaaatatgtaaataaaagtcccgatttttgtttgcaaacataaaaaagaaagtgtttttcctactatttagagcatggagaatccagctggataaaatatgtatttacataaaattgccagccctagtcatcatagccgaaatcttttaaacagaattaaatttaaaaaataaacatttactatttttaattgatttcattttcatgaaatttcaaaaatcttactttttcctatttgttaaaaaaagttttctcaagaattagactaggttgccgaaaatttttttgcattttcgatgccgttttgtcccgtcgacgttttggggtgggttgtacaccgtccccgcccactttccgccgaattttttttttcttcgtaagatccgattaatctttttgccttacatctcgctttatggtgttgtcattcaatatcaacaaaagttcctccaacttttcatcattttcatctgtatggtgcttacaattagctgctttatcaattcttgaagaagaaggagaatcattttgtagtgataaaataaatgcaaaacggagcatatcattatcaatcgatgtttctaaaaagaggaaagaattttggctttttagaaaaatataaaaaatatcctaaatatttaaataggctaattcttaaccaagaaaaaggtgattaaataatgttttttggtatatattgaacaaaaaattggttttttttagaaaaaagattcaaaaaaaatttccgaaaatgtccgactttttatcaaaaatttcggaaatcggaattctgacatcaaaattttttcagaaatcggaattccggccccaaaaatgtcggaaatcggaattccg

SEQ ID NO: 9453 - DNA, 1570 bp, Heterodera glycines
tcgtttaatccaaacacaaaatagaaacgtgcaaaaaccatttaactttgtgcgcggcatttctctttctcacgttaaatgccgtcatttgccaaaaatggggacacaaattggcacagttttattttaatctttgttgcatcctatttgtccattccattcctttttattcggttctattttaatttttgatcatttcccattttggcccctattttctcctaattgtccctaatgacccttgctaattgtcgtattccccaactttgctttattctgctctttgcccttctgctgctgatcaatttggcgcaaagtgaccaacaattgagcaaaggcattcttttaattacctttaatcatttcatttattactttgccatttttggcgaacaatcgccgatggacgccgaattagacacaaataatgagcatgagcaacattacggggacggagtgttcgtcgacgcggtgccaatgtgtggcggtggtgccaacatgccgaaaagggcattcgtcgagggacaaaagatcaacggggtaaaagcggcagataaagtgccaaaagagtaggaatgaattacttttcactaattttcagaaaaaagggcccatttccgacggcactttccgccctttcagtgtcgccatttggtcgcctcagtttttgccgcgacggaaatgaaactttttagggatgaaaatggacgaggaaataaggaaacgaacgaacggcgacagatctttcagcacatttttgtctgtccataaaacgcttaaaaattgggtggaaattgccatttgatttcaaataaatatgcgggatcagtttttgtcttttttctttatctaatgatcagagatcaagttcaacaaaaattgaaaaaaatgccaaaaggcaaatcacaaattaattatggtaattaaagaaggaacaaacaaaacaaagctcatcgaagggagggagggcaaaagtgttttggtaatagaataataaaataattgtcaaaatatatataaattgaatggctctttaaaggaacaccaatttttggggtcagcagatcaatgtttgcacggcattttggatggcaccccgaattttttttggttaaacccatcctccccgaatccccctaatgtgggcattcaggccaacattcttcggcacttttatgccttaattgatgggtcggagtgtgtcgccactttccgtttgatcagtaaaattgcgattttccaattaaaatgttttgcgtcaaaatatatattaaattttagaattagagtttcctgcaaacactgtttttgagatcggatttgggaatttggacgggtggaaatgatttctttggtttctctgccttggctttttttctctgtgctctctcgctctctctatctgcgcgtgccaaacagtgtctcgtaccactctgctcgtctggcactctcctcaaatgtgcgcacttttcccaccggcggtcgattccctttaaattatcggatgatcaaacttgtttatttttcaatttgcccatcgcttctctcacctgctgtcctttttttgtgg

SEQ ID NO: 9454 - DNA, 1844 bp, Heterodera glycines
ttctgctggttggtccgtgccggcttctgctgctgactttggaaatgttttcggcatttgaccacgctttcggtggattctctcaacagtaataaaatggcaccaatttgcacaaaaagaaggcccaatggcattttcacgtaaaagcaattagtcgcttaattatagcaaattaacggaacaattaaaaaatgaaacggaaaaaatcttccgatgtgctgctgaaaagtgctgaatttcagtttcgcgttttgtgtgctctttctccgggtggcacctttcgctttgtctgccgattgatttgggccaaatttggagacaaaaaatgaaaatgataagccaaccaaatgtgaaaagtgaacattgcaatcaatgtcagcacatttttggaagggtttctttccacgttttggtgattcaaatagtcaaaattattacgaaaaacgggaataatttattaattaccattcattaattaattactattcccaatatttgttttttgtaattgtattttattttgtctatggagtaaatgtgataaattcatcacaatttaatatgtacgggaacctcttttggcattggaatttgctaattagggcctaattagggagtgggtgttcatttcctttttttccatttccatttcattttgcctttgcgaatggccaaagttttgcaaaggatgggaatgggaaaggtgccaagaaagggagcgcccaactgactactgtcccttccatttttgtccttgacaaaagcgggggggggggggggacgaggaatgtcgcattatgtgaacaaattatttcatcacgaggacagtttttgcaaaacggcaaaaattgggggggggggagacaatgcaaaatggggataaaagaaagaataacacaggaaagatagacggagaacgataaagataaagataaagcgagagagagaaagagagagaggaaaaagggggggggggagagacaatgcaaaatggggataaaagaaagaataacacaggaaagatagacggagaacgataaagataaagataaagcgagagagagaaagagagagagagagagagagaggaaaaggggggggggaatttgtggcatttggccaaaacaattagaaggaaggcgtaatatgattggttctaacatttccactgatttatttgtgccaaatttttcggaaattcagtctcaattttcaatgtcccgttgctttggggtattttttattttggtgtttaaagcccagggaaaaattgaaaaataaacgcggaaaatgggattaaaaacggaaaaggtgatcaaggcgaaagcatagggtaaagggccaaaactggggtcattttgggcaatgccatccttcattcattcgttggcaaagtgtcgggggaatgacccaaaaatgggacgcgaaataatcggcgggggaaggggagcgattggggtttgggcggaggggtcctcaccgcaccatcgccgtcgtcatatccgctgacccctcctccctcccagcccaaatgtgctcattttgccccattcattgtgccgtggcacttcgtcccggtgggctggcaccgatggactctgaccccgacgcctcaaagattcatccgatgagcggggtcagcagcagctcaacgccaaacaccgcacaaacgatttggggaggaatacggtgagtggaggtcattggttactgtagctgggagagaaaatgccggaagggacaccaatagatgaataatgccaatgccaatggcatttaatcgttttttaaaaatttatttaatcaacaacaaaatttggcatatgccaaaaacaacaatgtgg

SEQ ID NO: 9455 - DNA, 432 bp, Heterodera glycines
ctccccctccccgcctttcccccgccccgtcgttttactttccgttgcgcaacagtaggggaggaagaacacaaagcacagacagcttcagggacagggaaacaaaagactgaacccaaagaacagcaccaacaaccccccccccttccccatccaatcccatcacttttaatgattttcccttttggactcttttcgggccgaaaagtcacacaaaaggcaaacggcgacgggggaaggggagacggagggggggggggatgggtgttcaattgaccggacacaatttcgcaaccgatgggaattttggagaggggccaagtgaaggtgagaggggcaaaggtggtgtggagaaataaggaatagggctgaaaatgatgagttaccgagggttgacacgatgaaatgagtcattgggtggggcggtagaca

SEQ ID NO: 9456 - DNA, 3265 bp, Heterodera glycines
ttattcttttttcatctgttggctaatgagactctcaataattgagcaatttatttataacttaaagacggtttttcattcttcaatccctccgattcgatcaaagtgtcggcattttcgtcaatttccttttttcaatttttgaactgccgaatgcaatcacaattttaaagcttattgaacatttgaccggttactttgagaaaaattgaaacttgccagcaatccgctttgccattaaaatgtttgtccgccagagcattaaaacggggcgaaagcaatgccaatttgaggccgagttgaagatggtcagaaatgcccatccaaagtgttgcaaaaaaccagctgaaaaaaaacaaaaagtaaagagagaattatctaaaatgtttgaaatatagattaaaattctatacaaaggaaaaacttaataagcattggtagtttggtgtttttaattatttaacaaaagggaggggggaatcaataacaaaatttatactgagaaatgaataataaaatataatcgatattcgtcgctgaaaaaaaaggttttttgcgctctagttatttaaaaaatggggaaaaaaagctacaacagtgatcagaagaggtacaacagtgattagaagaggtacaaagcacacagggattctgaggtcataaatcgaaaaaatttctcaaaaaaaattttcaaattaaattttttaaatgccgaatccaaacaaaagtagagattagaaaaattttcatagccaatttgaaactgaaacttacgccttcagccgttgaaatgtttgtccactggagcattgaaacggggcgaaagcaatgccaatttgaggccgagttgaggacggtcaaaaggggagaatgtccatccaaacaccatgcaaacccagctgaaactttgaaaaaatgttagttaaatatgtaaatttgttcatagaaaatgcatttttaggcttaattgaataaaaagggccaaaaaactaaattaaaaatgtaaaatttccaaaaaaaaagattttttaatgaataaaaagggccaaaaaattaaattaaaaatgtaaaatttccaaaaaaaagattttttaattttaagaaaaaatgttctcttaagagatggacggtcaaaaaggggagaatgtccaccactttgatattctgaaaagtgaagttcgtttttttggaaaaaaatcctaaaaaaataatttaaaaaattgaaacattctcatttttacacacaaaaaaaacaaaaaaaacttgcctacttggaggccattaaatattttatgcataaaatccttcaaaaaaacacataaaaactattcacttttacaaataaattttcttgaatttccaaaaatttttattttattttgaattttgaaaatttggggctgttaaggcttttgggaccataacccaaaaacaaaaaaaaaaaagaacagaaaaaaacaaaaaaaaacttgccgaaattataaaaaaattcgtcatgtcatcaaaatgtttgtccaccagcgcttcgaaacgggccaaaacagttccaatttgaggacgagttgaaaactgtaaatatggaaaggctggtgaatataataattttataaaatagtccgaaaaagattcggacttattttaaaaataaatttataacatttttaaatttaaaaaaatttactgcattccacattgaaatttcttcacggatttgcaattcgtcgcgttccaaaatttcgcacaacattttttggtcaatttgcaaaaatccctccgattcgatcaaagtgtcggcattttcgtcaatgtaaaataaacaatggcaggcaaaattctaaatttgaaaggaaataaagtattaaaaaaattggctcgattgagaataaaaataagtgaaaaaaggaacattatgcaaaaaaatcgatgcgataatttccgcttttaaacacaatttggaaatatcaagttaaattgagagaagattaaagtgaaatcacttgggtcagaaatgtaatagtcatttcacctgcctggtggcgaagtggtgaacccacctgcctggcatggaccgagggtaagttcgagcccccttggcggagtagcctcctgtcgaaagcccgatgggcaagtagcaaacagttaccagtgttcggcctaataaccgactctgggggtgcgagggaggagcatggttctctcgcaggtcagctgaccagcctcaatcccggctctccgggagttttcggggggttacagcaaccccccctcccaagggaatttttgcacttttttgcaatacccgcctttatccgtttcatggatatctcttgaaagggataaatccccttccctttaggtcccttcccttccatttcccttcctttactctaattgcatttcagctctataagctgggatagggttgtgtcttaattggcacgtgacacaacttttggtccacattaaaatatctctatgcatctttggccaaaagtattttttgcattttttaggttacagcaaccccccctcccaagggaatttttgcacttttttgcaatacccgcctttatccgttccatggatatctcttgaaagggataaatccccttccctttaggtcccttcccttccatttcccttcctttactctaattgcatttcagctctataagctgggatagggttgtgtcttaattggcacgtgacacaactttttggtccacatttaaatatctctatgcatctttggccaaaaagtattttttgcattttttaagtgtcttttaaatgttcatgtgcccgccgccgagtggggaattatgtaggcctagaaaaaagagctctttcgaatggtaccttcaaatcaaaaaacgactgtcaggaagctgagctacagaaaaaaattccaagccaaggccaaaccactatagcagtatagtgccaaaaattaattgaaaatattccggttattcttccgtcaaaaatgacgccaccttagccattaggcctagaaaaaagagctctttcgaatggtaccttcaaatcaagtgccaaaaagaagctgagatacagaaaaaaattccaagccaaggccaagccactatagcagtatagtgccaaaaattaattgaaaatattaatttgtattccggttattcttccgtcaaaaatgacgccaccttagccattaggcctagaaaaaagagctctttcgaatggtaccttcaaataaagaaacgactgtcagggagctgagctacag

SEQ ID NO: 9457 - DNA, 1871 bp, Heterodera glycines
  unsure (1)..(1871): unsure at all n locations
agctgagatacagaaaaaaattccaagccaaggccaagccactatagcagtatagtgccaaaaattaattgaaaatattaatttgtattccggttattcttccgtcaaaaatgacgccaccttagccattaggcctagaaaaaagagctctttcgaatggtaccttcaaatcaaaaaacgactgtcagggagctgagctacagaaaaaaattccaagccaaggccaagccactatagcagtatagtgccaaaaattaattgaaaatattaatttgtattccggttattcttccgtcaaaaatgacgccaccttagccattaggcctagaaaaaagagctctttcgaatggtaccttcaaatcaagtgccaaaaagaagctgagatacagaaaaaaattccaagccaaggccaagccactatagcagtatagtgccaaaaattaattgaaaatattaatttgtattccggttattcttccgtcaaaaatgacgccaccttagccattaggcctagaaaaaagagctctttcgaatggtaccttcaaatcaaaaaacgactgtcagggagctgagctacagaaaaaaattccaagccaaggccaagccactatagcagtatagtgccaaaaattaattgaaaatattaatttgtattccggttattcttccgtcaaaaatgacgccaccttagccattaggcctagaaaaaagagctctttcgaatggtaccttcaaatcaagtgccaaaaattaattgaaaatattaatttgtattccggttattcttccgtcaaaaatgacgccaccttagctacttggaggccattaaatattttatgcataaaatccttcaaaaaaacacataaaaactattcactgtgcccatacctcagcgggtataagtcgtagagtagaccattttgtactctttctaatgggcccacttaaaatttccagaaaaattttcccaaccccctaggaattttttcgaaaaattttcccaaccccctaggaattttttcgaaaaattttccgttttgcactgtatattggggtgttcagatcaccaggaaggagtgatcggaccaagttgctgtaaaagacttttttgatcagcactcaaagttaccttagcaggaattttttcagaatttttggactgcaaaattgtgccaaaaaataaaatgggacaacacttttgaccacctatattttgatcaaattgtgaatatggtaaaataaatcaaataaatgtttatgtcacaaatgcaaatatggtatcattggaaagcccataaaaaatgctatccaatggtatgctacttatctgttgaaattggaaaatgacaattttatacgcaattatttttttcaaagcatgatgggacaacacttatgaccatgactgtataatgggcgaaagtatgaatgcttgcttattcatctgattattgagttcattcgatagccttaagtgtcctctattaacctgcataatttcgaaaaatttcgtaaaatttcaaaaaagttatggtcagacgaatgcttaactcagaaaaaacacatagaaaaaatatatttggtttacataatatttgaaaaattttagcttattttcttttggcagtttaatccaaaaataataatggtacgcaaaagtcggctaaccaataatttatacatcaaatccaatcacattttgttgtataatgggcgaaagaatgcttgcttattgatctgctattgatggaactctttggtgaaaacgaaataaatccgcagatatttattatttatgctaatttngaagtaattangcaaaaataantaataacgaanaatnaaattataaaattcgagggataaaatca

SEQ ID NO: 9458 - DNA, 3090 bp, Heterodera glycines
gtcagaagtaaaataataaaaagtcggagtaaagacgagcgaagagaaaggaattgaataatgaaaagcgaagtcaattgatgagtgaaaagagatgggtatttatgaaagcgagagaaaggaaaaagaatggaattacagtaatccgaaaatggcgtaaatttgaatatttaacaatgtactctacagagatttttattttatacccaataatttaataattttggttttactcattattggtgcttattttaaaatttaatattttcactttgttttattgtttaattattattaaaagaaatattattaaattgctatatgagctatgattttgtttatagcacatgtgcaccttaaacgattgcaattaatcaatcgtcttttagcattagattgaatattatctattttaaggagacatcttttctgtaataatctattgaatatttaaatgttccatttggccacaatcttgaagtcgtgctgaattttatccgtaccgcatcgagaattcgtctgcaggctgccaccttaaagttcaaaaaacctaagtattgtgtttcgaattttgatgatatattatattatcaaattaatttttaaattattcataaatatatgttggtattagaatctaaataaatttaatgcattatttgtatttaatatagcataagactgctgaaaatcgtttggtgcctgtatcgagacacctcaacttaaattaaaaaattgaaatatttcatggtaaatcattttaaaatataataaatattaacattaacattaattgcttcatcgtttagagtaaaaatttttttctttctgaatatattttaatttattgtttctttgtaaatgaaaatataataattcaaatcaggttttgaaatttataattagctttattatttttttaataattatgaaatatttatttggttttatttgtttgttttgggtttttaataataaagcaatgaaatactattattcttatatgccatcaagctgaacatttaatatctcgaattcactgacttcatttgaaattaactagtcatttttatttagtcaaggaattttttgtctatctaaaataaattattctatcaattaacttttctggtaaaattgttaatgttggttcatatatttttataattaataatattacttattttttgtttatattttccatttaatattgtgatcaccaagaataggatttttaggtgcttaaaacttgaattttgctcaagttttggtaaaactcttttacaaaaaaccgctaattttaaaactttacttcaaaactattttgaacctaccccccgatgatcattataattgttattaaacaaattaatcttttgcacacggttcaaagataaataacaaaagattatccatgcttatttattctgtatttagaattaaattgacggaataggagaatgaaaaaatccattatttttgaatgtaaaagacaaataaaaatattgagaaggagaattttgtaaataaaaggtttgaaaaataattttagaatattaattgcatgatttataataaaaaaaacgggggggggggggggctcactgcaaatgtggtcgggaaattgcgaatttgaaagctattgactcaattctttttgcgttagccaactgatctccccatacaactttctaacctgggcaaagactacaaaaaaatttgggaactgagatatgctaacctgtgtttgctaacttttcgaaaatcggcgcatagcgcctggcggcgcagctgtagcgtttcggtgctgcttgcgaaaagttgagccatggcatggggagcattttaaaaaaaaaatttggcgcgattcggcaagtccgaagggttgcaatgggcgcgcgcccgagccggctttgcgccgtggagagccaacttttgcgccgtcaatgctaggaagacaaatctttttcccccgcgcgtcccgcaccctgtaaggtttggagcaaaaattggggtctctcgccgggcgctttgcgccgagatatgctaacctgttttcgctaagtgttgcgcagcgcccggcggcgcacagatagcggctcggcgccgcttggcgaaatgcgtgccatgccgtggggagcattttaaaaaaaaatttggcccgatccgaccacttggcgccgagattgctgtctttttgtggaccagctttgcgccatagacagcaatcttttgaaccatcaatgctagggagtcaaaatttttttccccgcacgtctgctgacctgtaaggcttggaaaaaaaattgccgtctctcgccgggcgctttgcgctgagatataacttttcactctccaggccccgcccaacacctcccccgatggctaagtgttggacgggccaaacaaatgtcagaatcgtgttccccaccccaaattacccccggatactgattttcagaccattcggatgaatatgaaaatttcgattttgcttatcattatatagaaaaaaatgggggggggctcactgcaaatgtggtcgggacattgcgaattctgcacctatcgacccaattctttttgcgttagccaactgatctcccgctacaactttctaaccgtgcaaaaaaaaaatgccatccctttgcgctgagatatgctaacctgttttcgctaagtgttgcgcagcgcccggcgccgcacagatagcggctcggcgccgcttggcgaaatgcgtgccatgccgtggggagcattttaaaaaaaaatttggcccgatccgaccacttggcgccgagattgctgtctttttgtggaccagctttgcgccatagacagcaatcttttgaaccatcaatgctagggagtcaaaatttttttccccgcacgtctgctgacctgtaaggcttggaaaaaaaattgccgtctctcgccgggcgctttgcgctgagatataacttttcactctccaggccccgcccaacacctcccccgatggctaagtgttggacgggccaaacaaatgtcagaatcgtgttccccacccccagagacccccggatactgattttcagaccattcggatga

SEQ ID NO: 9459 - DNA, 2392 bp, Heterodera glycines
  unsure (1)..(2392): unsure at all n locations
gaaaacactcatatataaaaaaataatattactaaatcctntaaagtaaaaacttaagttttgataaaatttgatttttaaaattattttgaaaaataaaaattaaaaaaatttttttttgggccaaaaggggggtaaaaaatattttatggggtattttgaggtgctgagcacgaatatgatgtttatttaatcttcatacaataaagcactaaaaatagcaaaaaataaggagaattttatgggatttatttgaaatttatatctcaaaaaagaaaaaagttattccaaaatttctggaaaatttcgcattttcataaaaaaattcagaactgggttctgaaaagttattctggaaaagtaaaaagctacaaaaatccgcaatttgttgctctataagataaattttatttcgtatttttatcacttttttgtgaatggctacaaaattaaaactgatttttggattcgggaccaaaggggtgagcataggatttttgagtggaaaaaatttttcatccaaaaacattaaaaaacatgtccttacaaaggagaggtacccaagtgaccatgggacttccgaatgaaactttcagggtaggtagattaccccccctttgtattataaatttttttttatttttgctaaatgaagcttctggccgagatatgaagcttttcctttttgccttttcaatatcactttcaaagaatgtaaagccaatgtgagcgtcggtggcctggtggttgtgccttccatacttttttcttcttctaaagttcaattccccaaccctgtaaataattattttgtttttttttcatatccaaattagtttttaagctttttaatattaataaatttgaacataatatttttttcatttttattttatatgagagaataatttgtctattgacctattttgcttatcagtaagtgttgaaaaattctgtcgttgctactcttctcggtcctctcatctactctcgtcgcattaataatcattgtaaaaatacttcccaaataaatgccaataaatccaacaaacgttattcttttattgcaagaacattatcatggtaaagccccccctcccacccaattaacaccagaggaaaagcaactggcaaaggattttttgaacacattggaattttgtgcaaaacaagggtcagaaattgagactttggaagaccttattgtggatgaattggccgtttttgatcaaaaagatcagcaagattctgacgagcagtttgaccttgaagatgatgaaagtgaagatagtgaagggagtttttcctctccagcaagtacagtattccttttttccttggatcagtttttgcattagaatcatcttcatcgagttatgctccctccccaaagaaattgtgttccccgcatgttggatttgccgaaaaaatcagtgccctacgacatttttttcctgatcactgtcaaatcactttttgttcggaatttataatgattagatgtgcatggtgtgacaaattcctttgcttcactcatttctaccaaaattatcacatgtgccaaaattaatgtcgaataaaaatgaaaaaaatattatgttcaaatttattaatattaaaaagcttaaaaactaatttggatatgaaaaaaaacaaaataattatttacagggttggggaattgaactttagaagaagaaaaaagtatggaaggcacaaccaccaggccaccgacgctcacattggctttacattctttgaaaatgatattgaaaaggcaaaaaggaaaagcttcatatctcggccagaagcttcatttagcaaaaataaaaaaaaatttataatacaaagggggggtaatctacctaccctgaaagtttcattcggaagtcccatggtcacttgggtacctctcctttgtaagcaacgaatgccaaagggcatccgacatattcactggcaaaactcaccgttttttgcaatagttcgcttcattagttgaatgagataagctatccgatgctgttgacggcacagtttgtttgtgttcatcagtaacatctttttgcgagagcagggacgaagcttcttaaaaaattgaaaatttagaaccttgaaaaaaatttaattaaaaaattggaaataatttttaaatttatttacgaggttctgaggcttgtgatgatgacggactttgaggttcttgtttaactttttttgaaccttgtccttcctgtttcgatgttgttggcgcttctgactgtttcactttttgtttttcttccttaagttgggaaattcataattctttttcgctattttatttatttctaaaaatttctagattcaaaaaaacaattataaaattaaaaaagcattttctcataaatag

SEQ ID NO: 9460 - DNA, 2274 bp, Heterodera glycines
  unsure (1)..(2274): unsure at all n locations
agcagtttcntggcagaaacagaagaacccatttacgggttggccaacttagactatcattggcacggagaaactgccgacccaaattgggacggtggcgaaaaaggtgaagcgaacgacccgaccaaagtttgtctctattttgcgcccgatttgcagttgattttctgctgaatcgatgcactgctcgccaatgtgtgctgctgggctgtcccttcagaacagaaaatggcacattcgccgcattcgacggacgcaaatttaaatgccattccatagacgaactgagaaacaatggcaaattgaacaattatccctccgggcatgggtatgattaataaaagcgaatttgattgattatcacttccaaatgctcacacacaaaaagaaatgatgatgatgaagtgattgaaagccatcacattttgttggactccgaccagaaaactgtcgatggtttccgtttcaaaatgcccgcggcggttgggcccttttccacacgaaacggcgtggaaatcgcagaagcattgcgacgggacaactgctcgcgctgcgaaagcaaaagaagcggtgcgcctccgtgcgaatgcttttaccataagcgattccctcgggggaaaacaattaaagtgaaattgacaaaggcaaaacgcgcgaattttggcacttcagataaccttcgttaacaacgatagccttttcggtggtgccaatttcggcatcacaaatgccttccgccgttccctctccgtccatttgcacggcgttcgcttcgaagtccttcaaattgctctcccccaaatgatgcgcaacggcacagtgacaattcccaggccggacacagccccaaaatgtgttggcaaagaatgcaaagcagcgaaaaaggagcgcaaagacaaaccgacaaaagtgcggaaggacaccgtagtggtaccgtacggaggatacaccgtaatcaggtggaaaataggggatacggtaggggagcgacgcgattcgatcatcagacgaaacaaaggagggaatgtgaaatttggaaagggagggagagagagagaacgaatagggaagagagtggggagggggaggaggggaaagaaaggagaaggggaaaaatgttttttaaggttttacgcagaaaatccgggctggtggatggccgaaacgaatcaatatggacggacaagttttgcatttgccatcggcgaagatgaccaaatgcccaaagcacccaaaaaacacccttccgattgcaacagtttcgacccgggcaccgacatttacgaaaaattctaatatgagaatatctgacttaaaatctaattgatggagtaagtgaaatttatataaatcaagcaaaaaaaaacaagttatatatgcaacgaaataaaagggtaaagtgaagaatcaatggaataagtactgttttgaggtgaaaggcagtcgtttatgctacacattaaataaaatcggaaaatgcgtcgtctgtcattcgtttatattgcccaaaatggtgctcctcttaaaactgggaatacgcgaaattctcaagtgaagttgggagacgctcctcctaagctgggaccgtctgcgatggatcgtgcccgtcgaactgaattcagccgcgattgaacttaaaattcgtcgttaagacgtcttcgcccttcggggtcactgcctaacttttgctcatcattttcagtgagtctaaaaaggcgtaacttacagcgctttgaggatgccgtccacttcttcgggtcggttctcgcgttgctcacggatttgctgctcagtgatttcttccatcacaatgtcacgggtcgacgtcgttttgatctgaagatcagtcaaaaagagaatcggacggaaagggtagaaaaacgaacgcgttggatgagattctcgaaaaagtcgaaggcaatgtcaaatgtatagctaaagaaaagcattaaaaatactgaaaaaggaggaacaaacccatttgtcggacagaagaagcacatctcatcggccttttggtcgcgaattctcagaatgaaaacacctaatttgaccattttaaaatgaaatctcaaatgtcgttgctctttcccccttttctcaccctgttccctttccatttccaaagaacgaaagttggcaaatcggtacagttcgatgtgtttgtaccggtgccggtccttcttccatgaggcgcccctccgcagtgtgctgagtgacaattgccgcggcaaagtgccgccactactgccactgctgctgttcccggtgaat

SEQ ID NO: 9461 - DNA, 2574 bp, Heterodera glycines
  unsure (1)..(2574): unsure at all n locations
tcaatttgcctttagaaagacgataaacttaggccgagttgccatacaatttcaagcaccgccagcatttcatcgtaggaatttatgtaaggcggataatactgaatggacgagatattgtgggcacaaggaaatggaagtgaccttttcgagatcaggcgcactttcagcccaaattttaccaactaaatttgtgttcctccaatcagaaatcctaaaaataaattggaaaacagaaacagaatcaaaaaacgaaactgttttcgcaatttttgaaggatattctcgtgtacatggattagaggttcgatcttacgaaacaaagtgttcagttcatttgcgttcagaagatcccgctccccctcactttccatcatcgctttcaatggctttttgaaggtctgaaacgcaaatagacaatgtgtcttgaaaagacgcactcacatcgataatcacatttaaaatggccaaataattctgttcagtgtccaaaatttcgtgacacaccatgaaacgccgctcgtttttcttcggcgtgccatcgccttgcgtttcacccgaaggcccactaaaaattactattcactacattttcactgatagccactcaaatggtgcagtgtcaaaacatacaaaaataaatttcgaaacctagtgacgtcacctggtgttgctcgtttcaagtgcttcgagagcagacctgataattggcgaacattgaaaggatatcacaaaaaatgatgcttgcctggaattgttctttttcttggccaccaccaatccctcgtcggcgatcggagaacaatccttaacacgcttttgcatttcaacgcttaataacaaaaaaggcgacatcaaagactgaatgaatgagtaatattgtcagtgcgctttaaaacacaaatgaaaacgataaaaagaaaagatggaaaagccgaaaaatttatagaaagacatgctctcaataaaataaaaatataaatttgcatcaatgtccatctctcccttttctctctctccgatcactgcttatctttcgtctgttgcttcttattgttagtcggcatattgcgcaccacgcaaatcccacgaaccgcatgagaaacacccgaagccttggcagccgaaacggtgctacgagtaacgggaccgctgctgacagtcatgccttcgttgctggtcctacatatttaaagaactgattgcttcatcacgtccattctgtcccccccccaccgccctcccgcgcagtgaacgcgacaaatttcaaaagtatttattaaaagaaacattcacccttttgagatgacggttcggcgcgaagtgtttccaaaacgcatcggtggctgaacgatcgctgaggtttgctcgcgcacttgcgacaacgaacgacgactgactggacgctgtttggcctggacttcgggaaccgtcaaacgaaccgcatgagaaacatccggagcttttgaagccgaaacggtgctacaagtaacgggaccgctgttgacgggcatgccttcgctattgatcctagatttaaagtcgattggttcattcgtccattttgccgtccccccccctccctttcccgcgcggtgaatgcgacagatttcaaaaaacaaaatattatttattccaagcaagttcattaaccctttggtgaagacggatcggcgagaagtgcgcattggtggctgaacgaacgtcggggtttgctcgggcacttgtgacaacgaacgacggctgaccgggcgttgtttggcctggacttcgggaaccgtcgaacgaaccgcatgagaaacgtccgaagccttggcagacgaaaaggtgctgcgggtaacggggccgctgctgatgggcatgccttcgttgctggtcctacacatttaaagaatcacgtatattgtccccccctaccgcgtggcgaatgcgagatttcaacaaacaaaatattatttcaaaatccattaaccctttggtgatgacggatcgtcgagaagtgttaccaaaacgcatcgttggttgagcgatcgctgtttgctcgcgcacttgcgacaacgaacgacgactgactgggcgctgtttggcctggaccttgggaaccggctgttcaacgggatgtccagctttaggggactgctgctctaaagttactctcttatttttattaggaaattcaattaaaagtcagttgaccttcaaagaatcggtcacaaatggagtcattcaaatcgatctcctttcgaaagtcgcgatacatgggcacagaaggaatgaaatacggatcatttggatcaggaattatcgacacaggcattttgaaaagtaatttgctgaatatcttcgataaaagaattgaggatccaaattcaactttttatcttaggctcaaaatcaattactgcggttatagtgtgttggtcacgaagtgacctcagatttatcccattccgagcccggagccgaatgaattcgaatacattccaaatttcattttttaaaatccattttttgaaatattggttttgttaaataacaatttttttcgagantactaatattttaaaanttaat

SEQ ID NO: 9462 - DNA, 1630 bp, Heterodera glycines
tttcttcactaatttttcactcagaccccattcttaccagtgcttgtttttcccggttcccggttgccctaccgggaccgggacctgagcttttcaaaacccgggaccgggaaccgggacctcggaggaccgggaattcccggcccggtcccgtggcactctaaatttttctttaagcaacgcttcgtcgcctttttcgagaagaaggaaatttcgaaccaagcaaacagcactgggataaatgagtcccggtgactcgtcgtttcagtatccatgaaataatggaagaaaataaacatttaacagtaaaaaaaacgaaaaaaaggtcttcaatcagttttgctcatatgtttgagctcaatgaaaatattctggttgttgattcccaaaaattatgatattttaatcgaaaaaaacaaacaaaatttgatgaaaatcgtgagcgcaaaatcttaggttgtataaaaaaagaaaaaatgtgtgttatttttgcaatccttgcgcaagaattagactccattttttgcgcttggtgggcttaaaattgtgcccaattttgaaggcgatcaccaggcggtgctagagcaacgccggaaaaagatgatggtccagcaacaacagcagcaggagcaacaccaacacagcggcagcaaaaggcccgcctcttttccgaccggcggaggaaaagcgaaatgatgccaaaaagaaagcgaatgttatttctgttaccgattgatcatttgggttttttgaatgtcacaggaaaaaaaattgttgttgtttgtcaacacacggttctcgagcagtacaccactgctcaagttgtgatttgtccacacattttttcatttaaattcgttctttttttacagaaagtgttgaatttgcatttgattcaatgacgaaaggaacttcttcgtttggcagcgccacaacaaaacccacacgttgtgccgtcgctgtggtcggtcttcataccacatccagaagcacacctgctcttcctgtggctatccggagaagcgaaagcgcacattcgatggtgggttttgcaaatgcttcattgttttttccctacgctagtatacttgaatcaaacgcagctttttaaggaggttggcaacgagaccaaatgtgcacgctcatttttggtcgagtatggcgtcattaatcaccatttgtagcgcatttttcggacgatgtggtattgtggactggcaaatatcggaattttgtattttaattatcaatccagatctttttcaaccattcttaattctgataaaaaattttttcatgttttggactaattacggttattctagcttgtccccaccatttttcgaaaaaattctaagtcaatggcaaaagcaatttactaccattttttttttttgcttaaaataacacattccctctaatgtttcttcgatacgaaatatttaacaagtgtggaaatgtaaatgtcagacaagtaccgcttcaatgagctggtaaacattttcaacaaattttggcttaagagttgttccgatttcatgtggcgcgcttgctgcgatctcttcccattctaattggttatcgaccgacaggactaacgtcttcattctttttgcttttgctgcgcgaa

SEQ ID NO: 9463 - DNA, 2992 bp, Heterodera glycines
  unsure (1)..(2992): unsure at all n locations
atgtttttggatataacttttttctttggcatcccttaccaatattgttggtatcattcgagagcttaacatctttctaagctattactaagctatcgcttcgcgatcagacaattaccaaaaccaacaagtacccaaaaaacactagttcgtatttatttcagtagaattgtttattatgactgctcatgtcccaaaggttgctggccgagaatcatataaattatggggaaaattcacaccgcaaatagaggttattattaatggttttgctgcacgaattgagattctgtatataattaaggtcgggtacttcaacgcctttctcgaagcaatgcagacgttccaaggaggtaccgaagaccaattttttgtgaacaaccgcgtgacactgcgaatcgaaccgcctaacgacgacattgttcatggaccgtctggttcagcggccgtgttttgcgctgtatttggattggcttgcaatcgcctctgctcatcagacaccgtcgtcagtgcaacactcgagcgtggccaactatttggagtcggaagtttgctgttcaaaattcgcgcagcaaaagcaaaaagaatgaagacgttagtcctgtcggtcgataaccaattagaatgggaagagatcgcagcaagcgcgccacatgaaatcggaacaactcggaaagtcgccgcctatggtctccatgcctccggtcgcaccccaaccgccctccttgacggtgatgtccgcctcggcctcaccctcggtgccctccttctcctgctcttgcgggtcacggaagaagtacaggtcgggcatgatcagcttgtcgtccaccacaaagcccgtctgacgactgattttgccgcgcaacagcaaaacttcacgagccaacagccaccaaatcagtccgacggagtgcttttgctgtgaggggagggggttggaattgggacagtatttaggtattaaaacgatcaatcaatatggtaccaaaacattttttgttctatagatccgattcgagtaataccaagaccgtatatgtaccaagttttcatggcccggtggtatcagaaatttaccaatccaatcagtgacatataattgagatagcttttagcaattttggttgggtatgggctcattattcgggcatccggccactatcaactctttgaaagacacaaattcaatacaaccttcgggatagttttgctaaaaaaacaaaaccttgttgtttgccgggatggcaatgtccacaaatttcaacggcgagtccgtgttggccaccgcaatcaccggcgtgttcacgtaggacgcctcacggaccgcctggtggtccaactacgggtcggacaccacgagcagacgcggttcctgcaaaacaacaaaatgttgagtttcgtcttccatgtacttaaacaaagtttaaaaatgtaaagtttcgactttttgttcgaattcggacccggagtttggaattgttcgaaatggatcccggattcgtgagtagaaaccgcaaaaacccttaaaaaagaaccttaggggctaggctatcaaatggtaccanattttattttggttgactttagaaaaattatgataataaaataatacgatttggggcagtacgaattgaattttttttaatgttgtaaacaaaggtccctaggaagtgccaaatatgttaaaaaagataacaaattgacncatggatattaagagctatcagttataaatctgtcgcgtatattcgtacaaaaattaatttcttcaaaaatggggaagggacaccgacaatggctattttcttttataaaaatgagttctgaaaccaacttcagagcagcgattcttcccattccctattctttggtggtttttaaaagaatttgtaaaccttgaaattcttttggatttggttggtcaaagagccgggcgtaaaacggccaacgattggagtggcaccgatgtgagcggcgaactgaaaaaagacgaaaaagttattatagaaagattattggcatcgattttggagaaaaagagggatccgtttcaactgtgctttcttttaccttggaaaaccaaactaaacttttccatgcaatgcatttgtaacgggtttaccgctccgtattaagggaccgaaataaataaaaaatcacaatcagcccgaccctgagagcatggaataagcaaaaaccttgagcacagcgcgttgggcgtacggctgagcagagacgaccacaacatcggacggattttcaatggccgcgatggcacgggcggcgaacaacagtttctcccacgttttgcgaatgttgatgatgtgaatgccttaacgcggggaagggggattgtttcttacatatttgtaagatttttgttttaggcatgattcgataggcatgataaaaaaggtttcaaaaatcacgataggcatgataaaaaaggtttcaaaaatcatgggtaaaaatgcaaaaatatccgaattttgaatataaaacatacggccggtattgcttttgcattatagttttaaggttaatgtgtgaaaagtgaaaagataaaccgtctgatcgacgcttccacaaataatgctccatttggaagtccatctttttggtgccgatgtgcgattcgcacaccaaaaatttcattgcgtcatcgtccgtcagtttgaagacgtcaagactgcttgacatgttgagacagaaaaataatacgtttattaatctttaaaaacggttattgttaggactaactcataaaattgggtgaatcggactcatagggggcagcaatttttgaggaaattggatatcagagaagacattatggggataagttatggaaagaggccaaaataaacagggaatttgggattacgaatgagaattgttaggtgtcatggcaaaggataggcggcaaatattacgactgccagactaaaacgtcccctcagactaaaccggccagactaaaccggccagacta

SEQ ID NO: 9464 - DNA, 1581 bp, Heterodera glycines
tgttttgcgttaaaaaatgatttgaaaaatgaaatatttggttttgttttttatttgttttattaattaatgcatttacatcaagcatttttaataaactagcggggatgcgccgaaggagctaactaaccccactagttatacttaaaacaatttacatacacggaaatctgacgtgtgctcttccccaaatttctatctcctaattgtataatagatttcttttgtgtcaatttattgaaatgttcgtcgtcaatagaggagggcaaattacttggaagtaatgcggataatataagcggatataggtttgattataacatctttcatttaagtcgcacagattgtaatcggcaattcgccggtcagcgccaatttagtgaacaccttatgcgttttcatcgtgaagcaacgaaacggtccccgcgacaccgacccgaaaaggcaggagaatgtttaggggtacaagtgatcgaggacgataatggaaatgtgatagacggtaattattttcattttaagcaaaaaacggtacttattggtaatttttgtgcagatttcaaaaaagtttatgtttttggatataacttttttctttggcatctaaatccaatattgttggtatcattcgagagcttaacatgtttcgaagctattactgtgctatcgcttcgcgatcagacaattaccaaaaaagttataaatgaaaattgcgaagaagtcgaaattagtcaaaattttgaagtttttccttaataaaatttttccaggctaaataattttttttattttttgtaaagctaatagagtatctgaagagctttcgaatgataccaacaatgttagctttggatgcaaataaaaaagttataaccaaaaaatgttttttaaatctgcacacagatacctaaccaacaagtacccaaaaaacatagttcgcatttatttcaggggaattgtttattatgactgctaatgttccaaaggttgctggccgagagccgtatatcttgtggggaaaattcgcaccgcaaaccgaggttattaatggttttgctgcacgaattaagattctgtatgtaattaaggacgggtactacaacgcatttctcgaagcaatgcagacgttccaaggtggtaccgacgaccaattctttgagaacaaccgagtgacgctgcgaattgaaccgggttagagaggcaaataattcaaatatttgcaattccctctcttgggctctttgaccccatattgattttccccattcatgcatgcccttcccttcgtccatcctctttcattctgttattttccttcttattgtgtgctcccaaatttgctccgtccctccgacaaatatttgtttatttattttccatttggtttaataaatttatttggtgttcgacttttcacaattaattgtttgagcaatcaaccggctcaacattggcgacgcccgttcttcaggacttcacttcgaacatttctcgtgttgaaattgttcgaattgtggaaattcaaaaatctcgtgttgatttttggatttcgcagaaatcttcaaaaaaccaatcactaat

SEQ ID NO: 9465 - DNA, 1125 bp, Heterodera glycines
gaccaatcggtccatcttgggaccaatcgtccatttgggaccaattgttcaatttgggcacaatcctaaaaatgaagcattttaaacatcaaaattaattgttttatcattctttatagactccaaataattaaaattataattatcaccgtcgatggatttggtgtcaattgtttatttggagttggtccaacctgagtatgattctaaaaaattaattgtaatcaaaattattaattcattttaaattaatattctgatcaaagttttatgtcgtttgactccaaataattaaaattataattatcaccgtcgattgatttgtgtcaattgttattttctctgggaatgatttgaaataattaatgtcttttaaatcgtttaaaatgttttttttattccaaaatttaaaatttgttttttaattttcaacacaaatgacttttaaagtttaatcataatgattttataaaatccgtttcgtttttattggaaattctaaaattttaccatcgatggatttggggtcaattgttttgtctgggaatgattctaaataaaaataagaattcattttttcaaattaaatgggaaaatcacctcaaatggatttggagtgaatcgtccaaccggagaatgattctaaaaattaatataatcagaattgttaattcatttaaaatttaaaattctgattcaaatattttatcaatcattttaaaacccgtttttaattatcaccgcaaatggcttttatatgctaattattgacctcaaataaaaatgatagaataattaatccaaaatagaaaattcatttttacaaattaaattaaattttggtgaattttccttttttctattttttaaatttattttaattgcctccgttttgtcatttttccatttccaccaatcgcaaatgatccttctgaacgtatttggccaatatttgccgttcatcgaccaaatcgcaaacgccgccattcgtttggccgcgaattcgacacgaaatgccttagggaattccgtgacggaacaaattgtgccgtactgggaaaagagttggcggatgtgccattcttaaaaaatattaattcattttgcatatttaatcactccgtg

SEQ ID NO: 9466 - DNA, 3503 bp, Heterodera glycines
gatgaatgggattgatgaaattttgagttgctagacacactaaataaacttaatatggggaccggcaaattggacaccggaaaattggacaccaagcggaaaaatggacaccgccggaattttggacactaaaggaaaattggacactaagatttcctttttaaaaaaaatcaagaattaggtgaaaataaatttgagtagaatttgatcaatgtgccacaaaatgcaccaaaaatgggtgacgattgatcaatgggccaaaaaatccaccagaaatgagtaataaaacttatttctttatgaatgatatgattttttcttctcctgaagttacaaaaataataacaaattaatttccatattatttacgcttataaacaacatatggcagattaagataaagatcttttaggccaaaccaaaatttttgtttagtaatttattttgtttattttcatttttatttacaacagtgtccaattttctggtgtccatttttccattggtgtccaattttgtggtgtccaatttaccgggagccaataattattgcggggaattatatggataaataaattttatggagttttaaaaaactgaatttcttattcacttcgtaatttcagaatgacttgaaattttgcaggaaatgcccttggtatttatattggtattttcgtgcatattaacgccccctttttttgcattttcaaaaaatcctctgttagaatggccctttctcttttgttccctaaagaatagaaaattaaaaaaatattatataaattttagggccttttctcaagaatatacataaaaatttgacttacagtcaggtgcaaaatattgcagcaaatttttgtaatcctatgcctatataacaatatataaaataaaacctacgcatttttttagggattactaaatttgttgtgaacacatttttgctgcaatactttggcactgactgtattcaaaatgccagaatttttttctatctttgtgtaaaatttgaactaattaaaagcaagaaaaaagatacataaaaaagaaaaccatgccatttaattacaaaaaagttaagggatttttaatttttatacacaataaaaaatatgaaaaaaccaaagaaaaaagaaatttaaatgaattcaaaataaataggtaatttgtgtggatgttcgttcttcttcagccaaaatgaaaacactgtgaaaggacgggtgaataatttatcagatcacaacatcatcatcaccagcaaaaaaaggaggagaaaaagagcaaaatatttacatttaccactcacattcttaaacaaatttatttagccttcagccaaaaattgatttggaaaacaaatgttttttttattgtttaaatttaataaatgaatgtttgggattaggcaattaggggggatcattgaagcaatttttgccaaaataataattcatttatttatttatttcaatacgctttcattgagaacgaaaacataaattttaaatgtcctcaaagcgcagaaacaattaaaaaggagagcaccaccgaaatacataaaatattattatgtgaggtcaataaaagtagtcaaaactcgttttagggctgatccgtcccctttccgggctaactcattttagcaccaccaaattataaaagtgacaatgcttattttcaaaataaaagtctcaattcggtaggtactgtattttaaataataataataaaaaaatattttccaaatttgccactttttctgccatttatttttattttaatgttattaattttgataacgatgcgggaaataaatgtacaattttattgtttgttgtgtcccaattgtgttgcatttgctgtctttttcactctcttctgctgttaagcgatgcttcgcatttgctccgcttttcccaaataatgcgccttcagaagagaagcgaactgaaaagggcggtggtcataattatgctattagcgtaatgttaattagtagggcttccttttttaggcaaatgcctaaaattttgcacatttgattcgcaaagataagcacaaaaaacgcgttttccgcttggtttggggtgtctacgatgacttttataatgcctatttttgcctatttccgggtttttgaaaaaatctttaataaaaatgcaataacaacgaaaaatacacccctaaaaaataacccgaaaaattttcagaaaatacaccccctaagaattgaaaaaattttcaaaaaatgacccaaaatttaatattttttcttcataaaaatttttggtttaaaatttgttcttattcaaagaaactttcaattatttaacaatttcatctaaaattgaatatttaagtttttacgtgttttaccatctaaaaagcgttaataaaaatgtttatttgcctattttagtgcctattcgaggatttttgtgcctatttcgcgattttttgtgcctaaaaaggaagccctattaattagtaatgaaaaattaactaaactccttttacatcattattgttatttctggtacttatttccatttttgtgaccgttcccccccgaaataaattcgattgtgttcagcattttaagagcgccatcccggcccggaattttctgggcacaaatctccacaattttgatcaatcggtttcacaaaagttgctttcgtttattttcagatattttctatttttgaaatcaaatttcgcattagtcctttataggttttttttcataatttgtaaaatttgaagttttttttactaaaattaattattttttgaaaagggaagtatttttgatcaaatttatttctttttgttaaatttaaacatatttgcctcgtccacttcagcttctttggtggcaaatgtggtgaccaaacggaacagtccctcctccgtgtacagcttcaactcgcgtcgctctccgtccgggacattccactgatttacaaaaaataattaaataaaaattgaatctcttcggattttggggtcgcaaattcaaatttaaaaattaacaaaaaaacgcgccgccgctgccaacaaaatctgttctcatacgcataaattagcagcagatgataattcaaaatatttctttgtgcataaaattaaaaaggaaaaacattttcacccccagggaaaaaatgtgagcataaattagccgtaatggtggggatcgatcaaagatgtgtgccgtcgacaccctcaaaaaactttggcaatacggaatcggaatccgacatatccctgctggggatggtctcaaattcagccaaaatgctggcaaaaaattgtatggtttttttttttcaaaaaatcctaaaattttggcacatttagggaatataaaacagctgacagtgccaaaactgctctcggaaaattggacacttagaaagaaaagagttatagattaattatgcctcaggttatgttttaaaatattgaatattttttagaaacttatgggaacgcgggaa

SEQ ID NO: 9467 - DNA, 3364 bp, Heterodera glycines
gtgattggccgaaacttcacttgcttgtgtgccggttgattgtaaagttcgccaaatcggtcacaggagttacgccagacattgatgacctcgttcaaatgctggtctcgtgcgatttgtcgtccgttgtctgcaactttttgttggtagaacatttgcgccacttcttccactgttgtgtctgactgaatgtagccttcgtgtgccgcccaaatctcttcggctggcaagttcatgttgcgtgttaaccagttaaagagcaatgcctcgaagaaattgttggcacggaagttttggaattcttccatttgaaatcggttgcccgctgtggaaccgtaagtcgctgttttggcgcaagttgtgtgcgtgttgtcgcatggctcgaacaggttgaattggctgtgtgtgttcggtttggagtcggccatgcggtattcttcgagttttggcgattgtggtcgttgtggttttgttgggtgcttcgtttgttccgtatttgttgccggtgccgttgtgtcgttgattgttatgatctccagctgttcttcggttggtactgcttggagaaagatcacatcttctggcaccatgtgtgagtagtatctgccttccacgaagcggaactcggcaaatggtcgttttcctccatacattcgcgagacgctgagttgtaggcgatcggatttgtgatgaatcatccatcgcccttgatcttccagttcatggagctctcggagaacacgtcctctttgccatgctgacgtccaattctccggtccgtaaatacgttgaacgtagctgagcagcgtttcgttttcctctggccattcgtctcttgaccgttgccgtttttcttgcatgtcgattgtcttttttctgccgatgcgatgtcgttccagctctttgtcctctttgtcctttgttgattgctgctttgatttcgttggttgatccgtttcttccggttgtttctctgttggatccggctgatccatcagatcgtagtcaaattgtcgtgccaattcttgccaagccttactgcgtgtttgttgattgatggcacgctgttcgtcattttgttgtctttcgatttgttggcgtttggtttctcgttgttgctcttctgttgttgaatgtggcacttcttgaatttctttttgctgccgctttttcggttgaagatgtcgatttgcttcttgttgacttttcctcaccattcgttgttcgtgctcgatctgttcatgacgtggtgccttctgcacttctcggctttcctcgatggcctttgtggtggccttgctgcttccttgttggtccgagatggcttgaaataacttgcgtaagcctgagtcttgtaattgcttgcggcgtttgtgttgtccttgcaatggactttgctgctggccgatgggtcgtaacagtgctgagcgtcgtttcggaattttgaacttcttctttggtcgtggttgttgactttcgtcgtcgctgccggcaagagaaactgaatcgtccatgactgatgcgatgaagctgtgcactgcttgaattggttgctctggaatatcaacgattggtggcttttccacttctttgaattcatctccgggtcggtagatgacgttggattctggccatttgtctgcttttgaaagccaaatcgggccaaagcgccaaagcagtgctgttcgaaggcattggggatctgcgcctctggatgccatatccgccgggtttgagtcggttctgacgtgtctgacttgaaaattcgcttctcggattttttgtaatcgatttgccacaaatcgatcttggcgcttgttttctcgaagtcgttcgactgagcattgactgtctgtccacatgatgacttgatgatcggcgaatttgatttgggcttggatgaatttgactgctttgactccgagagtcagtgcttgaagttccagctttgggattgtaccgtcgtgtgctgccactttgattggtttgacaaggcttttcgcgtagatgaggttacattcatccttcatgatcgtcgtttttgctttttggtacacggcaattctcatgccgtatttgctggcgtcgcagaagcagtggaattccactgagtcgatgtctttgatgtgccgtggaaattcgattgtgattgcttcgcctctgtcgagccactgtgccatcaatttgagccagtccttgttgatgtttgctggcaattcgtcgtcccattttgggttcaagttttgcacttcttgaagaatgagcttggctggcagtagtacgggtgacatgagtccgagcgggtcatagactttggcaatttgcgacagaattgtccgttttgtgatttttccttcgaagattggcaatttgaagatgagccgattgtgttttggtttccatcgaatgccgagtactttgttgtcttcgaggtcctttgccaagtcgtctggttgcagcttttttagctcttcgatgttgcttccgtagaattctcggagtttcatgcccgctgcttcgaagattgtcttggcttgcgtcaccaaatcttgaagcttttccgttggcttggcgtcgaacatgatgttgtcgacgtacagattctcttcgatccgccttgctaggtcggagtcgaatagcgcgaggtgttctcgtaatgtggcattgagcaggaatggtgacaccgtcaaaccgaaactgacacggcagaatcggtagatgcgcaattcggagtggctgattggattgagctctgctgtctcgggattgttgagccaaatgaatctgcaggcatctctgtccgcgtgtcgaatgccaagttgcagaaatgccttttcgatgtcggcgaggatcacatgttccatgcgtctgaagcgcaggaggatgccggtgagatccttcagcagttgtggtcctgtgtacaagcagtcgtaaaggatggtgctgatggacaattctttggctttgctgacgcatccatgacgattcggattttggttgttgctttatccgctctgatgactgctctgtgtagcagaaaatgcacaggccatgcacttgatggagactcgggtggaccgatgtattcgatgactgagttttgaacttgtcgtccaaaattgcctgatatttgtcaatcaggttgaggctgcgcagtcttttgatcaatgagacgagcctggctttggcttgatggatgttgcttggaagagcatcaactcggtcgttccagggcaaggcgacttggtatcggttgtttacgaacgtgaggttctttttgaagtggatcaacacatgatcctgatcgatcggcgttcatgtgtcgtccaaacgaatcagatttaatccgaagaagttgttgagt

SEQ ID NO: 9468 - DNA, 2345 bp, Heterodera glycines
  unsure (1)..(2345): unsure at all n locations
gaaaacggcggttcgaaaacggcggtccgaaaatggcggtacgaaaatggcggtccgaaaacggcggtacgaaaacggcggtacgaaaatggcggtacgaaaacggcggtacgaaaacggcggtacgaaaacggcggtacgaaaatggcggtacgaaaacggcggtacgaaaatggcggtacgaaagtggcggtacgaaaatggcggtacgaaaacggcggtacgaaaacggcggtacgaaaatggtggtacgaaaatggcggtccgaaaacggcggtacgaaaacggcggtacgaaaatggcggtacgaaaacggcggtacgaaaacggcggtacgaaaacggcggtacgaaaatggcggtacgaaaacggcggtacgaaaatggcggtacgaaaacgtcctggcccgacattcgagaaattgttactttggcaaaatgttttttaaaattttattgcgaaatttctgcctggagatatgaaatttcaaatttgcggatccctttgcggggttgaaattgaaactcaaaattttacgggacaggatcgaagcgtgccaactgtatctgagacaacttttagaagctattgcttttgttaaaacaattctgacttttctacagttttcaagcttttactttttcgaatgttttcatttttatttgatttaccaacgagaaaaaattaaggcttcttaaatttgtctcagacgctttgaccccctaccgttagtgattaatcccgcaatttccaagaaatgccggatactgggaccctgcaaaattccgcgccggtttctaataattacattttttgaaaattgcatatgaaattggtacttatgcagaggtcgcatttttacttatttgtagagctcggcctggacctggatttttcctggatccaggtccaggtcatttttcggcaacctggatttttcctggacctggattttcctggatttttgtccaggaaatcccggtccaggtccaatgtgaaaaaaaatccaggtccaggcaaaacacgaaaaacctggattttcctggacaaaattttagaatttattatttcaagtgaccgatgttttttttaattttcaaaaaaagattaaattaatttaaaaatacattattattattaagtagatatttttagatgtttctaagcaattaattaatttttcaaacctttttttgatttttaagatgagtttcaaaaaatccaggtccatgcctggatccaggtctcgaagagcctggatttttcctggacctggattttcctggatttttgtccaggatccaggtccaacatggaatccaggtccaggcttttttcaaaataccgatctctaataaataccacctaaaaacaaaacaagcgttacatctcaagcaattttaaaaacctttaaaaattttataaatctcaattattgaaattttctgtgccttttgaagtcttacaaaattttttattttatttgctattgaatctgcaaggaaatataattttatttaataattgtaaattataaactctcatgacaatttatttttttcaaaaattatgaaattttactggatcagcaggtagccggactggaactcttttttaaagttggacacggatttgggcttttctgtatacggtaatacctggaccctgtttttgcccaagtacccggacccttgtaaccctaaaaaataagcttttggcatttcataatggtagtcaaaattgcttgaaatttcttaaatgtttttttttaaatgagtaacacatcttattcatgtatatattttaatttaaaaaagaaccttaaatatttctctataaacaaacttaaatttcaggtcttcaagcggagcattttccaacgaaattgccattgcaaagtgacaaaactggccaaaccaatccatgatattgacaatggcataacgaaaattagcatcgagaaaaccaacgcgatggcatcggctagtcaacaacacccatatgttgtgcgatattattcgagctagtcattaaggaatttttgtataattaaaaaatgaaatgtattgtgcaaaagtaaatttgaatttgcaaatatcaaaaaaaaactaattaatgaagagtaattcaggccaggttttagcccagacgggatcatgccgagattagcctttggctttgatgcagcttagagcatacatatntattgacccatatttatattttataattgctgaatttttgcgataaaatttgaatttatagaacgaatgaaagagaaaaaatcagaggtggtgagatggccaaaaacaaaaataaataatcgaaagtacaagcagatagac

SEQ ID NO: 9469 - DNA, 1127 bp, Heterodera glycines
atgaaattaataattgtttcgccgttttttagccgtttgaatttcggcacttttcacaatgattgcggcattttgttcgacaaggacggcgggctgtcgaattgtaaaaggcattgtttgctcctccgatttttcctcccattcgctgtgctgtccgccgctgatccgttcgccctttgacaatccgttgcgccgttttgaaccgctgccattcaacaaaagcgaccacggcacagccgacaatgttgatgtattgtcagccgagcaaagtggcacggtgtgttgttgttgtatgtttatattctttgacgccagggaatggccacaaaaccaaccccttgggttcgggtaatcctgtagtttgccccacctcctttttggaaaaaaaaattttcaaaattttttttccataaacaagttttctggggtattcgaggtcgctgatcacggacaaactacagtattaccgggttccgtacatacagtggcgagagggacgagttcgaacaactttttgccccgggaacaaagaaatgtattttaaaaattgcttgtatgaaaaaaggcatttttcaacagattttttgcccaaaaagtcccgacattgcgttcattaaatcaaatgtttgggaaaaggcccacattcagctttcttcgagtatatttgtgaagaattttttttacctttagttactagcccataatttaaaatctacaaaaaaaatctctagactttagctttcgattgataccaaaaatgtgggcattgacgaagtgagaacaaagttatggcataggaaactgaggatagtcattgaatggatgcctaaactgaatttgcgtcaaaattctttttaatggaaaagatgtgccttatagaaactctggcggcactctgtggatatcggattttctcaaataaaactgcaaaatgtttcagtcggcccagggcatcggtctgaaggagttcagggagacgaccacagtgcaggcactgcgcgccaccgcgtacatgccgttggtcagcgggcggcggaatgcggcggtgaccatcgcatacgcaagcacagcaacggtttttttggcatatttaatacgagcacccgggtcacccccccccccccccc

SEQ ID NO: 9470 - DNA, 1220 bp, Heterodera glycines
acgtcacttttcgtcactagaaatcattattttggcgcctttgaaactaaaatagttaaaaatcactattttggcgttctgtcactatttcgacattttttgggaaaatttctcaacaaaaatgcaataaaaacggaaaatacatccctaagaatcgaccccaaaattttcaaaaaaatacacccctaagaaacggtcgaaaatttttgaaaattcagacctaataaatgaaaaattttctcaaaaattcttcccccaaattttttttttgatgacaaaattttttatttaaaaaatgtcaatatttgttaagagaattttataaaggaaatgtagctcatttgtaactgcaatcagtgaataaaaaattttttgctcaatttttggctgaaaattatgtcactcactattcgtcactattttggactttttgtcactatttcttcactattttgggatttttactcactattttagttaactatttcggtatttttcgtcactaaaagttgctgccctagttataacatttacagagagttgctttttgaggggagtaactcggccccccatcccccaatcaagaaaattttttataagaaaattgcaagaaaaaaatttacgtcttcggtaatactgccgatggttccccccccccctttttggaaaatttttttttttggttttaaggtcgtgaaaacatgtttaggggggttttcaggattgctgatcacgaatatgacattctttttgatcaatttcgaatcccggacccggatttttttaagcatggaaattttaaaagcattaatatttgtgctttatttacacttctgcaaaaaacgggtgcaaaaaaattttcaaacctagaaaattttcatagtaaaaattcttagttaatttttttttaattcagctattttttggaaaacttttgaaaaaactaagtagttcaaatgcttttaaaatttacatgcttaaaaaaataagtaaaatgagtgcatttataggcacctaaaaatgtatttggaattgctccgttaaaaacttaattcggtactcttctaatttataggctacttttaacatacatttttcaactgcccataaatatgttttagaaattaatgaaaataagtgttaaggggttttcgatgtcgctgatcacgaatacagcatctattttaccaatttcgaacccctgacccgaacttgaacaa

SEQ ID NO: 9471 - DNA, 1065 bp, Heterodera glycines
tttagcattattttattgcttaaaatttgttacaccattataatccaaggaaaaaaaaaagattatccgtcagtgacatttattataatttattcatcaagcaatcattcggttatccttatcttagcgctctctctctttctcaatttgtcttcacagcattcaaacactcgagcgggatcaggtcgtaatgttcacctccacccaaacgcactacacatggaaggtttgggtgccgtaggcggagtccgtgtttaacgtaataatagattcgcacctttaatttttctatttatacagccaccaaatgcatgagcaaacaatccgtaattcccaaataaccacgcattgcaaaagcatcagttgctgaaagagtcgacaaatcactacattgtacgtcaaagttgcggatggccggtctgagatagtttgtacgcaggcgtacacagaaacgcatatattgtagtatctggcggcgtgtgttcaaattgtgcaagaacactccaagtcccttgtttgcgcttatgtctaaaacatatttatagcatttgaaaatgtatgataaaagcagcctgaaaactagaagagtacccttaattctaggttattcaatttttaaaatttctttgaaccaaattctttttaaccgatttttccaatttcatattttaaactcaaaaacctcatcgcgcatcggcccaatcccgcgttcctgctggattcgtcggatgcaattatcaaatttatcacggcgttcagcgaatgcaacggccccatgttcaagcatgtaattggtgtatctcattgttgtgtttggacgatctaaacggtataaaggcactagggcatgaaaaaaagtacaaaaaaatttttttttttttttactaggttttacattctaaagttttgagaaaggttcgatttaaatttttaaaaatttatggtaaggctgagctgatagcaccaattcaattttttccaaatagttttttaggagttttcatggtcggagaacccaatctataagaaggtattgcggcacctgaatccggattataacaaaaa

SEQ ID NO: 9472 - DNA, 1326 bp, Heterodera glycines
atttggaccgtcaaacagcagcagccgaggtttaaattacaaattaaatcagaaataacttttatttgtttaggtgcttgggcatatcacaccgcgcagcatgctcaaagttttaaatcggccaattgtgtgtctgatttgttgtcaaaaatttttcctgattcaaaaattgcggcaaattacggatccaaaagagacaaatccgcagcaattattacaagttttcataaaattaaaggataaataaatcgagaataatttaggagtacttgctccgcattctgtctccattacgttgcaggaaatgactgggcttccgttttcaccttcgattgactcatcaaatcataaaaccaccaaactttttcctttggtggttcgttacttcaatccaaaaaaaggaatttccgtcaaattgatcgacttagaggaattgggtggagagacttcggccgaagtttgaatcatactttattttttggcgaatcagctcatttgcgtgactcattccgggtttttaacgggaaattttcaaaattttccccatttttcagaattttctgaaatcaacacttaactatgtcgataaatggttccgtgttgaacgttttccaacgaatctaaaatggatttctctcaaggaaatgaaagtcactagcgccgaagtgatgagtttggctgaacagattgctccggaagtgaacgacaatgagctttttgacgaaattacgacgctgaatgaaatacttgaaagtatttctgacgagaaatttggtgaaatgaacgcagaacagaagtggatgaaggttttcgaggcggaattacccaatcttgtgttgctcgtcagcaaaattctttcaattcccgtgtccaatgcatgcgtggagcgcgtcttctctttgttcagctcagtggactgatgtgcgcaatttattgaaagttgaaaccgtgaaaagtctggcccaaatcaaatcgaattatgatctcacttgcactgaaatgtacgatttgctcatttcctcaccaaaattgttaaaaatgatcatgggaggtgaaatatataatatttgatacatttttgattgaataaattgtaaaaatatctgatttgaagcaatttgcaaaatgttctgattttcgaccccaaaatctgattttttggacccgatgttctgattttgaaaatttttcgatcgcatccctgttttaaacatacatgaaatcattttttggccttgaatacttaatattgcgctaaaaataacgcacactcgactacggcggccagcagtaggtggggcgccgctcgctcgctccgggttgctc

SEQ ID NO: 9473 - DNA, 4103 bp, Heterodera glycines
tttgtcaaagtttcacatattcttacattagagacgcctccttgtatttctgtatgttttgttggagattcatgtgtctttagacattggacggtttcagtcccgggtctgtaactcttcagggagtggttgccgccaaaattttttttcatattctttcatagagaccgagaggagtcgattgatattatatttacattttcaatcccgtcagtatcttcacttttaccaaaaatatataaattcgcaccctactcatttccaatgtttttgagtaatttttattttgaaagctttgatcaaaaataggtacatatgtacctatgtgtcccggaaaacatttttttgtcccgttaacctcgtttaattacctgttttagacaaatttgtttgttttgttgaatttccaaatgctgcttattttaaagaattgttttggtcggcttcatgttatttgtcatcaacttacgcgcagaaattttcgtcttcttttgcatcgacgaaaggaattttccgtattccattaaacttcctgtccacaaaacgaatgaataaatgttttagaaaccgattttcttcagcgtcggtcagccaaagtcttctttcactggtggaaatgcatcgggcggtagcggcggaatgcctcctaaccctttgtcggttcgtctcggcaccttttctaatactttcttttagtcagggcatgtcaaactggcagaaaatggctgttgcagctgctgtgattgtcggactgcaatacttcatcaatcgggtaacatcttttgtaggtgatggcaaagttggtgcttgagagaggcagcgatttgagaaacgattgggggagggtaagtttttgtaaacaaaaaaagtccaattccgagagtgatgagacaaattttcaatgttgttgacccattttcctttttttctcaacttttgattatcatttattccaactaaaattcacttagcgtttcttgcgctgtttttcataagaccacagtgttgccattgccttttttgttgatttgctattactccttctgtttagctcgcttacacagaaatatcatggaaacagttctacacggactttttggaaaagaacaatgtgtgctaatgatttggcgttacacttaacggattccccgaaccattcgtttaggttgaacgcctcgaagttattgacaataaatgggtccgtgtcattaccagggagccaacgcaggtgacgaagcgaaacaaataaacggttgtatttttcatttgagaatttagaccgttttttacttcaacatcggaagcgtagacacttttgagcgcagtttaacccaggcacagcaacatttgggcatggagacgagtcagcagcaggtgccggtgttgtacaaaagcgaaacggacatgtgaggaggctggcaggccattgccaaataaaaaatgaattcttttttttcagagtcggaatgattccccatatggttaactttcttatcacgggcatcttcctgttttacatgttcagaatgtttcgagggttcggaggtgatctttcgaattattcacatcatactttctcaaaaacccaggaaaaaagcccggccaacgtggcggcggcggaggttttccggggatgggcaatctcttcggtgttgggcagtcgactgcacgggtcatcaacagagaggacgtgaaaacggcgtttgcggatgtggcggggtgtgaagaggcgaaaatcgaaatcatggaatttgtcaactttctgaagaaccccgcacaatacaaagcactgggcgcaaaaattcccaaggtcattttgttgattcattcgaattttcatcttaattagccatccttatcttctttttttgcagggtgctcttctgactggccctccgggcactggtaaaactcttctcgccaaagcaactgctggcgaagcaaatgtgccatttatcactgtgtccggttccgagtttttggagatgttcgtcggtgttgggcctagccgagttcgggacatgtttgaaatggcgcggaaaaaggcaccatgcattctgttcattgacgaaattgacgctgttggacggaaacggggcggaaagggcgccatgggaggccactccgagcaggagaacacactgaatcaattgctggtcgaaatggacggtcggagcggggatttgtactacgggcatagaaaaatcaccccttggcaaaacacaaattttcgcgagggggggacaaactgcaccctcttcgcattgggaggggtggactaattgtaagagagtttggagtgggggaatcgttaccaagtctatcctccgcgagggtgcaccccaaaatttcgccggccgaaatttcgccaaaaatattttttaatttggaaattttcaagaaaattcttagaaatttttatatggaaattccaaggaaaaattttggaaaaaaaaattttattggaaaaaaaaattttagcttatttcttgaaaaattgacccaaaattggtcttttttttgcccgctggctattcatccatccctttattggactgaatgccaaagttaagggttttcaactgatgaatcgaacgttgtggtcatcgctgccacaaaccgcgtggacattctcgaccccgcgttgatgcgtccgggccgatttgatcgacaaatattcatccccgttcccgacatcaaaggccgtgcttccatcttccgcgttcatttgacaccaatcaaaacaaccttggacaaaatcgagctttcccgcaaacttgctgcgcacacgcccggattttccggttgcgttagtcacatgtcaatttattactgtttcttttcaggcgcagacattgccaatgtttgcaatgaatcggcactaattgcggcccgaggttccttttttatggatgcgatttcaatctcgctcctctcctggagcattcccccgtagtcttcgaaatttttaaaaacaaacatttttcgtttttaatgttatttttttctatgaaaaatgtaaaaaaacttttagtttaggaaaacccctctaattgtaagaaaattagaaaatttgccgttgttttagatgcacacgatgaggtgacttccaaggactttgagaatgccatcgagcgggtcatcgccgggatggagaagaaaagtcaggtcctgcagccggacgagaagaaaacggtggcgtaccacgaggcgggccatgccgtggccgggtggtttttggagtttgccgacccattgttaaaggcaactacttattttccaaaactgatatcaattatttattttcccattgttttgggtgtcaatcattccgcgtggaaagggcctcggctacgcgcaatatatgcccaaggatcaatacctttactcgaaggagcagctgctggacagaatgtgcatgactttgggtgtgtaacctgtgaattttgtgtcacttaatagcgcttaaatttctaattttaggtggcagagtgtcagaggaaattttcttcgggcgaattaccactggcgcccaagacgatttacggaagatcacacagatcgcctactctcaggtgggcatttgcattagtaatcagttttaaatttcaccaataattaaaatcattgttgtttttgtcttacgttggtttcaggtggtcaaattcggaatgagcgagaaagtcggtccggtgtccttcgacactccggagcctggcgaaatggcattcgataagccctattcggaggctaccgctcagctgattgaccaggaggtgcgcgacatggtcagcgcggcactgcggcgaacgcgcgaacttttgatgtcgaaggtggaacagatcgaacgggttcgtgaaacaatcagaaataattaggagagaccataagcatttacaaaaacggagaaaaatttgaccttcgtataaaaaatcgggcccgagacacccccccccccctgtcccaatcgtccgttgtatggcccttgggctgagtcaccccttggcatgtatgattcatttttcttatttgtaggtcgctcttcgactgttggagaaggaaatcttggcaagggaggacatgatcgagttagccacacgttt

SEQ ID NO: 9474 - DNA, 1381 bp, Heterodera glycines
cttcccaggcaatgaatgccatcagcggattggacctgccatatacgcgcatggaaatgtttgctgctgccactaaaccacttatcggaacccagggaattgtcgaaaatttgagcgcattggctgactttgatttgagcaaggtttggaaaatcacgatagcatttaatctttctttaattttagctgcagtttccatctgaagcgaattcaaatgacccgaaccaaggggcgaacatcttttcccgacagtacattgaggaatggtttcgttacagcgccagaaatgtgctcaaattaaattacgaccagtcaagcgcggataacaaagcaacggctgcgaattattcatctattgaaacgcaacaacagcaactttattcgacaacagcgtccgtaggaacaaacgagcaggaggtcacaaaattggaactgtttggttggtaaataaatggatattttcttcagatccagttcagcgaagctgccgctcttggagttatccaattaaactgtcttaatgctcgtaacattcagcagaaagtggcagagtttgtggaaacattggaatcccatcccaatttgtaattgttttatttttttcaaatgaatacgatcaatttcagtcgtgaccttcggacttgcattgaccgcctcctttcattgagcgctgatgatgagaattttacgaatcctgaggacactgtttcggttgtcagtgtcagcgaaacttccgtcagaggtgcatttgagggaccagtttatcccccctccctccaaagaatttaagcatttttatttattactacattttgggaaggggcagttcaccctctccatacaaaaaataggggggggggtcggggtggatttaatataattctgtatatatgatctgagcacgtaacaacatgttcctgttcagcaataaacttaaactaattgtacgttaagactataaaagacaatcaaaacaaaaaccgggtaaaattgcgagacatgtgattttttggcatctgaaatgatgggaaggaatttaaatgaaactatatttattgcttcacgacgtatctattcgaatggttaatgaacttttttttgtgggaaaaacccaaaattttgaatacatgcgacttgatatttattcacgtcttccaccccctcactttcttagctctctttcaccatacgttaagacttaaatgatgaatttgaagattttttgcagcccatcaaccccacccaaccccgatgaatattagagtattctgatcccgaattctcacctctctacaaaatgtatgattttacgaggatgatgattattagtatggaacatatgtacggagcaacagtttctctgatggtatttgtaggcatg

SEQ ID NO: 9475 - DNA, 3450 bp, Heterodera glycines
  unsure (1)..(3450): unsure at all n locations
ctgaaaacatgaattgcatgaaaaaatggacgcgatgaagaaggaattggcacaagttcaacgccagttaagcgatgagcaagccaaatataaaagggacacccaatcgctggccgattcgaaaaagcatttgaacatagaacttaatggaagatatgccgaagtgcaaaagttaaccacccaactggaggagaagtcacaatcgctgaaaaagagcgagcagcaattggcaaacgtaagagagaacaattagcaaataaattaaaggattaaaaattcaatacaatccaaatcatttttcattatgtgaaaagtaatgaatatccgtttcaacaaacaggaacgaaagaacagttcgcagaccatctccaatttgcaagaacgtgtgaagcgggctgaggtgaatttattggagcacaaattggacgacggacttcgcgtgttggagcgggccaaggacgactgttcccaacagatcaaactactcgaagagcagaagcagaaaaggcaattgcattactagccaaaaatggacaatgaaaagatttttaggaaggcatcagcggaccaagaaataatcaaaaagaatatcggagaatgggagagcaaacgggaggaagtcacgtcattgattgcccaagcgaagaatgacttctctggccatattcaatcgataaagaatgggaaacagctctcacaattgccaaaaatccaagtgccaaaaccgccgcccggaccaaaaatcatgccattggcacccattcaaccccactcgtcgtctacttcactggttaacaaaataaatgcagtaattgcttttctttataattgtataaatttcacgaaattcagcttcaaaacaatggcgggggagcaccgcaacaaatgccaccctcaccgcttccattggaccgtaaagtcattactccgcctgggcggtctcacattggtgcttccgctccacaacagcagggccttgccggcgcgggacttggccaggtgcgaattgcctccctaaactccccattggtgagcaaatgaacttaccattttcttgcttgggaaggggtggttattgttttactgaatactttctttttttaagaatccgaacatgaccaacgccgcttccgccggtcgccagtccatttcgtcttcggccaacgttactccggtcaaattccacagtcaaccgactgcgattgctgcactttcgcaaccgccgcctcaggcacaccctcctggacattttactacaattgcgccgattggtgtccgtccgcaaaattaccaaaatggcatcaccgttccgtccgcatcatcttcctcgacaacgattcaacatcagaaaatgagtggagcacaacgtcattctcctcagctgagtggagcctcaatgattggcggggctcaattccatgccaacgcccctccgcctccaatacaacaattccatgtggttggaaattcattgtcttcggttgggcagcctaatgccaccttgcaacaaaaacagcagcaggcaaacgctggtggtggtggctcatttcaaacatggggcggtggatggggtgatcagctcaacaacatcagcgagttgttcggtcaggggaggtcgtttggtccgttgggcagtgaatttggcggcagtggtgggggtgtcgtcgatggaatgcgctcggccagtgtcatccatccgccagctgccggcgtgatcggtgcgccctcttcgacggtttcgaccgggaacaatgtcagcagcaacaatcccccgtcttcgcaaccgatcggtgctggccgcaatttgcagaatatgtcaccttcacagcagcgcaacggatggccatcttttggatagacatatttcctctttttctctcttccaaatctccctgctgaaatcgtcattattattgttcttgtctttatttaaatatacatacatattcagtcacatttgtactgctgattgcacaaccaaccgtatatgctaatgacaaacaatcgcaaattttcgttggattttgtttacagatttggatttgttgctttccccctcccccctcccttcggattgttcgttggcccatgagaacaatgattattattatgatgatgatgacaaattaccgacgatgataaaggataaatgcttgtctttaaaatttatttgcttttttgtatactcaaaaaatgatgaatttgggtggtttcccttgagggatatgtgggaaaagaaggggagaggggaaagacggagaaatacattcggtgatgaaacgtcagaatacaacaaaaaaaaagaggaaaaaaggaaaagaaatgtgtggttggagcctagcgatttcatttggataaaagagatcggcggaagaatagagggtaatactaccgatggtaggacccctttttgaaaaaaatattttaactttaaaagtcactgaaaatatttttctaaaggttttcggggtcgctgaactcgaatctgacattcatttgaccaatttcgaaacccggatccgaactcgaacaaaaagtcgaaaatctaaaattttcaaaattctcaatttcgttagatcctacatagaatgaattattttaattgttagaatagttttagactaaattttgcatgttttattcgtttaggaacaaaattgagaattttgaaaattttagattttcgattttttgttcgaattcgggtccgggattcgaaattggtcaaatgaatgtcagattcgtgttcagcgaccccgaaaacccttagaaaaatattttcagtgacttttaaaaagttaaatatttttttcaaaaaaggggtcctaccatcggtagtattaccaaaaaatcaaagacaaaaaacaaaccattgtggccacatcgccgccaattttcttggacaaatccaaaaaagttttgagcgggccatcaatttgttcatcatagcctttcacggagggaggcatcgtttgggatgctgcaacaataaaaaaaatttttagtttttataggcgcttctaaaaattgtcagttttttaaattttattaaaaaccaaaggtggaaggaaccttttggtttgcaatattattcattttttaagatgatgtctactcgttaaaattgtttccgagaattttccgggttgttgatcacgaatctgacaaacatttcatccaatcccgaatctctaactaaaatttaaaaaaaaatgaaattcgagaaattaaattttcgacttttttgttaagttcgggttagggattagatattgttcaaaattgctgtcaaatccattatcaatgacaccaaaaacccctgtaaacaaagttttcacgatttattatgacaaaaataatttgcaaaccaaaagggtccctttccccntgtttttaataaattcaaaaatgccactttttaattagtgccatttttattggtagctatct

SEQ ID NO: 9476 - DNA, 943 bp, Heterodera glycines
ctttcatcggtagtattaccgaatagaggaaagaggaaatgagaagggaatggcaaaatcattcggagggggaaggggtgaaaggcattggcgggtggcgtggaaatgattggcttttcccttccgtcggttcgcttcgtcctttgcctcatttggccaattaattggatccatgatgaaaagtgagcagagatggcgaagtgtcgctgtgaccatttttgcaggggaagggagcgcaccgtcgagaggaagcggacgaggccaaaggacgcgtcaaacgaatgtgaaatatccgtcggatttgcgccgtttccgaccaccgccgcgggcaatcggattggaaccatcaaaagggggttttctgaagagaggggaaaattgatggggttaagacagaaagagaggacaaaagaagaaaagcggagggagggaaagcgacagaaacggacggccgaaagttggcactgaacgcggcgcacatccaaagggatggcgttgctcatccatccccctccccactgctgaagaaggaaagaaagtgcacacagacagaaaggaaatggaaaagaaaaagaaatgagagagaaagggaggaaatgggaggacagcacaagtgggaacagaaggaagaggaaaggaggaggaagaagagggcactcacatcaggggaaatgaggaggaagggcagcgaacggagaggagagacggaggaggaggaggaggaagaggggagggggatgcacagcaccaagaaggcatcgtccggaagagcaaaagcatcgttcggaaggaatggcggttgggtggagtggacgcttctccttctgtctgtctgttcttttccatcgtccgactgtttctctccctctctttctctctcgctctctcccctcttctttctctttcgtccgctctctcagagatggtcgcgcgaggcggaaaa

SEQ ID NO: 9477 - DNA, 1396 bp, Heterodera glycines
  unsure (1)..(1396): unsure at all n locations
agaaatatttgcatcatgacattgcccaggtaaagcattttgatgacancataaagaaaagtgacgtaagaactccaacgacggcccatgcaaaaattggacacgtcgtaaatctaaaaaaaagggaaggggaaagagataaaataatggtaggacaattgataagaaagcactgatcagctagctgacccatcatttaaggggatggcaaattggacatcccccccgccttccccctatccaacattggccactgatcgatcgatcactgtgtgatcacctccccccatcccattgatcgatcaatcaacaactgtatgatcacttcccccgccattggccgacctctcgctgcagttccaacgtgtcctccatgtgtcctgcaattgtcctgactgtggcatgccgtgcgtccacctgatttggccgatcactcatcccagtcaattcacctgcccacccctctcctcacatccatcatccgcgcatcgcatgccatttgagtgagattttggacgttgattcctgcaaaagtggccgagagttggcatttctgagttgtgaaatgcaatgcttgaccaaccgctgtgccaatggagaaggccgcgccacattatgcacggaatgtaaaacatcagagcctccaacgccaacacaaaaggcacccattggtaataagagatctgacgcgccctgtacctttaggtaaagcatttttgctacgattgatcagccaatggatcggtcggccccaaaggcgcatttaccgtctgtcgccgtagtccaacggaaaagcgttggtcaaaggcaaatagtaagtctaaatttgggactgattgatcagtggttggttggcccgggttactcacattctccacccaacaataattctccgtgtactgttcccaggcatcggtgaactgcgcgggcacccaacactgaatgggatatcctaaaggggggggggggagggaatgggccaaagtattggcaaaatgccaaagcgcaccgaccgacgtattgcttggcagagacaattatggcaaacgcgaaaataatggcggatgtgtaatggtaattcaatttatccacaaaatcatcgtctacccgaggatgaagccctttgaagatggcggctaaataatagaggagcataccaacagaaagaacctgaaaatgggggaaatgaaggaagaagaaaaaacgggtggatgaagaagaagaaaagggaaaaacgaaggaagaaaaaagggaagggaggaaaaaaggagaggaagagaagacagaagaagaatatggatagggaagaaaaaggaaaaacgaaggaagaaaaacgaaagtgagggatagaagaaaagggggggggagtgagggagaggaaaaaagaggaagaaaa

SEQ ID NO: 9478 - DNA, 6718 bp, Heterodera glycines
gtattatcgcccgagggcgagtggagtggttggttattattattatgattaatgttcgcaccctggcgagggtcatttagacgagtgggggcgaaaggatgcgcaaaagtggggtcaattggagaagcgaaaatggaagaatggcaccaaattgtgtaaaaacaataacaatatgtaacaacaacagaaacagaaacaataaaaatgaaatatttcccgcaaattgatgactaattgataataaaaatatttgagattttggaatatattttaattcacaaaaattgccgaaatggaatttgtttcaattttcaaaaattttcttttaaaatacatccaaattttcatatttatatagtggattaattttcaaattttgttcctaaacgaaaattctaatcatgccagaatttttaaatgaggaattcccgacttccaaaaatgccgaaatgcgataagcgcttatttattgaacagttgttttttatttatttaaaaataattaattgaattgcataatcaccttaaggcttgaaggtgtctccaaagttgcacaaacagttgacgcattgtgtgagagatgagacccaatttacaatagaagagatgtgcgtaaaccggatttggagaatttgaaattgggggaggagaaaatctgagagctatgggaaatccaccgcaaaattaatgggaaaattgcgataatccatccgttgatgaatcaatcatttattcatcgcaccttcaattttaaaatttcggaattaaattttccggaaattactgctaaaacaaaacgattaaaacggtaattagcaattttttcgaaaatcggggtaattgaataaagaagttaccgctttttacagttgccgaaaatcggtaatcggataaaaaatttaccggattttatagatatagaaaatcggttcactaaattaaccgacttaaagcatttccacggtttggaatgtcttgtgggttcgagtcccaccggacgagttatcttttatgttctaaattacattaattaccgaaaatccgtaatccgtaagcggtaaatttcgtgttgtgtttttagcagataaatttttaccgtgccgaacgctaaataatttaaatagtgtcaattaaaatccttagaaaatattttctgcaattattaaaacaaatttttgatttaacaaaatcaatttatgcgacccaatgaaaagaaaaagttatgagaacgaatctccttttcacactgttcaaggccgtttattatgggctgctgaaggtgtaaatttcacataaatttgagggtttgatgcatcgtaaaacaataaataaaaagaaaattgggaggcaattgtggagcgggaaagttcaaaagtccagtcaaataaaaaatgttcgtttttttgtgagaaaattttgatgaagatcccgagatttgaaataaaaaagtcgaaattgaagggaacaaaaaggaaaattcaaaattgtaaaatgtatggcccaaatttgaaaagtgccaatggataaaaatcatggactaataaaaaacttcgaaataaaccagaaaaatggccaaatatcaaatatggcccgagcctttggtttaaagatttctgttttacataaatgtattaaacaataaccaataaataaatatatttttacacataatacatattgtatttttagtgtgttaactttcatattggcaacatcatttattatatttattattaattttgaaattcaatttttttaaatcttaaatgtaaggctaaataactgttgtcaatttccttgtgctttcaatattttattttttttggtttgaaagcgccaagaacaaagaacattttgcataggaaaaaatgatgaaaatttagtttttttttcaattgtcctcctcggagagatcgacgaggtgaaaaagtgaaaaatgttggaccaaatcaatgcttcacagttcacacgcatgtttctgattttcgtcgtattcggccggagaaatctgactgaaaataaaggaaatttgactttttgctgtattattgaatgttttttgaattgctttccgatttctattttttttaatgtcgaaaaattatttattcggtatcgctttattagacaatgaatgataagtaataaaagtaggcaatttatataaatcgacttcatcgaaacgggtctgatcgggagaagaaaacttcagggaaaggggcttgccgaaaaaaaaactcagaattttcatcaaatttcaatcaagaacctaatatggcctttcaaaactgacacgtacaaatacatgagttcggaaatacaaaaaccgattttttatcatgatcatgaaatccggtccggattcaatctggaaaatccttttcctgataactttgatggcataatgccttcgccttttaagcctatccatttttccctaaaattgttgggctgctggccaagcttggccaacctgaaagcttctgttgtgcaactcaggcattgaatcggccactgcccggtcaaagtcgtcgctgctcgtctgttggtggtgctgctgttgttgttgttgttgctgtacatttggttgctgcttcatgtagttgggcatgcgctgcttggcatttgtcatcggcaattgattttgcataaacaccgggtgctcaaagtccattgacctgcaaataaaataaattgaaatttaatttaattttgtaagtaaaattggaaaaaaaaataatataaaattgtaatataattaatattatgtaaaatttagaagtaaaaacaaaaaagaaaaagaaaaattaaattgaaattgaaattaatttttttatattataaaaatttgggaaataaaataaaaattgaaaatgaattaaattaaatttttttttaataatgtaaacttttggtccttagaaaatgcgacagtgaatcaggacaataggatttaaattgaattacaaataattaatgaaggtaaattacaataatccaaatacagtatttttgttgtttttttaaataaaacaagaaaatttgggatagaaatgagtagggatggactgatgtttgtaggggtttttattcaatattttttgtggaaaaatgtatctcataaggattgaaaaacttaaaattttcaaaatttcatccctaaaaattttgcgattttatttgtccatacaaatatggcaattatgatgagaaatgaacataacataccaagagaaaacatttttttttaattttttcataaaaaataaaattacggatcgcgttgaattggcgtactggaagcagtgggcggaaacataaaattgggtgtcaaacgatggccggacaatgccgcgggggctgttgccattgataatgagagaggggtaggccctaatttgtaagggtcaattttgtgcaaattatgccaaagcgaggctacgaggcttaaatattcactaatggtacaaatttggcattaggccagggctcccagcagatgaaaattttcaaaaaatttcattagactgacaaaaaagccaaaaattttccaagtttgaaaatataatgaatgatggaccagcgggcctaaaaatgtcaaaactgaaaaattctaatacccaaatagtgattaattgaaatttcaaaaaatttttagaggcctccttaggcttggttaaaaattcagaaaaggaaggtcggtcctcaaaaaacctctatcaatacgatcggctgattgtgagctggaatggaatgatggtggaggctgaagttggtcaagcaatggcatccgatccattggcctaaaatgaaacaattttttcaattttggcgttttccggagcaataaaatgtgtaactcaaaaatttattaaaactcattgccatcttcgcaatttttttttttgttgccaaattaggacgaaaagttgttggtcaaaaagtgcaaaaaacaaatttgtgcaatttataacaaattattgaaataaattaaaaaatattaactgaaaagtgcgttcggcaaactatttcattctacggcaataataaactaaacaattgctacggaaaacggaaatttgaaaattgttccattttgaggtgacaaagaatgaaaaagagagaaaagataaacataatattgcacaccaaacatattacacaaataaataaagaaaatataataggtattatcattcggtgatcgggattcaacccatcaaaaaagggtcgagaattggcacttggaatcagggactttttggtaatcgccggcatgacaacaacataatatacaaacaaatgaaataaagaaaaatatcaggctacaataaaattaaaatataaaatgggaaaatataaaacaaaaaaaagttgcgtaaaaaaattatgaattataaatatatatttaatttaaataaacatatttgtttaaataaaaattatttaaaatacaaactcttaccttcccacattggtcatgttagtttttgacgatgtttgcaaggaatatcgttctctgtccaatgcgacgccttttcgtgtgaaggcaaaactgaagaatgttctcattttataaatttattttattggccatttgaacaacagttaattaggtaattaaattttaattctaaatttaaataaaataaattataattgtattgcatatccaattaattactaagtggccaccatggcgatcaaaaaggcaataaaatggaagaaacaagcggccatttgaagaaaaaaggccagtccaacacgttgctaaattcaaatttaatttgatattgtattatattagttaatacctcataagtgccaacaatgcccttgatgaaacgattgtcggcacgatgggagaagaagaagaacacgccttcggcaacagaagaaaggaaagctgcaagataaattattttattttattttaatattcatttttaaatttaaatattagaattataattatctcattttataagtaatttgaaattgactggagcgtaataatataagccaaaggatcgtgtcactttttttgccaaaatcggaagcatcattttatcattgacccgtgatcaatgcattattatgccgtcttgcgtcttgaaatcccggcaaagcagagatttcaatcccagtaatcctatccgtgccaattctaatcccgaatcccgactttttcattattccaggccctaattaaaataggggactgctttaaaaacatcactggtaagcagtgcagtggctgtgaacaccaacgacattgaagcgtaacaacagccacaagcaccaagacaaatggagcagaagctggtgatcagagcgagggccttgaaaaatttcaaatttttcgataaaattttccatttttcaccagcattatcagtgtggcgctgtgccatccgtagaagcggtgccggttcacttcaccaaccggcgaattgtcatcctccacgtcgaaagtgccggaataccttaaattggcatatcaattagtaccatgaaaagcgccgaaaaaattaataaattttcattttgtgtgaaatgaataattaattagtgccaatcaaaagcgccaaaaaaactaattaacctatttttaatttgaacataaaatgagaattatttagtgcagtcaaaaacgccgaaaaaattgattaatttacttgtcataatcaaatttgtagacacaatgcagaggctcggtcagtgttgcataactaaatgcattgacaaaatttaattcaaataaatttttaaattatcagaaaattttcggcatggatcactttgtcctcatatggcacaattattatgtgcatagcttaaattttccaatgccggaactcggcacttttctcagtcaagagtctcgagaccagtttttctagcgcatttaatcaaaattgacgaccgaccgtctgaggagaacgccgcctccgtcccggatgtgccgaatgcaatccaaccaaaggccatgctcatgcaccgagttgtactcttgcagattgacaacctgagaattatggggtaaaaatggaaatttttttgaaaaaagtgaccaaaatgaaaatttattgaattaaaaattgcgccaaacccaacctgccacgacggggttaaaatggcagcaattgataagcccatgccgatcaaagtgaacaccacggagcaaaaaatcactgttttcctgacaagctcaggcattgtttttgtggcaattattgttttattattatgcaaaattttctaaatgacacgacatttaacacattcataattttacaaaattaagtgtatgttgcgttcgagagtaaaaaaattgtcgagactcaagagcaagacatggaaaattattaaagacggagttaaagcggtcgaatgtcccctcttttcggggtcgccctaaaaaaggcatgggattcgggtcggttagggcaggcttaatgagatccgctaggacccattattgtgtcataaatgcaaaaaaaaagtcggagaaccgggactgcagcggtgaatccgggaattatttaacttcgggatcaaaaaggcagcgctgaactggcaccaaattttttcatatacataaattttataagacgcataaacagcggcgcaagtgttgtgggaagttgtgctgcgcgacgcgtacatcttttctatacacatagggtgctgcgcaacccgtacgtacgtgcgcgaa

SEQ ID NO: 9479 - DNA, 1966 bp, Heterodera glycines
  unsure (1)..(1966): unsure at all n locations
aatagcaatcgattggtctgactagactccatatttgcaggaatagcaatgccaggtctatcttaaagtcctgacgagttatgtttcgacaaacatcctgtactccataaatcgattagcaaatttagccgacatatatatatttttcaaaaaaagattcatcttttttatggttagctcatatgtctctagctttatagaaacggtccccgaatgtgcgaggagctcctttttagagaatttctatagattattgtttgcagtcaatacctaagcgggggaaaggcaacggacgaaagaggacggccaagggagagcggaccggaaaaggacggaagatcgaaagggtgggacggaccaccggcggaggccgagaccaagctgcttcttgtccccccccccctattgtccccttcgtccttgggacagtccaagcgtgacttttgcgcatttatttcccttgagcgcttgtgactgagaaggcataaaatgagaagcggatagcactgcaggaagaggaagaaggaggaggagaagggggaactgttgctggacgaatggacaaatggcgaattatttatttatttgttaagtcaacgaaagggaaaaggttgacgacagatgaagaggaagagaagagaagatggaaaagtgaagaggaggaaaagaaaaggggagaatgaaggggaagagaagaagggaaagtgaagatgaagagaaaaggagcaagggaaaagatgaggaagagaaaagggaaaggggaagatacagaggaagaaaaataagaagaggagtggaaggaaggaaaggaagaaatagtaaaaaagagaatgatcagagaaaataaaaagaaagtaaataattataattacggaagaagcttggtagaggaaaagcttaataaaattctttttcatttcttctccttcccacttcgccctcccaaatttccttctttggtcccttctctctcatttagtgccaatttgtgccctaaaatgacggccaaagaatggacgaatgaatgcgtagtgaccaagcaaaggcacaagaaagcatggcaagatcatgctgggaattgaggacagggcactcgacagacgaaatggcaatttgaggggggcgggggcgggggggaggggacacccgaaacattaaataggcaatttgacgagagagaccattgggaacggagggaggggataatagaagaggaatggatgagcaaatgatgattttttggtattaaagactaattaatgggtccaaaaatgcgctcccgtttcctccgccctttctttgtccaaaaattgaaaatgacgggttactcttataatgattttaaacggattggccaacttagctaacatttgcatttcggtgatggtttacgattacataatggcggataaattgggcaaatggcccgcgggaatgacagacggagggggcgggggagcaatcagaaatccatggggaaatgaaagaattagccgagaaaggggagcacgaaagtcggatgaaacgcgaaagagaaaagaaactgaagacaaaatgggaacttagaagtttagaaaaaagttgcgatttgagggatgggggggatattagcagaagaggggagaaaattacatttgttttcttttacagtccttcaaactccggtttttgaagagagcggcaaattggtggagagagagagagagaagagagggaaaggggggggggggggaagacggggaatttgaggtgacaaatggacgaaaaaatggaccacgtatggatcacatttcaaatgggcgaaggtcaccagcagcagaagaaggcacactcagtgaacgtttgccgcggatgaaatgaccgacggatggagngggagaggggggaagttatgcctatgaaaatgaattaaactgtgggggagactttattgtgtgctgaataatctttaggagcattggtccct

SEQ ID NO: 9480 - DNA, 885 bp, Heterodera glycines
tttctgttaggcgagaagacaaagaaagactaaaggcaggaaatgctcaaaaattaccaaaaaatttgaattagcggggtttttggcacattgacatcagttttctgatgttgaaaatcaggacttattgatttttatcagagttcccatgactattttgatttttcatttttttctgaagcgaatatttgaattaatttgattttaaaaaaaaattacattttatttcattttttgagtgaaattcacaaaatgccaccaaaacgtaaatgggctcaaaatctcaaaattggtcatttttttggtgaaattctgttaacaaatttcattttaatttgaaaaaattttcccggtggcgcctatcggcgcgaccggacaccaaaatcccaatttttcttaaaaaaattagtttaaaatctctaaatttggtctttttttatacaaaatctgttaacaaatcacatacaaaatttcaaaaattttcccggcggcgcctatcggcaccgccggcctaccaattcccaaaagttttttggaaaaagcacgccgcaaaaacattattaatttttaaattttgaataaaatttttcaaaatgctgatttacaaaattttcaattgacaggccttcgtttttatgctaataaaatattgttttaagtcaatttttcatgtttttattgcgtttccttcacgcaaatattagttttagaaaaatcttatttttggggtcagaatcttagtttttaggccattttgtcttattttgaaaaaaaaaacttgggaactctgatttttactcgtttaaaattttaatttcctttcttgtttcagcattctaaaaaataatttatttatttttaatataaatttttagaaacaagcga

SEQ ID NO: 9481 - DNA, 2979 bp, Heterodera glycines
aacgcttcctcagccattcgctcacgttgattttctctgaaattttgttaaaacaattttttatgatgcgttttgcttttgtttaccactcgcttcccacaaatctttcttcgcctttttcgttgtcgcattggcaaccgaaggacaaaaggcacttttcctgcaaggcaattcatccataaatttagcgcttttcaacacgccctctgagtcacctcttttggctttggttctgctgatggggccgagtgccggaaatgtcgcagaacagcgtcaacagatcgcggtgcagttcggacaaatgggagaagcgggagagcacacggcacaattcgtcaaatgcgacacggaactgttcgtcgcttaaagggacaaacggagaaggaattgccattttgtccttccctccgcagcttttcactcactgtgaggccaaatcgcttctgccgttggcaaaaagtttgcactcgaacactttgtcggtcaacggccctttcccccgctcactgaccagcgaaaacatttgcgatttgcacttggcgaattgttctgcgctgatttgctgcttcggaatggtggagagcaaaggctcgaatttctaatcacaagtttaaaaataaatcggccgattgtttcgaagaatgaattcactgcgaaaaaaacacctcagacacattgtagatgaaactttcattgaccgtaaagggcattccttggcaaaacaactccaaattgtgcagcttttcctcattttggcgctctctccgccgccgtttccttttcaatgtccccaacagcgaaagtctcacgctgaacaagcaaattctgccaaatttggtcgactgtttggcacctcgctttttcagtcccttcttccccgctgttcctttcctccccgtcgtcacaatcgctctcgtcatcgaccagctcaaactgttcgtttggacacggcacaatttgagcggcttggatgagttgtgccatcgccgttcggttcagtccattggccaattccgctgaacttcccttcgggccataaacattttcactgctgagttttccgccaaaatttgctgaaagctttgccaaattggaataatcagtcaaaagtgagtgggtgaaacccttctttcccatcgccacacaatgcaaaagaagggcgccgttcacatcgcgcgacagataatgggaaatgagtttttgatgcaaatttgggctcaatttgcaatgctcggcacgcccttggtaaacgtctgggaacacttccaacagcactgatttgccattggttatgaaggaggtcagacaaacggactgacggagagacacgtgggcaggcgtaatgggaaaagagcgttgaagaattgggaactgaatgaagaaaggggatgagagaaagccgagagggacagagaggagagagaaagggagaaagcccagagacggaagagagagagagagcgagagagagaggggaaaaacgacaaaggatattcgcactttgtccgacttcagtttcggcgaggcggtgcaccatttgagccgtacggaggtgaacagattctcgtgggcgctggcgctgtccagcattttggtctcacccattaaaaggccgagtgaggtgagggcgaagtgagcggagcgtgggtggagcatttcgacgtcgtaattgatggactgtccggattgggcctcttcctgaaatgtcggcaaccatttgtacaataaacggtaaattacatcctaatcaacacaaaaaatggtataagaatggtcaccgctgtcattaactccctttactcaacttcattggtattccgcagaccgttgtcgacacaagtccgtaaatgtcctgcaaaattttgtgcatgccgacaacagaagccggcccggcactgacagaaatgagccgcgcatggaaattggaacgatgctaaacatttttaaactcatttttgaaaatttattttcaccttttccttggaaaacattttgctggattccgttgctatgttcaacacaaacaaatgaatttgatcgataagcacagaactgaaaaagtgcagaaaacaatttgatcggtgcaaaaaatttggcaacttttttttcgttgaagttcgatttctctcattcagcacaacaatttgttcggaaatatattcggtgattgtgtcaaactctgtgggcctttaaaaaacggattaaattcggaaggccaattggcaattctcacgagtccatcgtcgtaatcaccgccatactcccacggttccgaatccggaaactgttcctctcaatttttttctgcatttgttcccgcactgtgccgtgggccttctccttctcccacttctccattgcttgcgagtgcgctttttccttgatcgtgctcatctgattggagtccgtcgtctctgatttcccttcagtctccgtcgattcggtccctttgttggcctccgcgacattcttctggcttgaagcagtccttccagcacttcgcaatctcaattcaagctgtccaatatataagcgaccactcaaagtccacacacattttgtccgcagctttccgctgcagcgccgtctgctcggaaaatgcttccaatccgagaagaatgccgttgagaattgagcaagaggaagcgtcgccgcccgcctgaggcagctcacaagtggcaaacgcatttaacagctaaagccaatgggagagatgcagtcggataaattggtgatggaggtgtgacctgttcatgagaaataaccgagctactgctccatccgggcgtcagaaaacgaccgacaaagtcggaaatgacaaatcggagacatttgtcgccacgcggaaacaaatcagtaacaactcgatggaactccataacagcctcaacggaaatgctccacaacttcttctccaacttcccaataatggacgcattctgatcatctttcactgagaaagtgatagtctgaacaaaa

SEQ ID NO: 9482 - DNA, 886 bp, Heterodera glycines
tttttaattaatttgataatgaatatttttctaattaatttgataatgtttaactgtttttgcattttcagactattacttatgataaattcataaacctttatttttcaaaaagaattttttattattatcaatctttatttgctaaacgggcgttcaagttataaaaattaaataattaattctaaaataacaatgatattaataaaattattaattatatcatagaaataaaatttctaaatgctgttgtcgcaaagatcggatttaataagttgaagttgcacatcctatttacttgcttctgcggcaacaatcaatgctgttatttgcttgtggacccattctttttatctcattttgaatttgaaaaaaagtttcttaattacattattataaattaattctacaatcgcacttcttgcacgtttcttaatttgtataaaaaataaagtatatcttttgaggctataaaattaattacagaggaattatacttaaaatgtttaaataaattttattacttcatgttaatgttaattattgccactgtaattgaatgtatatattcaacatgattattttaatgtgctcttcgtgggcagtctcactttattttcaattaatttataaaatttgaagtttgtatttctctgcggaatagaactttttgctcttacgatccattttttacaagtcggaatattttttgttgaattaatttattcaaatgtttattctatcatttggatgaaagcccttctaaatcaatagaatttttttcataaatttaggattttgacccaataaaagccttttatggccagtcggccgttgggatggaaggggtgtaataaagcgcaaaaagaggggggggggggggggg

SEQ ID NO: 9483 - DNA, 2639 bp, Heterodera glycines
gagttaatctaatcttttcgtttcttatattttttcaatcatgtcttgtcagccttctttagaggtcaaagaaaatcaacataaattttaaactcatgatttaaaaaccgcttttgttgggagctttgaacccattgaatcttggaataaattaatccatttcctatatacattagacaaaaatttacaattaacccttgaatatattatattattaactcttttatttctcaaaatacatagttttaaatgaatatttttatctttgaatcttaattcaattattttcaattcaattcttgcttttattatattatttggtacattaattatctcaccaaggttttttgctattaaaaaaaataagaaaatttaaaatcacatattatcttcattaaatgccaaatataacggtaataaactgaaaatcttttaactatatattataatataatcataaaatatttttttgatttttaatttattttaattgtttcacattttttttgaatctttttcgacttaatcattatcacttttgaattttaatttgcttaatatttttctatcgtcaaatttttttgatgtaatatttaaaatttatcttatgaaatgttttaaaatacatagaattatgtttcatttatgtgattgattaaagagttttattgacaaaatgtaaccattttatttattaataagcatttaaaaaaatattttaatatttattaatatcttaacggggtcggaagtattcatttttatttataatgtggagataatgaataaaattaattaatttatatccttctcagattaaatgctatacttaacgttcatttttatccaaattacattcgtcagatgtaaaattaattttaaatacttcactactgttctttaattattttaaattatttgatcattatttatatttatgggttgtttttaccttgtagttttatgcgtttcactgcaagtaccatatcatgcatcgtaatctacatttgtcgatatagtatattatttttctttttatttattttaataacaatggaaaatatccatcataggtcccagactcaaaattgcataaattacatgctcatgatgataaaaacctaaaaacttcaatagtaaaaattaataataaatataaatgcaaaataataaatcaataatttttaaaatataattaaatagcattttttataaatgataacattctttatttaataaaacgatatcggtaaaacattaatgtaaataataatttcaaaacttagcaattatatatttagggctcttttaaatacctaattattagataatgttaattaattataaatttaaatatatcatcatatcaaattcaagattaatcttttaataaaatttttatttattattaattcttccttattagtataagaactgagaaaatcgaatgaaaattagaagaatgataatggcttcaattcacaactgatgaatggagcgggtaaatttagcaaaaacaataaaaatctaatatttttatctatttgcataatctttggccgactttcaatgtattacgcaaaaattttaaatttgtaataattaattagttatgcttacataataaaattacaattttatctttttttttcttatatgcttaaatggtggaaaatttatatttttataaattaaaattttaatgccgacgatttaagaaatcataaaatattgttttgagtctgcaaattcattttaacttaatttatcaaattaaaagaaaaattgcaattccaactaatagcaggacatagaaaatttttatttaaaatttttttatacggaatcacaaaaatacatattgggaaaatgtttatcatagctcccaactcaaaaacacccaaaaccacttttataggttttcttaggtgctgaaaaagcctaaaccatcaaaaaaactgcgcggcaaagcgtttgaacaggtttttgaatcggtttaaatcacgaaaatttgcctcagaaatcatccaaaaatccatttaaataaaaaattttgaacaaatttggtatcattcgaaagctcttaacgagctaagtctaaaaatcagggaatgaagtcgaaccgacgcatgttatgggtcctcaaaatcgttaaaactacttttaaaaccagtagtcagaaatggtaaaagaacgtcaaatataaaagtttgaatttagcttattgcgctaaaaaaccgccgcacactcgacaacggcggccagtaggtggggcgaggccgtgctggtgcgtttcgtaaaaactgcaacccatgcgcgtttcgtaaaactgccaaattggtatttttttaaaacccccacccatgcgcgtttcgtaaaactgccaaattggtatttttttaaaacccccacccatgcgcgtttcgtaaaactgccaaattggtattttttaaaacccccacccatgcgcgtttcgtaaaactgccaaattggtatttttttaaaacccccacccatgcgcgtttcgtaaaactgccaaattggtatttttttaaaacccccacccatgcgcgtttcgtaaaactgccaatgggttccaaaacaaattcgctaatatatataaattcataacttgaccc

SEQ ID NO: 9484 - DNA, 3461 bp, Heterodera glycines
cccggggacctctagagtcccattggctttgcttcttcaaagggcttaacggcttcttcctcctttggtttggcttcttcccattccattttggtttcttcctccaacggcttttcgtcttccattggctttgcttcttcttccttcggcctttcctccacaaccgctggctttgcttctatcgctgtaattaataaaattttctaattagcgatcggttgttttttagttacggataattctcagcggtgcttttgtcgtggcggttcctgctggatttgtcgcttcgcaacaataattgccctggtcgtccatgcgcgacttggggattatcagtcgttgcgtgccgtccagcaatgcctcgaatttgaccgcgtccgccggacccaacggcacgtcatccttgtaccatttgacctgtggctgcggcacaccgctgacttggcactcgaacatggcctcgtctccttccgtggcctgatattttcgaacagtcgatgatgccattatttctctggttttttgagttttcccacctgaactggcttcaacccttgtacaaattcgggtgccacttcggctggcatcggcgcctcttcctcgagcaatacgcgcagtggcgcttctgtgtgcgcagtgccggacgggtttgtggcgctgcaacggaacactcctgcgtcggtgatgcgcgcggcgggtaacgtcaggtggcacgtgccgtccggcgactgagtggcgcggaaattgacatcctcgggccgaatctcatcgtcatcctaaaaattagcgaattttttatgaaacattaccatactcatacagtaccttgtaccatttgacctcgggcgttggccatcccttcaccacacattccaaatccgcttgttctccttcggtcactcgcacttcttgaagccctctgacaaaatatggcgacgatggctcctcttccggctcaggctctaaatgcacaaatggaaattgaaaaattaattactcttcattaaatccaccaaaatgctaatgatgctcaagagtctcggtctcgagtaagtctcgtctcggctctttggtctggtggtactcaattcgattttcgagattctgtctcgagaattctgggcagccctagcaaataccgtaccccctcccccactgtccaccttgtacggtcaatgtgacgtcgctccacacgtcgccgtatttgtttgtcgcctcacaccggtagtcgtccatgtcgcccatttgtgcgttcgtaataattagccgttgcgtgccgtccggcaaattctcgaggcgatagcgcgggttgaggccgggcgttatcagctgctcgcccttgtaccatttgacctcggggaatggcaaaccggtgattcggccctccaaaatgccggtgtcgccctaaaaatttgtgtcagaaatttaaagtgattctcgataaattgggtaagtctcgaaatagcaaacaattttgccacaaattcacatatttctctgtgcctaccactttgactgtaatcggtcggacgggctcaataaaatcgggcgcttcgccttcggtcggcaaactgccctcggcagcgacgataatcggaccttcagtccatgccgtgccataatcattttcggcatcgcatctgtgaagggatagatgtccgcattgttcatccccatgtgttcctgctactgcttgttgctgttgtcctgttccccacctgtattcccccgtgtcgtccatgtccgcattggttagcgtcaaaatgattgtgccgtcctcgtggtactccgtgctaatccgatccgactccgacaatggcccatagccctggcgcgaccatgcgatggtaggccgcgggttgcccttcactttgcagcgcagcaccgccgtgccgccaattgtggtggtgcacgacttgagcaactccacaaactcgggcggtccgggcgccatctcttccgcgtcgcgaggtgcttaaagcagacaaaatatcctaataatcccaaaattttctaagaatatattaccaatgacgccgagccgcgcctctgtccaaatttggttgccgctggcatcggtggccacgcagcgatagacgccaatgtggtcgaagtgcgcttcgcgatcgaacagcaaccgttgggtgccgtcctgcagttgctccactcgtaacgagtacagctccatcttgttggccaggatggagccgtccttcagccagtccacgcgtttcactgcgctgagtgacgacggctccagctggcattcgaacacgacgccacgcgttcccttggacatctgctggtcgcgtagggttcgacgccagctcaacaacggcgcgtgctcctcttccggctgctcaattagccgctcctccgcgtaccgcagcggtgcctgcgtttgcgcacggcccgtaggattgatcgcctcgcaacggtacacgcccaaatccgaggcagacgcgtgcaggacgcgcaacttttgtgtgccatccgcaagctgttcaatgacgacgttcggctcttggccaggcaagatgggtttgtcgtcgcggtaccagcgaatgtcgggttgcgattcggccacgttcaccttacagctcatctccgccggttcaccctcacgcaccgtcctcggctccagaggacgcacgaacatgggctcagccagctcgaacttgtggtccacctccatctcttccgcgtatttcaacggcgcgctggtctgcgcacggcctgccgcgttgaccgcctcgcagcggtacatgccaatgtcggacttggtggcggactgcacgcgcaaatttaatgtcccatccgcaaggtgttcaatgacaacgttcggctgttggcccggcacaacgagcttttcgtcgtggtaccagcgaatgtccggcttggactcttccgcgttcaccttgcagcacatctccgccgtttcgccctcgcggactgtctgtggctcgagcggcacgaggaacatcggctcggcctgctgctgagcaggctcttcaacgcgctgttggacgccgaagttggcttcggataccgactgtcccgccttgttgaacgctttgcacgtgtacgtgccggcatcctccgcccgtgcgttgtttatggtcagcgagtgccgtccgtcgggctcgtccctgcgcatgatgtgctgtccgtcgatgtgcagcgggtgtccgtccttgaaccagtcaattttcggttccggcttgccatcctccaccaccacactcattgtgccggtgtcgccctcattcacgtcaagcggtctcagctcctggctgaacttcggcacttccaccgcttcaatgacgccaaatttggcttgcgtgaccacttgaccagctgcgttcaccgctttgcacgtgtacgagccggcatctctgggcttggcgttgttgatcaccagcctgtgccggccttggccatcgtcatgctgcacaatgtgt

SEQ ID NO: 9485 - DNA, 887 bp, Heterodera glycines
ccgtgcgtccggctccggttcgcccgcgccggtctcgcgcccctcccccgtttcctccgtccgcacgctgacgtccttcagaggttcggtgaactcgggcttctgcagcgtttcctccgcgcggtccaccgccagttgcgcgtggctgctgtcctggcccactttgttgctgatgcgcacgccgtagtcgcccgcatcttcggccaagcagtcgttgatgatcagcttgtactcgcctgcctcccggtactcgaccacctccaacttgcggccgtccggctgcaaagactcgccgttgcggaaccactgcacgtcgggtggcggctgtcccggcttgccggcgcccagcacccgtacacacatttccgcagtctcgtgctcccggacgcgctgccgtttcagcccgtccacaatgcgtgggcgttcaatgcccggctcagaggcgcgcacagtgcactcggacaccgcttggccaacactgttcttggccaccgcgcggtactgacgaaagtcgctctccaccacgtctttgatcaccatgcgccactgcgtgtgagttgcgtcgtgttggatggacacgcgcgtgccggtcagaatgcggaaactgtcgtgcacagtttggaactcgatggtcggctggggaatgccagtcacgctgcattccaacaccacctggccaccgatctgcgcttcctggtccgacagagtgcgtgtgaactgtggtgcttgggctgcaaaatttaaataattaattcttggttaataattactttgttttgtcaaatagaaatcatttaagtcccaggattggtcactcactctcaatgcgcagcgttgcgctcgtagggggacgtcccagcgcgttctccgctcggcacgtgtacgtc

SEQ ID NO: 9486 - DNA, 1214 bp, Heterodera glycines
caggtgatttcgcttattttgtttccttcggttctattcattatcatatttttttatttccatttcgttcggagaggtcactggcgctatttttttctctttttttgctgtatgaaagattttaaagaggcggtgccattaaccaatgcgatttttccaacaaatttgccaaaatattcaattttgatcaatttaaattggtgaccgacgtaattacaattttcacttcgggcctgtaactgtatcaaaagaagtcgcaatttctattattttaggctgagtgaattcgctgctgaacatctgcaggagaaatcattgacacatatcgacgatttgaatgacgcgcttaaagcgacggccaacgctctgttacgaaaatttgttcaaacggaaagcagtgaactgaaccaagtcagcgaaggcgttcatttctcgtccatttcttcggttcttttgtgtttgaggtggccaagcgcagcattgagctgttcgagtggaacgaatgcgccgactctcctcgaaatattcgccctttggtcaaacatttggtgcattccgtggaagaaattcaccgtgacctttgcgtatttgtgaggatttcgacataagcccataaacatttgactgcttcagatggacgacgggggattggcaaaactgaaagagcgcacttcggactcactgagagggtaacatttttagtctgtcatttcctccgaatgtttggaattagttacgcttcgatgcggcgagcgacgagtgctgcgagcagtgtgttcaacgacgcgtcctccgtcagcagcggagggattgtcgagcgtttgtggggcgacacggagactcccgaagagggggccgggacttcgtcgccagagactttggcgacgatggcgatggaattccgcagagacattgtaagcaaaaataattaaaagaatggcacacttttagtccattgtcagcaattactgttaatttatcgtcaggtcatgggtgccattgttcgtctgatacttcgcgctttttgcgattttgtgcgtgtgcagaaattttcacgacacggttttgagcagctccaagttgactttgcttatgtccgtcaaaagctttggtatttcgtggccgatgagcacatgttgaacacgtgcattgaggacattgtcacggctgcggggtaattttggctaattcaaaaatggattcctttcaatgat

SEQ ID NO: 9487 - DNA, 2146 bp, Heterodera glycines
ggtaattttggctaattcaaaaatggattcctttccttatttctcctgttttgtttcagtgaaccaatgtgcccagcccaaattgttggatccatcggtagttaggagaatttgtgaagaaatgcagtgatctatttgtatgtacaattaaaattaaattaattaattgttcactttgttttttattttgcttacattaaagttgacaaggatttataaatttttgccaaaataattgaatggattaccaaccattttttatatttttagtattttttctgattttaaagttccttcgccttgtgaatttttgctttgacttttttatggagagattgttcaataccccgatttcctccctttctacgaacacatcaaattgcacacgaaacaccatttgtcttggctttttggatgggtccatccaatgtttttcctttgacacacagcgagggatcactccatcgatggaaagttcggtaaaactcggtggaatgtggcgcaaacggatgaaacggtccgtcagggcaatgcaaatttctgaggatggcacttcgctttatgcgaccagttcgaacaggttgcccattccccctcgccccctccccaattgtcagttttgaagggccgtctgtttgtatgacgttgagacggggaagagagtgcgctgtattcgcgaagggcacaaaagtcggcccagtgcgatggcactgctgccgggcgaaagacggcattttgcaacgggtgccgaaaacggcgaagtctgtcgggaagaagtccaatgagacaatgtcacattttaacatagataaaagcatgggactttggacagcccaagccgaacgtgcacacatttggcgagcaggcggacataatcagttgggtgtgccccttttttgtcccctccccagcggaatttagcgaagtttcttaatctggcccattgaatttcctcagatgcgttgcacatttggcgcaataatttgctggccgcgagtggcgacggcactttggccgtttacgacacgcacaaaggcaaagtgcgaattcagtcggagacaatgcacagcgaattgctcagtttggcggtgactgaaaggtttcgtcggttttcaatttgcgaaaaggcatttctgtccatcactgattgtcagattcacttacgtcggagcggccgatggacacattgaagtgttcagcaatggccaatttgggaacatccgcgaacgtatggagacgccctttctgatgggcgtcgagcaaatggtcgtcttgcgcaacaatttgctgctcgccagttcgtccacagctgaagagatgaggtgggtgaccaaaagaaggcattgattggcattggccatggcctttgcttcgtttaggtttctgcacgtcaatccgaacaaaactttgtgcggcatttcgcgtcccggcggagtggacattttggcgaaaacgacggacggatcactggtggtcacaacgagtggggacgggacgaggctgaactgctattcggcggaggaactcgtcaaggacattccgatgctaacggcgcagggcatgagagcatttaaaagcagacagagggaggagaggaagcggaagagggcgaacacaacggacacattttttgaggatttattgagtgactcgcaaaggagggatgaggaagacgaaggagaggaagaaagaggagacgaaagagaggaagaaagtgatgaccatggcacattgatatgactgtgatggtgggaaagggccgcactaattgttgctgctccttggttatggtgttgttgcttcagtttgctattcaacaattgatgcccatattgtcttactttcaagtaaattgaattacgcccccccccccctttgatagttttttacatcatattgtgccacttacaaaggagagtgttcgggtgatggtggaacttccaaatgaaactttgtaggtgggtagaccacccctgggttgtattgccaaattttttttctagctgcggaataagcttctgtgccgagatatgaggctttaaatatttaataattatattatattaaatttaaaaggagaagcaacaagcgaccggttggcaggttggtaggagtcacgatttcatttatgtaatggaaagttcga

SEQ ID NO: 9488 - DNA, 1321 bp, Heterodera glycines
tgcagttggtgtattcgcttacgctttccgatgctctttcttccggcgcctttcccttttcctcctctcggccacgttttgtcccttttctgctcgtcccctttgccaacacgtgtccttcaccatccgttcgagatgagtgagtgagttcggaattcttacgtaattggattcggcggggtcgaaccagttggtctaaaacatgacaattcttcgggattgccatctcgcggtgggcaattctttcatccgttgcccgccttcccgccgatgtctatggacctttccaattcgtcgatatccccgcttttcgtaaaatttaagcagcggtgtcatcggcggatggacgacgtctttcaccggctcgggaatgccgtgggcgtccaaaatcatttcgcacacattccaacgattgacggcgtattcttccgcgacttgtaacatctgcgtgccaatgccccacccgtgagcatcgacgcgcgtggcaaatggcccaatttgggcgaaggggccattgtcctttgtgttcccttgggagttcaacttcactctgatgcagcccataagtcgcgcaccaccgtttgaactcctttataaattgtcatttatcaaaatttcataaatttcgatggattaaaatttttattttttcgcattgtgtccaaaatgcaacggttgacgctttaccctgcatctgttagtgccgtcgtttcggcaactatcagcgccccgtcctcctccgctttgaatttgctcagtgccatccgcgtcctttccaacggcacttttttcatttgcttacattgctccggcgtggcatgctttatctttagacaatcctgcagataggattcctgaatgatctcggccgtttcgtcaatgtcttcgtcacggattaggcgaattatgacttcgtccttttggttgcgcggtttaaatcttttgagagtttcttaaaattaaatttttaaaaatatatttttcaaatttattaattaccagggattccttttttatgtaaatacatatttttttcctggcttctccatagagaatggcaaatcaacctttttattagtttttgcggggtatcaatttaaatgttgatatttaattaaatcaactaacattatgccatcaacgcaaatatcaacgtaatttttaaaatttgcgaaaattttttaaaatttatatgagcggtttataattttagtgcgagagataacgcaaaaatgagagagtgctggatctcagtcccagtcatacaaaacatttttgaaagaggaggtagagaaaacaatttcaatagagagcgcaatgg

SEQ ID NO: 9489 - DNA, 2294 bp, Heterodera glycines
attcgaaagcttaatatatttagaaactttttctaagctattgcttcgcgattagacaaataccaaaaaagttatacatgaaaattgcgaaaaactcgaaattttgaagttttttcttaataaaaatttttccaggcttgaattttcgctttttgtaagactaatagagcatgttaagagctttcgatgataccaagattgttggatttggataacaaataaaaaagctatattggaaaaacgtgctggcgcccaaccgtgggcgcccaaccgtgagcgcccaactgacgggttccgtaagcaataaataaataaatgattattttttatgagaatttgaccattttaaatggcgagacggaggaagtgaaagtgccgattaattgggcaaattatcgaacagtttctcctttctctccaatgcttcttgttttgttttgtttgtcatgagtttaattaaataatttgttgtataaggaaatgcgtaactttggcacttccgcagagaattctgaggaagtccggcaaagagcaaagccaaggcattcattattcacgtgaactccaaaatttaagatagacaaaatattattataattaatccaacattaatattaaataatttattaattttttgacaatttattattgtcacaaataattagtggtttaattaaatttaattaaataaatgtaatgtaattaattttggagaacacaaaattatttctgattgtaggaattttcagggttatacttagaataaatgagagaatttaagtgaataatgatgaaaatgattatttgttttatgtgcgtttcgaatttaaaaatgcactttaaataaattaagcattttagataattttaaaaagtctcaaacacccaataactttgctcaaatacttaatatcattcaataattttatttatctgttctctatttgtttttaaaatttcaaatacttagtaatttctaatttcatcaagttataaaaagttatacaaaaacttttttgggctttgttgcaaatagttttttagaatttggaagtttgatgattaatgaagtaacttatgataaaaaacggaaaaaaacgacagtcaataaagaaaagaatcgaggaggccgtccttaaaagctgagaagcccaagtacacttcaattactgattgatcagcaattgttcacagtccacagactccaaattcaatttttttttcaaaaaattattatatcgaataatatgaaattcttctactcgacaatttcttttctactacatatttattaataaagaaaattacaatttaaaaaatgcgcaaggaaatttttctctaattgattttctaattaatttcctttttgcttaattcttttgttggacaatgagtggtcatctaaatttgatttttaattgataaatgataatataaacaataaccattaattaccattttctagtaacagtgacgtccgcaggttgcctgtgtttgaggattcaataaatgcaaatttaaagcgaaacactgaccgatttgacgttgacctgcttggccgggttgccgtcaacgcccacttggacccaataaggtgcgaagtacggtttgcaggtgcactgcaaaatgactgtgactttgttgaacggtgagacggaagacgaaacgacggagttggggtcattgttgagcttgaaaaagtgaataatacggtccaggtaatcatcataatcataattaattatgtatgtgattcatgggttggaatttcattattacccaccttcatgaagagcactttgccggtgtttggagcggcgcacgtgacatttttgaagacgcacttcccaaccgggtaagggtcgctttgataaggcggctgaagcggggaatagtcgcaatccttcccagaagtgtggcagtcgacagggtagtcacagccataacaacacggaggtgctagaaaaaatcttacaaattgtacaagctaaaacaaacgttttggagttgttggaacagtgtaggtctttgtagaggaagttccggcagtgctgggtccaggcggtccgggcgtttcagtgctgggtccaggcggtccgggcgtttcagtgctgggtccaggcggtccgggcgtttcagtgctgggtccaggcggtccgggcgtttcagtgctgggtccaggcggtccgggcgttttagtgctgggtccaggcggtccgggcgttttagtgctgggtccaggcggtccgggagttttagtgctgggtccaggcggtccgggcgttttagtgctg

SEQ ID NO: 9490 - DNA, 3524 bp, Heterodera glycines
  unsure (1)..(3524): unsure at all n locations
caaatatcctcaaaaagaaaaatgaaaatcaaaaaaaaaattttgtatttttttttagaattttttcatcttatcttatttttccaaatttattaaaaaaaagttttttttaatttaatttataggaatggatttggtagtttttaattatttattttatttacttcaaatgtcctctaaaaattcaataaaaaataataaaatttccattttttgaatctttttatttccattttttgaaatatttgtaaaaaaaggtagacttaattttctattaagttagctaaatgaaatcccatcatttttttgtttgtttttttttggtcaaaaagtgtcgttttggcaacaatttaatataccaataaaaaaataagttctataaacccattttttattttatttttcaatatttcgcaaacagaattcacattaaaattgttcgattttttccacacaaaaaacattgtttaagccgcttttaccctaagaaaatcaaagtgtgtgaataggatgggattggtggtggtgatctgttgggcggtgtaaaaatttggtgcacttaacacttactgacagccagatcagccaacagaaaagaaaagttagccagcccaacaacacccaacgtccagcaacaccaccaccaccactttctttctttcccgtgaccattccattcattcattctttcccccaacttcccccccccccgcacattcattcattttcattatttgtgacgaaagaatgtttggacgggaagatgtaggaattgtgggtggggggatgaagcataaaattggaggaggaggaggaggggagaagaagcataagcatttggggctgctaaagcagtgggcggatgttggaggggaaggcagggggaaaagcggctggcagcaagcgattggtggagaaaaaagaggcgtagaacaattctgatcagtccgtcttccgcttccactctccaccttcgactgctgctgctttttacccacctctaccacagagaagcataaaaattggggagctgaggggcatagacgcagaaacaatccgctgatcaacaaatgcccccacccccggggggggagaagaaaaacggaatttttgggggtaaaaagcagacatttctcccccgcctcgcccccacatcccaacccatcaatcggcacacccttctcgccgccgatcggtcggatggatcaacgaatgaatgaatgcactctttgaaaatgaaagtgaatgcggaaaaattattgtttaggaatgtaaatttttttgttggttagaaaaaaagaaattaagaattttaattaaaaaaacggtggagaaaattactaatttattcatgtactgaaaattaatctcggataaggcataatataacataaatatatcaaattaaaaaccccatgaaagaattatttaaaattattttggtgtgaaaacattgtaaaaaaatattttaaaaatatgactaattaatggtttgaatgaatcacgtttttaattgcttaaaattctttattaaaaaattccgagaaaggaattcggcgtaatctctcccgcaaaacaaacaaattttttgatttgaacctccgcaacgcatacctaattgattttttccgctctttaatgattcattataaaatttataacttttaaataataaagaaataatttttattaaaaaattaacattaacttgaggaaattaaaggaaattagagagaatatcgattgtgatggaaaagtggtgaaatttgtgagaataggcaaaacatttcgcgcaatcattgtgaaaattgtgtgatttgatgtgaatgtgatgacaaaaacagcgtacatttttcctatttgcactttttggtctttaaacaaacaccgaaaaaattaacagcggcggctcacagaagaaagagagttaaattgaattttgttttagaaatttatcaaattaaactgtaaaaaaaaattataattttttgatttgattattagggaccgttagattaatttattagagctcggcattttgaaattctcgacaagtatttggttgaatacaagtatcaggaagagttattttttgaaataaaattatgtaatttaggaacaaatattgattatgattaaattagattaaaaatagatatataaaattattttttattttttacaatacaaaaaatacattgatttgataaaacctaagagttggtcacagttttttaacataatttttttaagaatacacaggccatggtcataagtgttgtcccatcatgctttgaaaaaaataattgcgtataaaattgtcattttccaatttcaacagataagtagcataccattggatagcattttttatgggctttccaatgataccatatttgcatttgtgacataaacatttatttgatttattttaccatattcacaatttgatcaaaatataggtggtcaaaagtgttgtcccatttcatttttaaaatattgcttctctggatcagcattaaaaaaatctaaaaaaattcaggtaagctttaggcccgctgagatacgtcgacttttatttcggtgcctataaaaagtactgtatttcttaagaaaatagtgcattttacactacgtcaaaattgaagtgcccatacctcagccggtataagtaatagagacatgcggttttttgaatattgtagagaattttgtgctctataaaatgggcctactcaaaatttccagaaaaattttcccaaccccctagaaatttttttttgaaatttacccctcgttcccagccaaaatgggctgatcagatcaccatgaaggagtgatctgatcaacttggtgttgctaccttttttgatcagcatccaaagttatgcttacctgaatttttttagattttttaatgctgatccagagaagcaatattttaaaaatgaaatgggacaacacttttgaccacctatattttgatcaaattgtgaatatggtaaaataaatcaaataaatgtttatgtcacaaatgcaaatatggtatcattggaaagcccataaaaaatgctatccaatggtatgctacttatctgttgaaattggaaaatgacaattttatacgcaattatttttttcaaagcatgatgggacaacacttatgaccatgactgtatgtagtaaagcatatttggctttagaagatattataatcttagcactgataatatccaatatttttaataattcaggaactctgggtcatttgaataatcattttaaaatgattctaaaaatcaaaaaataactttcttgctaacttttttgttttcaggcttataaaaaaaattattatggtattttcgaatgatataaacaaagacgaatttttctcgaaaaatttgaaaattcgcaatttttacaagtcttcgnctcttatgtcttgtgatcactgatcatccatatattatgtcactaggagagtctacacatttttgttctgaattgtccttagagtaagt

SEQ ID NO: 9491 - DNA, 1472 bp, Heterodera glycines
  unsure (1)..(1472): unsure at all n locations
caatgacatttatttactcctccnggtagaaaatttaattattttggataataatttgtcaataacactaagcatatgcaaaaaaattgttataatattatataaaaaattctgctttttagaaaaattttatgaaaaaattgttagacatttataaataagaattcattttttaataaatatatttcttctctaatgaacatcaaattattaattaaagtaggaaattaaaaaaatatattttttgactaaatgaaaatttatctattaatatttctgaatttatttttggtgcccctaattgaccaaattgaaaaaaagtaaaaattaagcaaaaaggaagaaaatatttagcaaaagaaagaaataaaattatgccgaaattagtaagaaaattgacgcaagttatgatattattatgagatggaagaaacaatttgaataagaattgttataggataaataaagtgcttttgatttgtttaagtgcataattatatatttaagtgactaattaggtcaccaaaattcacaaataattaactaattaccactgttaggatttatatatgcaaaaaaaaaccccaaaaatacaaaaaatatttgccaaaaatttaaaaaactgctcaataaattcttgaatttctcaaaattttttccaaaaacagttgcaaaaaaaaactttttaatgtgctgctgaattaagtgctcatgtttagttaggcaaaattctaaaataagtgactaattaattaccagggttatgatttatatttgctaaacacctcaaaaaggcaaataattttgccaaaaaaccctaaaacaatgctaaaaattccaaaaaatatttgttaaaaatttaaaaaacgtctcaataaatacgtgagtttctcaaaaaccattcttcataagggtgggatttttatgtgctaaagattctgaaatatgtaataaaatatattcttaaaaaatgctgaattatgtgctaaaaacccccaaaaaatgccaaaatatgtgctaaaatatgtgttaaaaattggcaaaatatagcgtatttttacataaaaattccaaaaaatctctcatttttggccgcgcaatcgcaaatcaaatacatttcaaagtgttagaaagtaaaatttgtttttttttctctgataaattattttataaatttaaagttccatctggcaacttcgaatacagtatacggtaaaattgccgaatacggtatcggctcaaaatcgcacaaaaacacttttataggttttcttaggtgctgagaacgagagaaaagcttaaaattgagcgcggaaaagcatttaaaccggtttaaaactcgaaaatttgaatgaaaaagagggctcctgaccttttaaaacggtcaaattcggacaaatttgggatcattcgaaagctcttgatgagctatcgctacaagacaagggataaactcgaaacaatgccatcta

SEQ ID NO: 9492 - DNA, 3864 bp, Heterodera glycines
atgaacaaattattaattaatccttcgcttttactttcgtttcggcattgcatgtttgtacgggtctttccataatggcacttcctcccccttttcgtcccttttgcttgcggcgtccaaattctgttcaagaacacgagaaaaatgaaaagacgacacttcaattgtctgaggatttgcgaggcttttgcgaatcgcgcggcgataacaaaacgaaaacatgctaatgaatgccgcaaattacgaaaaaattaatgcttttggaaataaatgttttgatttaaacgattcgtaataagaaattgaaagcagaagtctgtctttcaaaacaattaaaaaattaatgagtttccgtcttttatcaccacccttcgcccgtcgatgttcggctgttcacaaattcctgaatcagctgcatgagttctctcttcacttcatccggcacaattcgacgcgaggcatccttcagctcgtcaaccatcgcttgcagttcaacgcgttcatagccctaataagaaaccatttattcgtaggtgtaatttccaaaacaggaaagtttatttaaaacaataacccacgcggccttattcaccttcgctaccttcttcgcgatgtactcctcgcacatgctctccactcgtttcgcccaccccgactcgtgaagtcgtcgttccacaacctcttggacccggtctttctcaccactctccacaaattccttctccaagtcttcttttcgttgcaattttttcaaaggatttaaaaatgaacgtgccgatgatccttgcattatgacaaaaaaaaaatggaaaatcgctttaatttctcacataagcatttgtccaagtatgtttaaattaccaaatttaattaaatggaaggaataaaaaagccatcaaaaccaattagatattaaaagcagagaacatataaaactacataaaaatgaggaagacatgaaagtccaccaaaggaaaagaaaacataagaacgaatatcatggtttttctcattatcaaaagggtccagatcagatcaatcattgttttgcaatcactgatcaatatggtctcggtcgttcagcaaatccccctcctccaccgccttcgtacccacgcataggtccccctccgccagggaagccgccagggggcggcccaccaaatgcacctggcggcggaccaccattttgcggccctttcggcgcatggcacgagttgcactccttacgaaacgcgaaattgatgtttccgcagcttaaaacgaacaaatgtgtcaagaaaagtaaggaaataaacagaataaaatcctacgggcagctccagtcgccctgacgcatttccaagccgcccctcccacgaccaccgccgcctcctcctcgtccaccacggtcaccacgagcacccattcctccgcggccacggccaccatcccctctgctacgaccacctcccggggtgaatccgccatcttttattaatacgtgttaaacaccgtcattagatttccacagttcaccttcaaatccaccaccgtctcgcggcggcccacgacctccgcttccgccaccgccatcacgacggaagtcacgaccaccaccgaaacctgagactaaataggaaaggacaaatcatcgaaaagtaccgccgccgcctcctcctcgtcctccgccccctccgaagcgtgacccgcctccgcctcgaccacctcccccgcggcctccaccaccgccaccgaatttggcaaaagaaatgtccatcacattgtccgtgccaggaaagggttgtcctatgcaattcgttgcacaaatgtgagaaaggcttacaattagccgctgtctcaccattgtatgtgtccatcacgcgctgtgcaaccgccgtatcgcggaaagtgatggtgcactcgccttttgactgtcccccttccttgtaaattcgtatctttgggccaccattctggtcagtttcaacatctccttgctgcatactgaacacatcatgaatgaattgttcgttgacactgtcaagagacaaataaaggcaaacattcctttcttcactgactgttgcggaagtcccgagaagaagaggatgtttttgctctcgaagccaccttctttcacccacctccacggcttctctcctgtctcattgggcctccgccggacgatcgccggtcaaacccaccgtcaccgccacctgaagggctagtagttgaacaagtttttcaaacaaaaaagcaagacacatataactcgttttcaaattttcccaatttattttcctttttattggaccgttaaatgtcaatattcatgcttattaccaatccctgtactttatttaaaatacacagtcaattgttctgctaaaatataataaaatccacgcaataaaagcgaataaaatgtccgccaaaacaccgacgtattggaccagggaaattttttaaaagataataaataatctccaccagtcctcattagataaaagtttgtaagttacgagacaagcaaagcgttgagttgcaaatacctcgataaccagcttgaccgcccggtggaccgctattataatcaccgggtctgaatggacagatgaatcattcagtcattacacacatagcacaattgtctcctccaccctcctccctttcctccactccttctttgataccaccgtaaaaatccttcgaaataaaacttgccctcctcgaaagaggagcaaaccgttcattaattgggaatgttcaattagaaaaattcttataccatttctgcaaaaataaaaatgactacttcaacatttcaattgtgcagaaagaccaattagtttaagtttattacgacaaataacccaaagaaaaagagagaaatcaaatatttttaatatattcaagcagaaaatttgaataattaattttgttggaaccaatgagattttcaaagataagaaaccatcgctataattgagaaccaatgcattcaacaaattcagaggttttgttataattaatacttaaaacataatacagggcgttcattctgcacaatgtccttttcccaatcgaaatgttagtgtttcgcttcctttgtaacttagagaaattaaatagaccaacatataattgtactcgtttggtctatttttatcactcaattccccaaatttttgcgcagttttcaccttctgctgaattgccgttcactcccaccgccgctccagcgactttgactgcccccgccgcgttgaaagcccccaccgcgcggcgtttgttgcccgtacggcggtggcccgcccatgaacgaattcaatggcgctggtggtccgcgctgttggggagggcctccactggcggcccatgctccaccaactggggcggccatttgttgcacttgcggtggttgaggcggtggaaagacaggcgcattcgaagcgggacggccaacataagcactggcgagcggttgaggcgcagcagcgggcggcaccgtgccggggaccggctggtcaaaataggctttatatgtcccaccaacctaaaaacgattatggaaatggacaatgtttgaacaaagtaattgtgcctcttgtccggtatgttgttgaatgttctgcaccggttgttgtccagccccagtctgtgcataatactgctgccatgcctcatattgtttctgtgccagcttaaccaactaccattctgatgattcaaatgtcagtgttcagttacctgtgggtcaaacgatgttgcgccctgaacatttgggtcgccagcattgtaagcataatgcgctaaaagaaaggttcatatctttaagagatatgtgaaagtacctgtcggaaaaccagaaaattctttttt

SEQ ID NO: 9493 - DNA, 2982 bp, Heterodera glycines
  unsure (1)..(2982): unsure at all n locations
agaatgtctttagcttaaaactagagaaactagcaagaagaagaagttgatggagaaaggcagcagcagcgcataattggaaaagaaaatgaagaacaaaacgccataaaatttttagaaggactttgaagatttgatatagagtggacaagttgggacctccaaaaaatttggagactattcaaaaaaaaggacaattgtttcaatttttttcattttaatgtattaaaatataataaaatggtttagttttgtgttcattttcctttttgtaataatgagtgcatcacgtgaaataattgcaacacatggcaaggaaattacggctgacgatcattttcgaagtgcaaatggcgccaaagaattcttcaagcgcaaagaccgatcaaaatcatatgaaatgaacaacgtaaaacggttttaaatacaaatctctcacgacttctgctgcaggtttcgggtgtgaggacaatctcgtggaatgcgagtggaacttatttggcgagtggttccgacaacagagtcgtttctgtcgggagtttggacccacattcttgtcgattggtcagtttattgttaattcaaaaaccattatgtatttgtcactcagaaagtttagaagcaaatatttgttggctatggtcacgaagacatcgttgaagcgattgaatttgcaaaacgcgatgaaatggtttctattatataattgtaaaaagaggggggggggggggcaactaacagaaactttttgcatacggaatgaaatccgctattaatcgagtcatgttaaatattttttccaagaaaatggcttcatgttcaagtgacaagtctgtgcgtctttgggaccttcgaaatccgagtagtcacaccaaactctcaacgccaggtataaacaaacaatatgattgcctaaaatttcaaataaatctttaaagttaacacgttttctttttaaatttagttgaaaaagctaacatcatacaaaagggttttagtaaaacgtataaataaaacattcaaacaaaacaaatatcttcgcaaattgcttctaaaagaaattacgaagatggcaaagcaataaaaagtccatttttatcagcttaatatttgacctgaactttttacaggcgcaaatctttttgtgacgtggtcctactgcgataatttcattatctttggcgacaaatctgataatttgggcgttattgatgcgcgcgctatgaagacactggaactattcacattcaaaggtcaattactccataccaaattgttccaaacaattttaaactcaaaaattctgaaggggaagttttttggctcttgtcgatgttttgcgtccaatcgaattacttttatgtaaaaaagaaaagaaacaaaatgtttgtatattaatataaaatacctattgggacacataatatcgacaagagcttttataaattttctattttttattgttagcttaaaaactggcttttccagatgaaattaacgagttcgtttgtcacccaaatgggcagctgattttcgtggccaccgacctcggaaaattggaagttcttaggtggattttgttgccgtttcaacccttccataattttcaaaattgtccattttccgcttgccgaagctgaaacgcgttcgaactgtccaggcccacccgcccctttcgacttgcattagtgtcgccctttcccccaacgaaaggtttttggtggtcggtgcttcggacgcctgctgttccgtgtgggacattaacgatttaatatgcgtccaaacactgaccaggtaattagcactgccaaaaaagtttaactgaattaattaaggctcgattatccggtgcgcagtgtttccttcagtcattgcagcaatttgatcgcttcgggcagtgaagaccgagtgatcgacatttcgtggactccgactggcgaaaagtgcgcactttcgaaaaacgcttatacattttcaaatattcaaattagagtcgccgaagttccgatcgccaccgaatgttatgacgtcgcctggcatcctcggctttatcttttagcatatgcaatcagtggaggattgaatgacaacagaagtgatcggagtgatcagtcaaccctcagagtttttggttactctggaggcatttaactctacagaatcatttaaaaacattgctattgtcaattttattaagtaaaaatcctttattttaagaaaaaaggatttgagattctcatgagataaaaattttaagaaaaattttttattttgcttttaattattttatgaaaatccagaaaaggtgcgaaaaagcatgtcgaattcttcatatttccattttgtttttgattagcaatttcaaatttcttctgtttggttgagtcgaagcggcgtactcttagagcaatttgcgacaaaagaagttcgttcagttatcgcttttgtccgaccattccctctcaccactgccgccccggacgacgccagccgaattctgaatttgttccctaaattttccttttaaaattcagaaaccgacttgtattatgttcaaaaatgctcaagacgaaacttatgacagatttattattagtatagtattgtattattattattattgttcagcgattttgaaaatccaatgaattaataactattctacataatcaaacattgttcttagcattaccgtcttgagcattctgaagtgtataaaaattgtttttgaattttaaaaagtacatttangcgttttatgtccaattttacttctctcgcaattgtccatccttcacatatactgtattgtactgtattcattgatcaccttacaacatagcaaccaattacctattntatttatacaaatgctcaattttcccagaatatattcctgatgcgctgttactgtcgggagggctctcaaaaaatttttactttacctaaattgtgcaaaaaaatttttctagaaatactaca

SEQ ID NO: 9494 - DNA, 4268 bp, Heterodera glycines
  unsure (1)..(4268): unsure at all n locations
caatccgtccctttttcaccttttgtccgtttcagtttcaaattcatccccggagggagtttctccccccccncaataataccattgccattttcactctcggatttgtccctcgaggcgcaattaaattttctgtgtcttttcgctgttttattgtgncacccccttcctcctccccccccccccccccccccgccggcagatgtgtcgttgtcccaattaaaatttgccagtccattgggtcaatgctttcatccgcgtcaaatctgacagtgactggcatttgatcagtgagtgttgttgaaaggtgtcggaaaaaaaaacaaatgtatttgttaatgacagggaggataccctaaaatgacgacacaaataagtaaatttatcaaaacatttttaaatttaaaatattttactgttttttattttaatgaaaaaattcacaaatatattgtaaaggttatgaactcattttttcaatggattatgcaattcgacagctccgcctcgcactgatcacttcgcttgggggggggggcgatgggacggcggataatccggggacaatccgccacaatctccagcaaaacaattaaaatggtggtaaaacaactcaaagggtcgcaattgtctcctcgttgcgagtgtttatgggcacattttgcaaattgcattttggccaaatttagtggcaattaaatatttttgttgaattttttaaaaatattttcattattccaccaaaaatgcttttcttcccaccgccgacttcagcagcagcggcggatttgctggttgacccggcgattgacggattattacttaacggagtgataatgccaaagccaagcgaattggaacaagcgcagagaaatcatcaggtcagagtggccaaaagaggaaaacaattcaaaaggggctaatcaattttaaaaattgttaattggcgattaatatttgcaaatgttgaggctgaacagctccaacgccaattagccatcatgggacagcaacttcagcagcaaatgccaatgcgcggaagagaactgtcgccgacgcagccaaatgtgccaagtttaatcggcccattcagcggactgttaacaaccgcgcaaattgatgaaattgaacaaatcggaagcgacaaaggcaccgacatgcaaatgctgaccccggcaaattgcctaatgccggtgagattgtccacttattaaattggttcgaatgtttgccctgattaagccaatcgtcggtctttcgccaatcccttcggtgtcatttggcaacacattcactcaattaactccgccgatcggactacagcagcgtcaacaaccgattgaccacattcagccgaatttgctgcttcattcaccaggcaaaataatttattttgtgaatattccgtttcgttttctgagcttttcccccttttcggctttctctgttccgcgtgccatcggccaattttggatcagagttttttgctggtggatgaccaaaagtggcactctgagtgctgtgtttgtgtgatttgtggccaaaatttggaaaaggatgggcccacctgtttcgtgcgcgatggctttttgttttgtcaccgcgattactttgcgtaagtaactcaaatattttaaaaattgaatcgctttttaagtaaatatggtaaaccctgcgatcggtgcggcattccaatcgcaaggggagaattggtgatgaaagtgccccaaaatggaaactccgaccaaaaatcgctgttattccacgtccattgtgagtgaattcttttttatctttgatcatttttgaattgtttgcttttcgttaggcttctcctgtgtttgttgtggccaaatgctttctcctggccaacaatttaccgttggaatttcgggtcaaccgagcggggctttgttctgtgatggtgagaacgatttggatattggaattttataatccatcctcattttagcacatttccatttgaatccttcgctttcccttggccaattttcgcataaaatgagcgacgaagaacaagtaactctgaagaacttcgaatttttgaataattttttcggaatcagctccattttttgaccgatctttgctcttccaatttggggggccacggccaacaaacgaatcgcaaagttttcgagcaactttcgactggcgtaatttcgccgaataatagccaaaccgacagccgatattcttttgcggaatcgagcaaggaaaacccaggtaaattgcaaaaaatttgattaaggaatatttgaaatccttaatgcaccttgaaatttgatctttgcggaataatgagattgtgatcataaatacggtggcgaaagaacaaataaatcggagagagaagcgggggaggggggggggggggtgttgaatggcacggcacaatgtttgatttgcataaataagggggaaagggataaatattgggaaaaagcaatgcccgaaatccatcaaattactaatagcccaacaaaataaaaatttaattactctttatttaaaccaaaagtttcgcttgaccaattcgttattttatcgtacctcggttaattggcattgtttgtcatcccatttcacatgaggcaaaagcgggaaaatggcgcggatggcattggcatgggaaaggaagaaaaatgagagaatgtgaaatggggagaaaaggggaagggaatggagagaaagggatagaaaatggaagagaaggaagagaacgggggaaagagggaaagggagagaaaacggaaggagagagatagagaaaagggaaagaaagagaaataaaatgagagagaaagagagggaaaagggaaaggagagaaaaagggataaaagaatgaaagagagagaaaagggaaagagagagaaagagagagaaaaggagagagaaagcgaggaaaaaggaaaggagagaaaaaggaaaaaagaaggaaagggagtgaaaagggaaagagagagagaaaaggggagagaaagagagaggaaagagggagaaaaggaagagaaggggagaggagagaaaaggagaaaaaggaagtcgcaatttacaaaagccaatgccattttaggagcaattcaaaaagggaaaatattgtactatatataaatgatcaaatgtgaagtctttccatccactcttctcttaagtgtgccctttttgctttttctcagattcgcttcatctttcttctccttcagtgactccgaatggcaccgacgcattttgcgccgggcgaaacggagggggcagctctaatggaggcgaaacgccgggcgcaatgggcgcaaatgggcggcaaaaacggatgaggacaagcttcaaacatcaccaggcaaatgaatgaatggccaattggccactcgtcaatttggccaattaatttggccaatgaaagatctttggctattttttacttaccaaattcaaggaaatattgaaaatgcaaagcctttagcttcggacgatgaaaaactatttcgcctgtaaccacaacccggacgcgaaggatttgaagcagctttcccaaaagacggggctcaccaaaagggtactccaagtttggtttcaggtcaaactcatcccattggcgttgttttcacctttcttcttcagaatgcccgtgccaaacatcggcggaatcagcaaattcgcggggaagtggcggcggcaatgaacggcacaaatccgtcgctgaccacggcaatgtccggggtgcatgtccacgcttctctatccacctctgtcgagtgtggcggaggagccattaatggtggtggatacaggcaaaatgtgagaggggagcaggcaaaaatagaaaaaagtgccaaaaatgacaaaatatctcaaagtacaaattgcaaagtgtgccatagatggaaaaacgctggaggagagaaagccaaaacttagtaaaaattctttgattaattaaaaatgctttgcttttggccattcattccttttgttttgcttctttctcacttttcgtcccttttcagcgctctcttccgccgcctctttccgtcactgaccatcccccgccggtgccaatgtttgtcgccggctcaaaagtcaattcggctgtccaaagtccgtccgcttcggttggtccgcgttccttgggcacttcgtccgcttcttccttttcgtcgaccgaagaaaggggcgggggatcatttgagaacgaagccaactgaaagtgaacagaaaaatggcgcaaaaaatacgaaaaacgaaa

SEQ ID NO: 9495 - DNA, 1172 bp, Heterodera glycines
aaattgagcaaaacattacggtggctgtgcgaagccgcgaaaatgagggatttgtgagggcattggcaatggtcaattttgtgacgacagtggccacctttttctgtggaatgtaccaaattaggggctttccaactttttcattattttccagtggcatttgccgtcaaatttggaagcgcggcgaaacggccgacatcaaagcgtactcctttctgcttggtgttttgggcagcagctattggttcacgtacggagtgctgttgcagcacccgttgattcagtacgtcaacgcgtgccaattcgtaatttactcggcttacaccgccttttattggacaatgagcacgaaaaaggttggaacattcgcaaaatctgctgcattttttttttattattttcaaaacacagcgtccggaaactgagctcctgtaccaaaaaagatttgcatgtgtggctcagtggtttttgtaagatagtaaagggacaaaggcagggggttcgagtccgttgtgcaacatgaatatttttatttatttttgtccaaaaaatttaaaaacacaattttcggaaattatttttggaggtttttgccaaccaaattgcacattcttggtatctttcgaaagttcttgatgagtagaagcttttcccaagcaaatgctaagcatttttataagtttgaaaaaagatataagcgtttgaaattttattttttgaataattttagatcggagcgtaaaaaattaaaactcgagcgttaaaaatattcataatatttttctctatcgatatgcaaaatttggtgtaattgtatggttagaaaaaaggttatatggagagaagtaaatgttgtttttgctaataataaaaatattagatagtacgccaaaaggagacaaaaaattagagaaaaaaagataatgtttttctctggcactctctatttattggtacacatctcgttttttcggacggtgtgaaaagaaataatttttaaggtaaaatctaagtgatcagttgatgatttttattttattattttatttgttataacttatactgttaattaaattagtccatcaatttgtatcagtccttttgtgcctgatcagtcctctctttccttttgtgtctgatcagtcttccctttgctttagtgtctgatcagt

SEQ ID NO: 9496 - DNA, 2338 bp, Heterodera glycines
  unsure (1)..(2338): unsure at all n locations
ttccccccccccccccgtgccaaattgtccgtgccgccgccgcttttcacccactttttgatcgctcatttgcgatatgttgttgtgccggaatttcatctcgtacactcggatcactttcacaatcgttttcaacgtttgtttgctgagcacgggcggaagcggcttccgaaactttctcttctttccgccgcttccgctgttgcccgtttcaaagaaatacataaatccatcaaattcatttaattcatttgcagcagattcggccaattcggagagaaactgttaaatgattaaaaccaataaatggatctgaaaatctctcgaggatgtgtgcatgcatttaaatagagaattttctttttaaataatttaaaaataaaaatactgaaatttgttcgctcagcacaaaattaccgtatttacggtatttgaacccccggggttctatttttcagcccccctcgaaaggggggttctaattcggggggggggggcgttcaaataccgtgaatacggtatatgcctttttaaacttttgaaaatatagtaataatttttaataattcaatcgataaattatgtctctaatgtaaacgtatttgttagccaaattatttttattactcgttttctccacttgaacacactcgccagtccaatggtgaggaatttggtgatttgcagacttttgtcaaatgtttgaataaaaatgttcaaattaaagtggtgggactctttgtcgaacaaattgttgttgtgctgatcagcgaaaaagtgatcaaaaaatgcatttgtctccccaatgacgccagttggcgttttgtcattcgccgaaattttggcaatttgctcagtttcactgccaactctttgatttggatggattgtccggtcatttttggcgatgggacgttgttggtcctttgtcttgataactttgacatctgaattttaaaattaaattattattactatatttttaaaatttaaattaattacagatggaaataaattccaaatgtgcagccggcctaatgatgattatggcctggaattatatgcacatgcatatttttttttcctgaactgcaggaggcctgaaacgtacgaaaaacatgtttttagctcggcttaaagcttctaggatgactttccatatgcatattttgcatatttgtgcatatttcacgatttatgcatattttggcatttcatgcatattttttgtgcatatttgagcattaaaaaacctctattagaacggcccccatcagctaaattagcctttttttacctctaaagcctggaaaattttccgaaaaatcattttttagccaaattttctaaaaaaaaattgcaaaaattaaatttttcttaaaaatttgtaaatttatgtcaaaaatttaaaaaaagcgaaaatttcgctttttgggttgatttttagctaaaaattcgtcaatcttagctttataatgtttttttcatctaaaatgatttttaataccatatttgaccacttttaaaagttttaccttacatttagcgaatttgaagaaattttaagaaattataccctcaatttggagaaatttatgtgcatatttttcactttttatgtgcatattttgcaatttttggtgcatataattccgagccctaatgatgatgaaacgaacttcgaatttgtaatataggcaaatgcttttaaaatcatgaacccatttttaattggtatgggtcgcatttttaaattaaaactagagaccggacgggattgggataccgctggattttttcggaatccagcgggattaaatttgggattcgtcccgatcgttctttcaaaatcgtcgggattgatcgggattcggtcgggatcaagactcgggatcctccgaccccagttgtccggtctctaattaaaactgatagattaagttggcatttttcccaatgttcattaaaataaacaaatttcgaagtttggattagtgccaaagtgtcaaatccaattctgatcattccgctcacagccccacctttgacgcccagtgaatattcctgccgaaaactctcaatggaaatgccgtcgaaaaatgcgtcaacaattgccatgacgtaacgcattgaaatgtcctcgagctgtttgaagaactcgtacagcggctccttctgttccggcacgcgcttccaccagccctcaaactgtgccaacattttctctttgattttcttgtaaattgtctcgangtccaaatgtggcgaaggctctcaaaactaaaataaaactttccgtaaaatttttaagattatgctctgtaacaaaatataaact

SEQ ID NO: 9497 - DNA, 1899 bp, Heterodera glycines
  unsure (1)..(1899): unsure at all n locations
agaacaaaattgctacaggttgaaatcaggaaattttcagaaaaaattcctagggggctggaaaatttttttcgtgagatattattgaagtggcaaaaaaattttttcttgagtttataattttgttatggagcataatttgaaaatntaaacaataataatttttttgaaatcttttcccaatttttacctctgtttttggcactgtttccctcatcgtctccccgcgccgccccttccgccggtggtgttggcacagtttcttcctcttccgccgcccaaaacatttcctcctccaattgctccctttgatcttccgctttcaatcggttcatctccgtgtactttggcaacaatcggtgcagcagctgaatgaattggagcaattttcgtccgcagttcagccgatggatccaatcgatgctttccgtgaatttgcgccacaattcatgcacatcctccctgggatcatcccggtagatatccacttgatcggcgaactgatcagttgggaatcgacggatatttacatacattttaaagattattaggaccaacaattaaaatttgggtaaaacaggattttttgtaattcaaaccctattcatagagttgactaatttaatgcttttcatttcataaaattcagttttataattatttatttaataatttcaattaaaacaaataaattttttaggtgtccacatgaccggcgaactgatcaaatgggaatggacggacatttagcatacatttttaaattattaggacaacatttcaaataacatattttgcggatttgaaaccaattcttataaaaattgactactgtattttctctaattatatgccacggtatattattttttaacctcctcagaaagggggagataatttgagacacgggtagataaatggagacggggcatataattagagaaaatacggtaatttactgtttttttcaatttttataatttatttatttaataaaataataattattttaaaagactaaaaaaacaggacagattcaaaatcttcgtaaatttttgtttcatataaactgatcattgagaaatcaacataaattaattatgatccatacatacctttctgaccatgtcaaaacgattcgttctgttgaactcgtccaaaaagcccaacaagcggtccatcgacccatttgagtctttcgctttcacaaattcgctaattgcctataaaatatcaattttattccaacgatttattgatttttgcctcggccatttcgaactttcggctttgccttgggtcccaaatgccgccatggacttcgtgcttactgtccgccacggcttttctcgttgcccggaagagtattctcgcctctccaaccatcgacggtttcacagaaacatttgcaagtcgaaaggacaattggttcattccaaatatgtccaacacgttaacaaatgcttaaatattttataatttatattcttaaatttaataattacggcttctatttagagaccggggttttaagtgctaaaaacactgaaataggtactaaaataggtgtgaaaaaagtggaaaataggtgataaaaacgcccaaaatgccaaaataggttcgaaaataggtgttaaaaattggaaaagcccagtgtctttatgcacaaaaattacaaaagtgactaatttttttataatttcgcccgcacactttcaactggtcaagaaaataaaaataaattttggaaatgttttttaaaatttatttccattcataggggtgtgttttttcagaaatttttgggaccgattcttaggggtgtgttttccttttttattgcacttttgctatgaaatttatggaaaaaggccaaaatatgtgctaaagttcgaaaat

SEQ ID NO: 9498 - DNA, 2665 bp, Heterodera glycines
gttcagttccgtgtctccgcctccgtccaaccgctcgaactcctgcttcaaatttgtgccaaccgcgatcagtttcagagcttccaacagacgatcaatcgccgcgaatgcttcttccgcccgctccaccaaatcggcaattatgaccagtacgcggcaaagccaagcgacgcgtcgccacgcgttgaccatcgccgacttccgttggcgcagtgaaattgaaacttcgcgcagaccgctccactgaagtgagcaaaagcattatttaatcccacttatgaactcgagatttttcgggattttatttctgaaattattaaattaaaaattaattgccaaaaatacgtcgaaatgtattccccccccccttttacattaaatttattcgtttctttaggggaattttctgaaatttttttgggtcatttcttagcggtctgtttttcgttttcaatacatttgttaaggattttttgaaaatcctgcaaataggcacattaggcataaaaatcccggaagaggcaaaaataagcattataaaaatcatcgtagcctcccaaaccaagcggaaaatgcatttttcgtgcttatctgaacgtttaaagtgcgcaaaattttaagcatttgcctaaaaaaggaagccctatttattgttcttaataaaaatatatttagtaaataaaatttctatttttgttttagaaaaattcatgttttttaaatttcaagaaagttatgatttattattttccacaagaatgccataaagaaggaaaaatactattaccttataaaaatgaactctcaaattaattgatttctaattgtatttacataaatataatgaaatatacaaattaataatatttcaattaagttcgaaatttaaaaaaggattacgtaaacggaagaagaaaaggacaccattatttcgcaatatatttttttcaatcttctcttaattaaaaaaaactgatacatttctaccttcatggcctccgaaattttgttgattttcgatctcagacccggcgatccgacttcaaaataaatgtcttcaagcagtacaataaatccgcgcccttttttcggttttgcattgaatcgctctctcaatttactcagctgattaatcaactgtttcgaaatcttttggaatgacttttcgttggacacttcgccgccaaccttttcttggctttttgtttccattatttcatcatcccaatacatttcaatcagttctccacgtggagttttagcacttttttctaaattaaacaaatttacagtaaacaattatagtatgttcataatttacggatttgtttatttttttcttattgaagcttttgtacataagttacagtagcttaatttgaaactttctactgtcgtattttccatgagccaaatgattttataaataaataatttaaaaattaaataatttgtttgttttttttttttgccttcaattggtggttctggcaaataattgcacttttcattcattatttgttccattaaagtaataaatttgtcaaattgttcactcattttccgcaagaataatcgttcattctttggggtttcctttacaattatttccaatttttcaatagtttcattaatttttttgtgattttttgttcccatttttttgagcacatttcgtccgttcgaatttctgtccataaaagtttggcttagatacatttgaattcgtttgtttctgttcggctcttttagagccaaccaatgctttagcaattgttccgcaatttggcaatctgacgaaatatttcattattacttagagcacggatatgtataataatttcataattcaaaattacaatatgaattggtgttaacctatggacaaatattaacaaaaatggcaaaatacggcgtaaatttctcaaattaaattgatataagattcgaaatttgaggcctaaatttcgatattctaagaaatgctcgaaatacttgaaattttaaaattaaattttggattcaaaaaaattttatgctaatgcagtttcgaaattataaaaatgggttcttatatagcaaataatgctaaaatggaaaataagaaaacttcttactataagcttcaaaccacgctgaaaatggctatcattcttactagcccaaaataagcttgccgaaattttgaaatcaacaaattctttatataaagtagtgaccggacgactggggtcggaggaaccccgagtcgggatcccgaccaaatccagaagattttggaaaagtaatcgggacggatcccgaggtcgggatcccgaatttaatcccgcgggatctctaaaaaatcctgcagaacccgactccgtccggtctctagtataaagtagaaataatattaataaatggaataaaaaaattaaccatattttgaatggtcggatgatgacacattatgctcatttgccgctgctgaatcattcgcaacaatttcccctcggggactgatttttagcgcttgcattggcgatcgaatcgacggacttctttgaccgatgttcggtgatcgaagtgataaatgttcttgcatacttatgggcgatgatgattcgctactgtttctgtcgtgatactgattttctttaccgccccattcattgttggttca

SEQ ID NO: 9499 - DNA, 4224 bp, Heterodera glycines
  unsure (1)..(4224): unsure at all n locations
tccatttcatctattgctaattgggtttaattatttatctcccctggttttaagcacaatgaatgcaccntttcacataagccttagaatataggcaccaataagccaaaaacagaactaaaattcaatttttccaaaaatttcttaaattttaaataaatgtactgaccacaaatgcagaaagagttgggcctaaataataatgatttgtattttatataagtttattaagaattgaaccatttcgaaagttagttttaaaaatgaaaataaaactttatagaaattaagaagcatatagattgacaggtgactaattctaatttaatctcggatcactctcgtagagtaataaaagagaaaatataccaaaattatattacaatttttttaaaattaatttattagcaatcagtattctgcccccctcgcatatagcaaaaaaaaaatgaaaattatttaaaataaaaattcacaaaaaaaatttagaacccacctggggtggaggaaaagcatacgcttcaacaggaagcgcgtgtccgtcttcacacaattcagtcccgcgatggattttgctgccgcgtccgtgctgaggcgtgagcgcaaatgcaacacgcgtggtaaccagtatagccggaggaacatcagtgcgcacgcgaacgcgtcaccaccgcatggcaaacgcaaaagcggcaatggcacaacggcacacagaacaagttcgagcagtatcagcacccgttggcgcaagtggaccgcacagtgccaacgcttgattgagttcacatgcatccgaaactgtgaagatgggttgaaaaacatttggacaggggctagttagacatagaaaatttttagaaaatttcgggcggaagggccaagggctgacgatttaaatttttcgcatgattttttttccaaaaatcgcatcgccgaaaatttctaaattttattcgacttataaaaagtttgatgccaaaaaattaccaatttttagctatagaaaatttgaaaatttcaagaaattaattattgtgtcacactgtctgtctataggaacaatggtaaaaaatttaaaattctaaaaagtattacggtattttaaatatcttgtctaaaatgaatgattttttttaaagtaatttgtttaagtgccaactctattttatatgcgtttacttttgcctgtagcacatggtagcgtacagtaaccagcagcagcgttacagtagttactgctaatgtccatcgcatcgcttcatccattttttgccatttggccaaaccgaactccatggccaacaccatgaacataatgccaagcaatgataatgcaagtgccaactcggcactatgacgacgcgcgtacgccaaatgccgaatacgctctgatgttgatgttttattctgctggggaagtctgaaaagaaaataattgacaatttggtgccgtcattgccacaaattaaaaatttacttttaaattattaatataaattatggaattttaaaattttaatcgcttagttaaactattaaaaaatgtaataaaaaaaataatcacattcattttcataaattttattttatttctaatattggaaagcttaaatctttttcattggccagaaaaatttttcttaagcagaaaatttataatattaaacgaacataccgtattttctaaaatacagcccccccccccctccctaaatcagaacccccttgaaataaagccccccttttgagggggcttgaaaaataaagcccccgggggctctattttaggaaatatagtaaatggttttgtaaaattttactaaaaatatattatttaaaaaatgtttaacaatattttttcagattcatatattaattaactaattatttattacctcaatgcccatgaaataatacaaaatttgttttcggcttcttttgacatatttaaatatttttttttgtaaaatactcataaataaatgggcttaagcattgtgttcattgttgacttataatacactcaaaattcttaaagcattattcattcattaaaggccacaaaaaagatcggttgctattggatgcaaattaatgaaattttaaatcgaaaaattttaccaataattcttccattaatttgtgatttaaaatgaaattaagtaattattttttaatttaatttactgatatggccgcgcaatgacatttctgttgtacaagctattcaagcgtcgcatgtcttcgttgcttatgccaaaatcgaaaatgttcgtttgttggccaatttgagttgttgggccacaactgcacactaccgccatgccatgttggtgcaaccatcggcataacacctgctgacgaaatgattaattagactaggccctgttgccagaaaataactcgagatttgccggaatgctgatttacgacattttgggactcggaattccggccgaaattttttcagtcgtcacaatttccgattgccgaatttttttgagggagtcggcacactttcctggttttgacctttttttttgctcattggccatacagcattttccggtcaatttcaaatttatgaaaattgatactcaaaaaattcacccattatttcatagcattttatgaaaatatttatactaaaagaaaattttaatttgatcaataaaaaagcacaaaaaactatgccatagaagctttaaaaacaagaaaacaatatgcttttcatacatttggtattgtaatacaaattctcttcttaacaattagaaaaagaaaaatatttgaatatcaaatttaaaattttttaaatttgtttcttaattggcaatcagtgagtgcctgttgccacctgtgttgccgatttgccatatttgttggccatttcgcgcaacagtgtgtggtagaaaccgcgctgttgctgtgagccaaatttgctgcttgcacccatcgcatttgcgcgaacaattggcaccactttatggtgactgcacagtgacaaaacatcatcaaaattggccatcaacggggccaaatctatctaaaaaataatggaaatttaaggggcttttttggtgtactgtattgttataggactcaaataataatgtaatatggtaccgtatatgtatttcgtaaagtcatagatacatacttacttggtcattttaatttatttggtaaaataatttggttgcatttcggagatagagcaatttgggattttttctgtttccaattactaattttcttaatttgaaatcattttgtaacaattaatcagcatcgattaaacaaaaagtgatttaaagcaatttgaacagcagttacagttgagagtgttcccttataagctgtccttactcattcaataagctttatcgataatttcgtattgaaccaaacctcaaaagtctcaatgatagtaatatttaaatttaattgtaattttaatttatttgcagaataataaattataacttagtaaatttcattatatgattagataaacgaatgttctctattagttagttaaaatttgattaagtttgagttaagaaaatgatttcttttttctggaaataaaattaaaatattattaaatcaaagacataaactaattgctttacggtttctattcaattgttttgagtggatttatctatgctgtctgttaccacctgccaacagtgaggtcgagttttggcacgttcacacaacagcttgaccatctctatgtctgttcggcttacacccaatgctttgactttgccgtcattgtacaatcgttccgcaacactccaagcattcattagcacatcgacaggcttaattgttgcagttccttgctcaagatgatggtcctccattaagcctgatgttagcaatgtgttgttgattgccttaagaatgggggacaaaatgaaaaattaaaaaaaaaaaaactatcgtattaagataaaaaattaatgccctaaaatttctggtactcaaacgtatgctcaaacggcgtcaagtttcaataaattttgtttggacctttttttcgtgtcgatgttttggtccacaatcattgaaaccgaccatcaataaacttacatagtctgttttaaggctattcattatattttcaatttttttttcttgtattttatttttgggtatcgtggcgattaattaatctaaaaaaattaattattnttattattttttctttta

SEQ ID NO: 9500 - DNA, 2124 bp, Heterodera glycines
aatcctagccccattgacacatttaaaatcaaaggggctagaattttgtagtaaaaaagcaaaaaatgactgacaaaatttatcgtaaaaaacataaatatgtaaaaaaaatgtggaaaaaattcccttgggaaaagcatggtgaaaagcggcgcattatttttttcctcgggatttttgcggcataaattaggaagatggcactggtgccgtcttttctttatatgtgagccgccttcttatcgattttatgcatatttaacaaaaaaaaaggcaattattgcggaatatttaaaacaaatttttatttaaaaaaataagaaaattgacaaaataagagcttttcaacatatgtcaaaagttaatttttcttcagcagcacaattccttttaggaagtcaaaaaatgtcataactcattaaaattagtccatctgtcatgaccatgaacatattgtgtttttaaaaatgacaaaatgggcacaaaaaaaaataataatttaaattagttttttaaaataaattaaataccattccagtgagaggcatgcttctgtatattcaaataaaacgaaattatggggcgttaattaaaaaatatcctctcaaaaaaacatttttttaaaattttttattgtggaatagttaatagtttactacttttttactgctatgcattttacgttatttaataattgaatattaatgattatgggctcaattgaagcaaaaaggaagaactataattaatgccttcttctgtgattttcttcgccataattataattttaatgcttaatattcatcatgattatgttttaaataaatctaaataataaataaattttatttgagagaatactttttaattagcgctgaaattattactaattagaattaaaaatattatacataataaaagcctgaagaaatgtaaaaagcggagataaaatttttaaaaatttgtttacatagcaatttagcaatattcccaatatttgttttcaatgaatgaagtgttataaaaacggattttgtgttaagtggtgtgtgagaaacttttcaacattttttttactagcataacatttattgtagcaaaaaaaaactttgataaaataaattcacatccatttttcttaaattgataaattaacatttattcagcaaaaaaaaattagataaaataaaaatttctacatccaattttcttaaattgaaggtccaacaattttttaaaattaacatttattccgcaaaaaaaaattgaaaaattaattaaaatttttacatccacttttctttttaattaacaatttattcatcaatcaaataaattgataaaaacaagtcaaattctttgcgtctaattttcttaaataaacggcccatttttcaaaagaattaaaagctgctgttaaaaatttcacaatcaacaatttgatttcaccacatttattttgagtcaaaaaattcgctgacccacaaaatgtccaggccacgaaatgtccaagtctcgaaattgagttttttattattcggatgggcctaaggttaggcaaaggagtaatataaaggctatattcgtattcagcgaccccgaaaaccctaaaaaccccaaattagactcattttgtttttataaattttgaaaaattttggacatttcgtggcttggacattttgtgggggcgccaacaaatttccctcattcttcgcaaaggccccccgccctgaacactactcacactcatcattcattgttgagatgaaggaattgattggtgttagagaagttaaacaaataatgtatgtgtgctcagaatgatgaactgacgaccatgacaccctcatttgcttgagacattattcattatccatcaaatgggccattaagtatttttaaatttatttatttatttttttgcatttagtaaatccatttttatgggttgttatgttccgcacattttgaggcatcgaaaattttttttgtttttgttgttgttggtcagtttgactgttttcactcttctgtggtatgaggagacaaataacgggtcattgattaactggtacggaaatattgtcgacaaattgtttatcgacaaatttatgtgcggag

SEQ ID NO: 9501 - DNA, 2067 bp, Heterodera glycines
aaccctatctttttggtatcattcgaaagcacaaagtctatagaacctaaaatacataaaatctcagcgtttaggcaattgccaaaaaagatatggttaattaagtaattgttgattgttttcgtttgtaaatttctttaaagcttagcattctcttgtttttttttgtattattacattcgtcagactttgttgcgttcgaatgttaccaaaaatatagtaatgtacgttgtcgaattgtttcgaattttttagagcatcaggttaggtaaatcggtttttaaaatggttaaaaagtatgtggttaaaaagtatgccactttgtctatcaaatgaaaatttttttttcatttttttgagaataatggaaaaatatgaatgtgattctattttggtttctgcacgtgattcaataaatcgcgtccaaatttcctgtcccaaaaattggaataggatgtcaaaatgttattttgtaaaagcgatcgatggtttcgtgcataaattaaagcctccgatgtcccttctcccctccccaccacttcttttatctctcatttccctttttcaaaattttcagtggtttgctgctcccatcacaatttatgaaaaactttgttttttttggtaattttaggctcccaagaaaaactgaaatttattttaggcaaattcggctgtctgatacaaattatccttgaaaaaaagaaagggggccaattaaaattgttggtgttccagtttatgtttcgtcggcactgcgctttggccaaatggttgtcgctcaatccgtccgtgcagtacgcgttgttttggacgcggacatgggcgtgatcaatccggaccatttgttggagcattttttggcaaaatttgacaccgaattgccacacggaggaacaattgacatggttttctatgagcgcattttcaacggcgaaataatggccggaagttattgggcacggaacacacgttttgccattgaaatgttgcatttttgggccaatttcactgtgccgtcgcgcaccccttttcgcggaggcaccgacaacggggcaatccatgtaattttgttgggggatcgcaattagggattttttatgggcgcaaaatagggaaaaaatgccagattgcagcaaaagttttttttgggccggatatcccggctctattgcagttcacacaccataaaagagacgacaatacatttttttgtaactttaatgcaccataactttttctaaaaggatccaaattaaactttcttggtatcattcaatagtccaacgaattctttattagtctgctaaatttcaaaaaatttcattatgtttcaataaagctatggccaaaaatgtttagaaaaccaaatttttgaaattttctggccataaattttttgaaacaacgaatttttttttttgaaattttgcaggataatagaggatattaaatgctaccgtatgataatcaaaaaagtttaatttggatgcttctagaaaaagttatgatgcattaaatttgcaaaaaaatttatgtcgtgtcttttttttatcgtcgtatgaactgcaatagagccgatatccctccatctattaaatgtttagcgaataaataagaattttgtgaagaaaaatggcacttttccggtttagggctcccggaataaaggggagtcccttttggattgaaaacttcttgtgataattagtctttcaaatttgttctccgccggtggtttttggggtgctaaccaagaatctaacaacaatttttgacgaaaacaataatcccgagtacttaaacaaaaagtctaaagttcgatttcagtttttggttcgaattctggttacaattcggaatttgttgaaataaatgtcagattcatgaccagcggccccgaaaattcttgcgaacaaatttgaaagtctaattatgacaaaaaaaaaacaaacgaatttttcaagcaaaaaggttccctccgccgttcatccattcaccagtgtttaggccgtctttttgaacattatttgtgggcaacatggtccgagcttagcgcccgttgct

SEQ ID NO: 9502 - DNA, 1620 bp, Heterodera glycines
cgccaagtctaattgaagtgcaattgggagtgcaataccgttaagagcatcgttggcactttcaaatgatcagagggaacttccttagatttgtgccatttcggacggagcatttcgcgaagtgaaagagactctgcagaacgtcattttggacaacaactgtttggagcaggtgcccggaggagcactggaggaaatgaacgcgtaacgaacggataaaaggcacaaataaacggccaatgctttcctttccccttcagtttgatttcactgcacatgaagcacaatcaggtggagggaagtgccgtggcctgcaaagtcgtgccaattcgttcagattgagcaattggacgatggccatctccgcaatctgagcagcctttcgttgctcactctcacgggcaacaaaatttctcaaatctctccgaattttgcccaaaatactccgaatttgcgttacatttatttgggcgacaacaaattggaacggatcgacccgagctcaattaagcaattttctgcagccgaaatcattgacctcagcttcaataatttggctgaaataagcgcggaattgttcaacggaatggaaaacctgcaggtgacggaattgggggagaagcggcgccttggagaacagctgtttcatgctttagcatctgaacttggagtcgaatgccatcaaaggcgtcgccgccggcgccttcgccaccactccgctgctccttctgtggctgccccacaactgcttggactccgtgtcgcccaacatgttccaaggcgcgcccttcctcaagcaagtgtcccttgcccacaacaacatccgcactgtgcaggtcagcaaaacaactcgcggttgttttaacctctgcccatctgccaaaaaacccaccaaatactttctactacttttagccgttcagtttcgcccatttggccaatttgcacactttggatttgtcccataacaaaatccaaagcattcagccttcctccattatgggctcagatttcctcacagtccgagtgcaaggcaagtgacaaagagcagcagatgaggcgaccaaacggacttttcttcagagaatccgctcgtctgcacccaagacggtttccacgtgatgaacggacgagaagcgatcaatttgacaacagaagcaaacctcatttgcaagacgaactacggaaacgaagtggaggacaaatgtccacgaaaaccggaaagtgtgccatggaagggatgttgtgaaggtaaataaatgagcagagaatggcaaaagtggagacaaaggcacaaaaccaagcaggaacggcacagaaaatgaccataacagttcaaccggcaacagaaacaacaacagcattggtggaggagcagacgcaacggacagtgccaacaatcggtggacagcagccaatcagtccaatgggtacggtggtgccatcatcagcaactgtcgcttctgatgaccgaaccgtcgaagcgacaatcacttccacggcaccaacggacgagccaataacaaaggcaaaacaactgaacatggaacggttttatcgactgtcaaaacgacctgaaacagcgcaagtcaaacatcacaacagcaggcgaatgtttcc

SEQ ID NO: 9503 - DNA, 4960 bp, Heterodera glycines
  unsure (1)..(4960): unsure at all n locations
cggcacttccaaaacagaagcagaaacgcccgaagcagcagaggggcgaaggggacgccgcgctaacgagtgggagaagttccgactcggaaaggcaaacaaaaggggggggggggcagaagtaaagtgtatgcaaccgaacccccaattaccacgccactccagcgaaggtggtaaattcataatcttgcatacaatcaagaaagtatcagcctgcaaaagttcaaaaatgttttcggggaattcccagggaaaaataaataattttgcatatgaataagtacactaatataaccaaaaaggattaaataatgcgaatatgagcccgctttaagactgtgtgaattttcagaatggccaagcaaatgctaactacggacattcggaagaattctttgccgtctccggaatttgctgattcattagaaacaaaaatggccaaacgccctcttcaggagaacggcgagttcagcagggacgaggaggcagcccacgtggaggttgaagagaagaagccgagccaaaaggaagtggtggccaaacagtgagtgaccggccggcacccatacgatgcttactcactcactcatactgtatttaacattgaattcccaaatatttatttttcataaataacagtacaactccagttcatcctccccatcccgtaattcagaaagaaacaaacaaaaaaaacaaaacaaaaaatatggcccaaaaactgccaaaatagatttatcctcgtttctggataggaatgggactgttaaaatctagaattcggtaaaaatttagttatctgacaacagtggatgcgaaaatttgttgcataatctcagggatttgagcagcgtccattgcaataaaagttttcccggcgggaagatgcctttgaagactaaaaatgaagacatttgttctgcttgtgaacggtttgcaactagtgacaaactttttcgcctgttctcccaacgatccgatgagcacaatgaaagcgttgacactgtcgcccatttgcagcgcacggctcacttctgacggtcgaattccgtaacggtccaaattcgcgtcggagagcagcacgacaaatttttcatcgaagtcattccctccgcccgtgtccaactcgcgaaccgccagcgaaagggcctcgacggtgtaatcaccgctggtgcaaaattgggaatgggccaacatccgtttcagcacgttcagccgctccttctcattggcgggtcgttggtccaacgtaacgaagggaatgctggcactttcgcccgaatgtccataaatttcgtactaaaaagggcaaaagaaaagaggaggcggtcactcgcccactttcactttgtcctccttcccgtcgagtccttccatcaccaacaacgccgcctcaagcgaacgttgtaaacgctggtcgtagccattgaatctgtcaataattatttagtaaaattaagatataggtaggtaattttataaaaaacaagcaaagaattcaaatgaacagtttgtgagtgcagcaccagtaagtcatggctcatcatcgactgacctgtacatggagccggacacgtcgaagcacagacgaattcgtttcggttgttgttggtttgagggatcgggcggttgctcaattcgcttccttttacgttgtgttagggttgggtcggtccccccccctcaccggtaaatgtttctttcgccggccatcccttcgatcagtttggcatcgtccaagtctccgctcgtctggtgcttggcccactgtctttcgtgcttccgctgctctaacgagtcgatcacactgcgcagcacccgcacttgtcggcccacgcgagtggccaattcttcgtatgccgccgcgtcgtattcgcccatgtcaatttccttttaaaggcccattcattagacgccaatcaaaagctgattgtgagtgcgcttcatttgcctacttttagtcgcttcgcatattcctctctggcgatttccctcgcccttttccgaatgtgttctggcacttgctccttggcactatccggcaattgatgaaccgcatggccggcatccaaactttggcagaatttaagtcaatgattaattgcaattaccgaaacggaccaccgactcctccaagtccggccgtgttgtacccccctgaaaaaaaaaatcggagccaaaaaatcataagacattaccggtgccacccgcccaagtgtttccgccgacatgtggcacattattcggatcgatctgttgaataataaattcttaaattgcatttgaagaagaaacctttccgaatttgggctcgtcaattttggacaagtcaaaaacggagccgtccctttcaatttggacgcgttcttcttcttctccttgaacacgtttcatcccgagaattcgaccccaattcccataagcatcagacggaccaatggacgacgaaagaccgacacctttttgagagaataattaataaaacaactttacattgtctgtctttttctaaccaatggaaatgcctttgcgctgaaaaacttcaccgatcaattgggcagtgtccacggaataagcgtcaaaatcaaacacatttctgatcacttcaggcaaagggtcgtcgggaaatctcaaaatgagtgaattagtaatgggacaacagattcaggacaatgaatttgaaactcacttttgcaagtgtttgacaatgttgaccaattctcgcgtggaataggggtaacttatcagttgctggtcgaccaaagaacgtaagtcgccaaacacggaaacgagcagttcgagcacttcctgtggaacatctgtcgaaaggtaagcaaaaaggccgtcgtccactcgcctggtccgtatttggaaagcatggccaactcggactctttggaggggttgtccaatgcgtgtacggccaaaaggtcacccaacagagcgtaaagatcgttgccgaggaagggaaagccgggccgattggcgaggagaatggcacggaattcgggatggacaactagcggaacaaacaaattggacaaactccattgtgctcaaacgtacaaatatcgttgccatcgcccttttcgctttcatctccctttttccgttttccagggcaaacccttcggccatccgaaagataaaaaggctcctcgtccaacagcgactttaaaatggcgacgacgtgcagaggcgccttcgcaaagtgaaaagataaaatgacaaaaatgagtgggcactttgtcagcttcgtcaatgaccagcacaagtccgtcgcagatggcctgcaccaggggggagtcctcataagtgagcactccgtcaacgacggtcgattggactgtcaacgattggacggtggtgtctctgaggagaaatgccattggaaatggcctttacccaccaccgctttctcccttacctgtgcaattgcatgtatttgcgcggtcgatccaaaagttcgagcagtcggtcagtgactttgttcttgcccaccccttggttcccgatcagcaaaagatgcgctccgagatggaaatcgcgtgccatgttcgccataacaatgagatgctattcgtggggtattgtggtgtgaaaaccttcacttcctacttggggattgtcgaagaacagagttgatgggatcattgcttcgtccgccggtcggcccccaacttttgtttcactctctccgaccgatgacattccatccggcacttccgccctcttcctcatcttttccaattcttctttctcaaattcggcgtgcttcttcttcccgtcgggcacaatgccaatttcggcgagtgtcgcgtcaaatgcgcgtcgaacaattggcggaacgaaacgggtcaaagcggcgcgttgaacggcgtcgaaaatgccctcttcggggtgagcggaatggcgacggaggatgtgaatgagacgacgcagcgaaagggaggaggcgatggtccgaatctgaagaggaaaacaaacacaagaatgagatttaaataaatagcccataaaagtcacgaccgaagcgtcgtgcgaattggacagccgatcgattagtcgcaacaatcgcttcgcatggccaaccgatgcattaggaacacgctgctgaatgatgcgcaatcggtcatcgatggagagactagggagagagcagaataggaactgggacagaagctgagcattcagccattttggagcggattcggagtcgccgagggcgacaattcggaaggaatccgggattcggaagacatttctatgaaaaaagaaattgaaaatgagaaaggaaatgaaaaagtaagccattcagaaattaacagattattatccacgctttaaaacgtacccaccgatcgttaagcatttgttcgctcaatccgctgcgatgcttcaaaagttcaaagtgtgaattgccgactaagcgagtgccattaggcagtgccaaaaagcggtgatggacgagggaagcgattgactcggcggtgctccaatggactgaaatggcaacaatcattaggcaacaatgcataaaagttcaagaataaatgctcgggtttcccacccctgtcgactccgtccaacacacacaacgccccgcgtttggccgccctgaccaattggttgtcctcccattgcgtgtcgccgtttggaagaattttcctgcgctgaagcaactctctgctgctcatgtcctgcaaaaatcagttgagtgtttgtcggttttaagcgattacctggtaaaggacgatcgtttcgacgggatagcccaaccttttggcaaattcgttgaccaccagcgatttgccccctccgcgaacgccgagcagacaaaagtcggaagtcgagtggagaaggaccatttcggccaaaggacggtcaagcgaagctgaagagncaaanccagcgcaaaaaagaccctcgcggacaaagcgacccgaagggacctcaaaga

SEQ ID NO: 9504 - DNA, 3692 bp, Heterodera glycines
  unsure (1)..(3692): unsure at all n locations
tttttggatcacggtcacggtcacgattcacggtaacaattcacggtcacggtcacgattaacggttgacgggttttttcagtcacggcgcatctctaatgagcagctctaccccgatattttttcctactccgcaaaagttttttagaatttttcctaaaaaatcttaattaattttttttataaaaaaataaaagaaaaaacagtaattttttgaaaatttcttaaaaaactaaattagcataaaaaaacttttttcttttttgaaaactttcttagttagtaattaaagaaatatttttctggggtaaatataattcatcccagataatttctggttaaggggctcttgaccgaaagatattaacaaataagtcgaaatggcacgactgcaaattatggccttcaaccaatttaaatttaaatacccaattagcaagtgccaaaatgctaaatggcgctttgttggaattttgggacgttttacctttactgtgttaatggttggcatttgcaacaactcgtcgacagaatgatcttatgcagcagaaatttcaggttcaagcagtttcacgaactgtgcaaccattctggaggaaagtgcctttatgcactcatttaacagtccaaaggggccaaattcttccgaaaataaaacatctgcttggataacagcctaaaaagtgaaaatttaaaaaatttcccgtattttttcatgttttttatagttaaattaaaagaaatataataaatattcattgtattattttcttgattcattttatattattaaaaaaatatattgttattatataagttaaattattttttttaattatattcaacgtaaataattctttgaagctattaaaaatataatttgaatttaattttgttgtagttggctgatttatatttgtatattatttataaatattttttatatcttttaaatttgtattcaaattaataattctatgaagttatttaaatataattttaatttaattcattaatatattacctcgataaattgatgagtccgtttttcgttcccgtcaaattcatcaaattcgattgtatccaacaactgatcaattaatgtgacacgaaaatattgtgccaaaaggcttaaactgtttacaaaaattaacatgatttaatgcaaatttttttataaagtaatttttttaattaaaaaaaatccaattaaaagcaaaattatataaatggcaccccggaatgtgccgatcgacgagaaatcgcagtgccatcgatgtgcgcgagtcgtgaaagtgatcggaaaaaaatatggcttccaagcagcgttgttctcgaagcagtagccttagcgcaaaatttgggctacattcggatggcaatagttggccaagtcgagagcgatcccaaacagcggaggaagatgaaggacgatcggcatcgcactaattagataaattaagcaaaaataaatttgaatatttgtttgttgggtcatactgtaattatacggtctagatcgtttcgtaaaaatagccaaatttatagatttttcgagagaaattcgtcttaatttttctccaaattaaataatgttgtggtataatatgatagctgttgatttatttattagcatgaaaaacttcagataatttcattcagtttcaaaatgttggtggcaattttttggatattttttttataactttctgaaaattgaatgaaaatttctatgctaaaagattctaagattattggtttggatgtgtttaaaaaaagatatgacagttactctacaacattgatcaaaattattcaaaccatctcatagaattttcaaggatgaaaaaaaattaaaaaaaaagaaaattacctcaaaattttcctccccatcatccaactctgcgcacaccatcagatttggcaacactgttgatgttgccactcctccaggcactactgcttcaacatgatggcaccggttcagctgttcaaaaaggcgggccaagtcaatgccgagataataagcggcaaggaatctgtgataaattgagtaattagaagattttttaaattttatttgttttaaaataaaatttattgaaattttcaccgaaaaatttaattgattcataaattggctaattaaggaactgcgttgaaaccaatctattattacctggctaagtctatgcgtgctgagctggccgtgtttgacttggattggatgagctggtgtaaggccggtgccgagctgagcaaggcgaacacacgaagccgaaacttagcttccaaatcagtgccgggtgaagccatcattttttgttcaatttggcatcattttcattaaattttttgaatttagggtatggcatattgaaatcgcaaaaatctatagatttaaaaacttgaattcttatttattgcggcacaatttcataaaaaaattgaaataaatttcgctattaataaataaatgaataaataattttaaaaatactttttgggatggaatatggcaaaaacttccaaaaaattcaattatggccaatgaaattacttcgttttgatgtggtattgggaataatttcaggaagagcattggtggtaggagatgacatccgctcaaacattgtttgcctatttttgtggaaggaagtcaactcatcctccgccgttggttgcatgaatttttaaagcgctccacccctccccgcccccctcccccctcccctttcggcattttgttttaggaaattttggcattttaccattgagaattattttaaatttttaacaatccctttatctcaaattttgtaataataaaaaattgcgaaatttcggttttgtgggcatttaaaaaaaatttccttaaaaagtcctaaataattgctaaatattattcatttgcttttgtaatttataaattattgtcgatacaaaataatgcttatacttttgcaatgccaaatgttccccaactcttggaaaaaattcgtaaaaaatatatttttttttacacttaatatgtttgcatgtggttattggtattttttgaaaatgtgtgcttggtaaaaatttcagtttgaacaattcacggaaaaatgatgtgaatttaaattttattccagggtttaaaattgagaaaataggtaggtcatcccaaatttgggttagaaaatttgcttatttcaatatttaaatgaaaaattaatatgaaagaagcattggcactagccaaaatcgaataacaacttttattcaaaatcaacaaaaacaaccaaaatggcattggcacaaaacaaaattttgttcacgcctccgcgcagttggcacaaatttgagcacaggtggtcacaaacaattgaagggatggatggcacggcacttttggcatgcataattgagtgaacaattgaagcggcatgcgcagtggacgggcagaaaatagaagtgggaaagtgataaacattaccaaaatatttttgtttaatttgaactcgctaattaatagtttttttaaatattaatagtcacttttctccgctgcttttaattaattaggcagggacacacggggacagtcttttaattangtcggaaaggatgggacaattgattangactttgaccaatgattattgntcactaattatccaactccgtcaaattaatattnaaactcaaat

SEQ ID NO: 9505 - DNA, 4133 bp, Heterodera glycines
aaatgccaaacaaatataatttaaaataatatcaaatggtcaaaagtcaactgatcactacattatttgtttgtttcctttaaattaaaaattaattattaatttgtatttatttttaaaattattattccgtttattttaattttaaaaaaaatcattaaaaaatttctttatttttattttctaaataaaaagttattataatttttatcattatttattggtaaatgcctttttttttgttcttggcgaaaaactcgaaaagagccttttgcatttgatttaaatttataataaatttggcgttttgtccatttatttctctctccttcatagacatagacaaaacatttgtttatttgcctaaggaacatattagaacaaacattgttgaccattgcccatctttgtctctttttggcatttttaaagtctcacatttaagcaaatgccatcggcaactccctcgtcggcactcggcgagctttgggagcagtgcctgcaatggttgcgcagtgccggcgtgttggacccgcgcgagcagttcatccgattggccgactttgcggcactgttgcgcaacggggtgctactgtgtgagctggcattgcgactaaagccggacagcattgatcggcaagaaattctgatccaatatcagcaatctccggcgagttttatgcccgtgaattattgttgtaattcgtcaggttgatcagtaggacggggccggtgatcagaaaaacccaataaatcggccgatataagactataaaaagggcatgattttgagaaatcctagctgatcagatcagaaatggcaaaatgctatataaagagattgggaagaggaagacttccctgatcagcattactgatcaaaaatggcaataaaaattatcaaaatgttcgaaattataaataattattaaatacatgccatttaatcgatttgtatgttgctacttttcaacaatcaatttattgaatattattatatcttattcataccaaagttaactgtttccttaggtaaaaaaatgggattagggagaattttgcttcaggcaaaaagtaaaattactattgcctgaggcgaaaatatttaattaaaatggattaaaataaattatcaaataaaaatggaaatgcccctgaggcattaaaaataaataaatttaaatcaattgaatttccaactatttccagttcacttgctcaaaaaatattggcctctttttgaacgcgtgccgtgaacatttcggcattgagcagcagctgtttgatgaggaagatttgtacgggctgcaaaattttggtgccgtcctccgtctcctctcccaactgtcgcgcacccaaacatcgcgtcagctgggcctcaagtttgttgcggcgcctaatagaggggggaggtgtccttgactcttgtaaaaactggaatatcatgggataaggaccgaaatcctggaaaatccactagggtcaataatgtcttatccggattaacttatcaaattccaatttaaatttgtctttcattcataaatccgatccggggatttaaattttcaggctcgcttaaatgctatggatgtccccgggggcatatttttttaaattaacaaaacatgattaagctcttaaatgtttggccccatgcatgtttttcccatatgtggaaaaattttattcgaatattaaaataaaacaatttaggcctgcctataattccattaagtttttcattgccaaaatttggaatttgcgtcggctagaggagcctggattttgaaaaaatcctgactaattgtaaggcccggatttaggagatggacccggaccagatccgggtctcaagtgtcggcatgttaaaagttggcactcgtgtccattccacaaaattcagaccatttcccgaggagaccacgttgccaagtgtgttggacactgcggaggaggaggacaacaccatttacagcaacttgcgcgacgaagtggagcagtgcaagcaacatgacgttgtggtgaattactctcggcttaaccttggtaatagtggcacatcggcgaccggcgacggcacaaatgctgctgcttctactgctgctgctcaagatgaacaccaacggcacaaggaagaggaggatgggcaaaagatttacgacacaatttgtggtcaagcggtcgtgccacagaagggcagcaaaacattgccaattgtaaataaggcggggccaaatttggggccgggctggctggtgggagactgacccttccttcaaaaacaacaacctatttcggcttttaatgcgataatttaataaaatgaattaaatccgaatcgggctaattctgggtaattaatgggttaaattattactaatgagtttactacaaatgtgccgttttatttgaacattcgcgcagagttatgccgagttcaagccaacaacgaagcgggaattttgcctcaaggagcttcttgacaaggacatcaattacacgaatgccctgaggaggttcaaaaatatttttaaaaaacatcttttttttggctatttgacgagtgatttatatgaattttttggctctatgttatggagaaaggctgaaaaagctcaaaaaattatttctgcatcaaaattttgaatttatgaggtccatataaatccatattttgtgggttttcggggaacaactccgcttaatttgatatttttggggttttcgccattaaaatttccaaaaaaaaactgggggtctagcggtgccgttagacgtagggctcagccttttaccattttttttggatttctaatccatatttcgggtgttttaatccatgttttatgccctcttttgatatttattttttagtccatattaataaacactcgccctaattagacacataattcgtaatttccatcggctttaaaaaagcgatttaaacaaaaacaatttttcccattcagaattgaaaacattttctacgctcgaatgcattttcatttgaatgccgaagatttggcaacaattttcattaacattcgcgaaattttgcggctgagcatcagttttgtggccaaattggagccagccgttttgcatgcgcttaaccttgctgacagtcgccgaaatacggccaattttggcactggcgttgctgacatgccgcccctcagtgtggccgagctgttcataatgtgaacaattaatttttaaatcatttgctaaatttcaaatgccaatttgaattccaacaaatttcgattccttccaaattaaaaaaaaaaatttaatgcaaaacgtttatttaaaatacttaaattcgacatacatttattaattataaactagggttgagcccccgatcctgagccacgattgaaccaatgtttccaaattttgcattttcgtctcgcttatcgaaataataaaatttttaataaaaataattgttgatgttttaaattttaatagatataaggagcgcttcacaatttacggcttgtactgctcgcagctcaccaagtcgacgtgccgaatcaacgagttggaacggaatgaccccgagtttaagcggattgttacggtagctataatcaaaagtgatactgtaatatatttatttattatttttaagaatttggcaaaggatgaacaatttcgactccaaacgcttttaattctgccatttcaacatatcacaaaatatcagctgttgctcaatgtaagttttatgtcaaaaattttttttatttacttttatgactaaaggtgaataatttgaaaattttcaaaaaaagttaatttttgcttattttctcgaaaatgctaataaatataactttttaaaaaattcgaaatttataccaaaaataattcacaattggaaaattctcaattttttacttaattttactcgtaattaataaattttagctttatttttattttcttttaaattgggttttcataccataattagctattttttgagattttatcaaagatttattcaattaaatttttttaattgagtcatccgaatttttaatttattttgactattgctattttttctcaatttttaatgggaaaaaatcatcgaacggatctctctctctata

SEQ ID NO: 9506 - DNA, 3897 bp, Heterodera glycines
tagggttcgagccccgtgggcgggggtggcttttcgcgggggcgggggtgagaaatttctcgcccccggggacgggggcgggggtttgtttttaattagctccaaaaaatctcacaaaaaattttttttttttgaattgtgtttggctccacattcctttattcgatgtatcgcctcgattcaattcttttttggtataattgcatagatattgtctaaaaatgaccaaatttaaggattataaattatgccagaataggcaatttttatgggtgtttttgtctaaatccagggtttctatttcaaaattttcaaaataagaataaaggccaaaaaataagattttagggtcaaaaataagaacattttgcaaaattgcttcaaatatttttacattttattcgatcaaaaatgtattctattattatatttttcataaatttcagtgcattcgggatcactaaatcagatttttaacattttttgcggcacatttccaaaaaacttggtgaatgtgcgaggggagaggtccggtggtgccgattggcgccgcaagcggaaaatttttaagactatgaattttgttagaaattagccaaattttttagaaatttcccttttttagatgaaaataaggtactaccccaaaacagaacatttcttagaataacaacatagaaaaccctgtattatttggaaaaaaaataaaatcaaaagaaaacgtcaaccgatgtcgaactcataacaaaaagtttgttaatgttgaagcactaaccactaaaccacaaatattttaaatatacgcaaatttactttatttcataaaaattttgtaaaagatggttaaaaaattcaaaattgtataaatttttgcctttaattccacgaatatgctattcttaggggtgtgtttttcacccccatgcccccgcgggggcgaaggtcgcgggggcgggggttgcgggggtctgagtcgcgggggcgggggtgaggccaaaaaacctgtcccgtccccgggggcgggggcggggtccggaccctagtccaaatggaagccagatttgtgaccagcgactccgaaaaaaacatattttaacgacacggggacatttttctttcttttttccggaattaatattttaattaattttttccatttttaataatattaaattacttccatcgccgattgccttcggcgtccgttccttcctgacgcttttggacctttcaaatatattaataaagcagatataattgttagcatttttattagaagtatatcattatttatttaggtttttcgttttttaccttcaaagccatgcaaaggcactccaacggagcaccggcacggtgggcaaattcggccatatttaagaggcaaatttaatgtttaaataaaatatatgagttttttaaaataatatatgaatggatgactaaagcgccgaagaggaaaattgagagataaagagaaattggttgatgaacgaacacatgcattctctcaacacaaagcagatgaataattgtgctgtgttcaatcgatggtccttctcctcccatcggtttcgcattatctgttattttatctcaaaattaaaataaatttaaaatttttaagccattttttaaagttgaagttagcaatatgaatttgtggccattcaaatttaataccatttcccagtgtaaatcgagaattttgaacatttggctgaattttcaaattacactcattttaaaaaactcaattgtgaggacaatttattttcttttttttatcgttaattaatcttgaaagaaaatctttaattatattaataataatttaatattaaatttgaaaaaagaaaattattaatttatttattgtgttattaacaaatacatattctactaaccaattaagacaattaaaaatgttattttattataccatttaaaatatgtaaataaaactattcccattctatgttcaatttgtgaatttctttctttttcctccactttcttctatgttttgtttattcacaaagtcccgacgaattgttgcattttctcggcgcttcgcattcactgcaaattgggcccgacttgtaagtgctcatccacacataattgcccctaaaaggcatttataaataattaattttataatttattattcacagcttaccctggattgtaatggcacaccacataagtttgccagtcgccgtcacagttggccacggcacagccaatttgcaccgaattaaaccatgccatctgaattttaatatgtataaaacacagaattttgcgattgagaatttaaattttaacgctcaaaaggggtaaaaaaaattgtgcccaaagaatgtcaatttggtcattgtatcaatgagaattggttgtcgagataatgagaggctaaattacctgagtccaatggccaactttggacaggttgtcgtcgtccaaccacatgtccttgttgatgccgaactctgccaactcggaccaccacgcgttgcatgacttttccagcacttcctcttaaattgtcacaattttctactttaattggctcccaatttgacttactgttgggaaagtcgcgccagctggagaagtacagattctcgccaaagtctgtgcccgagtgttgaatttggcatttgctggcccaatcctgggccgatttgcccagtccgtcgtcccacaccatcttcgccatgttggccgcggttggcattgtctgtcccgttttgttcgccactttgcccaaggccaattgcgaccggtaattgttgtggcactggacaatcgtcactttgtcctccgccgacattggcgtcgcgaatcccatggtacggcctaaaaggtaaattggcattttgtctaaatttttaaattaatttcccattcaaattattaattattaccaattagcatggaaaagacgggcagcaaaatgaaaatcatttttagtaaaataaattaataatatttttaattattgtttaatgtgattgaaactgcgctttttcggccttttaaaggctcattaccacccaaagagtgctaattaattgtcaattggtgagctgaacaaatgttaaaatattgaaaaatttctgtgatttttaaaaaacttatgcgtgtgcaaacaaaaatttcaataatatttggtggaatgtgaaaaaaatccaaaattttgaaattccactttttatgagaaagcataaaagaatgaatgcttcttgtcatttttgaaccaaagaagcgccgagaaattaaaggcgaaaagtcaaataaaattcaaaacatgcaaatccaataaaattattatgaaaaaagaaatgtaaacaattttttatgtattttattaaataaagataaatgacaaaaacatgtttttttctcaaaaattgagtccagattttagaaaaatttaaactattaaatttttatgaatagacgagaaaaattattttaattctcgaaaatcaaaattatataaaatccctaaatttttgttatatcaaattgttaattcattaaaataattttttctcattgagaaaaaataatttttaaatgtagtttattttaaataggaattttgaaaaatatttgcacaatttttcgagtttttaaaaattattaggtcttattgttaggggtttatttcttaaatgtttttggtctttggaggtgttttttgaatttcttaatgaaaatggttgtgtgaaaatatcgaaatagaaaacctaaaaaataagaaataaaatatatcttagaagcatcaagccaagctaaagtaagtctgatataaaaatatttgctaaataataaatcataatttaacgtaaacttaatcaaatttatccatcttggtattaaaat

SEQ ID NO: 9507 - DNA, 2400 bp, Heterodera glycines
agttctagccaaaaaacttggaaaaattgtcacaacttttgaaaaacttaataaaattttttgaaatttagcaagctaataaaacaattcaaatgctatcgtatgataccaagattgtgcaatttggttgtgtttgagaatagttatgagttgatttattcaaaaatttagcaaatttgcactttttgtgaagtgacctagcactgcccgggtattcaaatagagaaagtacggtaaaatgggggcatgtaaacagtaatattatgtaatttcatcaaatgtggctataatggcatatgattatactgctcttcatttggagatcaatgaacatgtaaaaagcaattttttttttaatttttcaacattaaattttgaacaaattatatgtttttttttcattttttaatattttgctaaatattttggcgttttttatgttttcttaaatatttgacgttttttcgtgaagatgtggcgagtggtgaatgtccaaattgaacggagaagggcccaaccaaaacagtctctcttcattttgccagactccgtccgttgcggcacttttttctgtccctgacaaaaagctttgccatatcgcttaattttgaaaataattttaatttaaaatattgaattttctcagaaaataaagaaataatcaagtcaatttaaattttatttaaatgacacttctcctttttaagataactgcccaattttcaattggatcatttatcaaacccaaaggtatgaaaaaaataaaatgtatgaatctaatcgcgaaaaattaggaataaaaaaaggcatttaaggcacgaaaatcccgaaaaaggcaaaaaaaggcataataaaagtcaacgtaggagcctcaaaccaagtggaaaatgcgttatttatgcttaatatatcgaaacaagagcgtagaaaaaaggcgtatgcctcaaaagtcggtctctaattataagatatatttcttaattttggggattgaaattcgtacgattatcggacaaaattgactttaaatggaaaatggcgggctccacggcgaaaatgtcagaggagtaaataaataacatgggatatggagaacatctgattctgtgtttttttcttgatattttgcaaaaatacgcaaattcccaattttctattcgacgatttaccgagacaatgtcgaaaaatttgtttattgttttcgtgaaacccccccaaaaaagccaaaaatatttatgagaattaaaaaaataatttataaaaaattgaaaaatattaataaattattttaaattttagtcaagaataaaccattacatttttcgttacaagaaattttctcctaaatcttattttccccttataattaggattgattataaattgtatgaatttacatatttttttgctatgctatggagaaaggtgctcaagaataacatttctacattatttttttttgttttatgaaggtttttaattcaaaaaaacgaaaaatacacccctaaggaccgaggtgttatggaaccaaaaaagagaattttttcgaaatttggtaagattttttttttagtattttatttgcctccgaaaattttcgttgacaatagaatgagataattaccaaaaaatgttgagatgtatttggtttgaaattgttgaagataaatttaatacaaaagatatgacattttttaaggttttaactctaaatccttttttttgttagtttaggtatttctaatttttttaaacaaatattgaatattcctattcactttttggaattttcgagggtttaaaacttccatattttgaccatatttagccattccatatttcgggcttttttaatccatattttatgtccttatttaatttttttagtctgaataattttttactctaattataataaatagatcacaatttttgtttgcttccgaataaatttaaatgtgccatatttttgtgttttgccaaatatttatgctttttgaaaatgttcacaattttcggccatgtttttgccaattaatctttatgtttcaacataacaattctaaagggctaaaacaatttcatttaaccattcaaaactctgttgagaatgaatttgggccatttgttgatgattcaaatcaattttatgtgtcgatcaatttgtgaatgtgtgcttctccccctcccctctccgctttttcatctttccgtccccatcggtccttggatggaaaagcttgcattttctaatttatacatttatttatttttatgcaaaaataatttaagtttttttaacatttaaaattttcagtttaaattttgcagaaaaaattctgattattacgcaaattattcattaaatataatgtcgagcagttggctgatcggatgaag

SEQ ID NO: 9508 - DNA, 840 bp, Heterodera glycines
agggctggccgtgatcacgggtcacggattttttcaatttttccgtggttttgatccgtgattggcattttatatagggaatttttattgagacgaaaataggtttttgagaaaaaaattaaataaacagattcatttctgtttagtaatggcatatttattagcctggtggttaagcctgctgtctcatcattgtttgtccattgggttcaattccttattgggataggagagttttcaaattttattcgtaaatttttgctctccaatccatttggtttctttaaaaaatcttttggatatttttccgtcgattaaattcagttttcgttaataaatttaaataaaaaaaatattcaaattttttttatgatcacgggaatcacggggtttttggggtgccgtgattacggatcacggagttccttgattggaaattcaatcacggccagccctggtgctgagtcgttatataaaaaccatcaataagggcgttatataaaaaaccatcaaatgaaaattttcaacaaatctacccataacttttgtcaaagtcaaccaaattagacattcttggtatcattcgatagcctaacatttctctattagttcacctaaatctcataaaaattcgccatgtttgagcaaagttatggccaaaagtacccaaagaaccgtgttttgaaacatttttggtcataacttctttaagactcagccaaattttttgaaattttgcaggctctaatagaggaaacatagggctaacgaatgatagcaagataactttattttgttcgtcctaagactattttgatcaaaatttttgatgaacaaaat

SEQ ID NO: 9509 - DNA, 4782 bp, Heterodera glycines
tagtccactaatagagaattattagggcgatcgaatggtatcaagaaggtttaatttggttgactatgacaaaattgggtatttttttgtcgaaaattcacattcgatggctgttatataacgcaacttttatttgagtttttatataaacgacattgcaccctccccggaggtccccgctccccgagaatttcttccccgcggggaggggtcggcgcttaactatacctcaaacaaaaaatgtaaaaaaaaaaactatgaatttcccacaaggaacggcacatgccgaggaatgttaaagccaattggacaaaactaaattcaaaatttctttcaggtggcggcactactctactgctgccagctgttgtgccgttgcctgtggcgtctacgctgggatccgaacgtgaacgcaattccgttgctgaccgcgctgggcgacttcctcggcaccacactgctcgccatcgcgttcctcgcccatgccgaactgttcccggagtatagcgtcaacggcaccaattgcactaacggcacaattagtcaacaagacacagttgaggatgccatgttgcaagtggttgagcaacaattgctgctgggcaatgccgacacaactctggcaacagaaactgctgaactgatgttgctgaaccgaacgctctgatcaatgaatgggtgactcatcgtgtcgcgatcatttttaaattattaattacggggggggcggcccggaggaatacgggttgtttcaaacgggcccaccattaattaacacattaagcgtgttttggtcaaaacttttttgattttaatcagagtcctcgcaaatgtcgcgcttaatttttaaggttttgtctttattttcaagagttgggcaatttttgaagatttatcaattctttttcgctttttcgatttttatccccaaaaaaaatcagtgattttccctcattttgcatgcctttaatgcacaaagcttctattgaatgtgagttcattctattttattaattgtgtatttaaattttaaataaaataaatgcaaatttcatgtaaatacatatttttccttagttctcttctccattcactaaacaaaagtttgaacttttatttacatattcccggatttttcttttatatcggtacatattttagacctttttttaactttagattttcaaaaaccaaatacattattctaacctttattaggtcgtttagcattttttttaccctatttacgctttcttagatttattattcaaaaaaaaaaattaataaaaatttgcatattttggtacgtattctgacctttttaataatatatatttcttatatttttcagacttttttttcatattttatgtatatattttgcgctttttcttgttcatatttacatctctattcatttatattcaattaaaaaaggactgactgacaattatccgcttaaacacattttatcattcaataattaagttagataatttattatgaaaactgcttatattgaggagaacgaaataagaaaaagacgtaataataataaaataaaaagtgaatgaatttctgataaaataaatgatcaattaggaaaatatttaaaatcaatttattgcctatggcaatttgaggaatttttagaaagaaagtttttttaggtattttgacgctgtttcacttagattttacagaagtgtccgtcccccgttcgttgttcacttgccttccgagacgagcttgtctaaaaatttgaaatttcaaaatttaaaattccattgagtaccgtaagcatccaatgtgagaaagtcgctcaactcgggctccaacacgaatttctcgagcagttccgaggcctccgggatgcgattgaccacagagccggcacggacgaggcgccgctaatgaaaaatgaaatttcaattttgataaacactaattagcaatggagagtttttcgggaaactatggaaaatctacctcagtttcagaagcgattgtcattttgaccagctgaggatcaactgtacgtccatctgaaaacagaaaaaattaaaataataacgggaaaatgaaaaaatcattccgtaccctcaaggcgcgcttcatggcgcgcccattgccacaattgggtgcggctgatctcggcggtggccgcgtcctccatcaaattgtacaacggcacacagccaatgccgcgaagccaattgtccatgtagcctaaaaaaaagtaatcaaagatggacggaatagagttcgatcatggtaaaatcaaggtctgtgatcatgagtcataaccctcagaaaggctttgatcaaaatgttcgaacaccgatttggtgccgtgccggtcgcctttcttcccctgcttttcctacccaaagtgatcgaaatgttcctgcggaagccggcttctgttcgcacgccttctggcgccattgtgagccgcttgttgtccgtctcgaatgactgcagttgcttgccgatctggttcgggccttgcatgatttggtcgaacacttcgcgcgcaatcggaacaagtcctggatgagccacccaagtgccgtcgtggcctaaaccgatgacattcaggcccatacccagactgggaacggggcggtggcaattcaattaagatgggaaaaggcaatttttgaaaaatgacgcaatttttttttcaaatttgtctaaatttcttcgatcgtatttatcggccaccatgccacaaattgataattatttattgacttaaaatttcgctataaaaataatatgtaacagattttcatcaaagagataagtgataattttagtatgtgccaaccgctaccggaattacagtattctaacgctctaatccctcataatcattatgccaaatcctcctgctattgattttttttgggggggggggggggaaacaatacggggggacgagctgctcccattttaactagtgatcagaagcgcctgctttaaccagtacaacagtaaataccgtaatccatcataaacagtaagtatgccaagccctgacgcattacaaatggtgccgacccaccgtccgatgcctcgcgctccttgtccttgcgcacagcgcccagtgcggtttcgttggcggccatgtcgtgtttgatcggtatttgtgccgccattccgcccatcgcgaaaatgttccgctggtgcgcaattttgatggacaaaagtgtgtaggcgcgcaaaaagtcggaagtcatcgctgaaattgggtgccgaattaattcttgatcactttgtttttgggcttactgatcagaaagcggtcgggcaacagaaatttgcgatggttacggaacacctgaggaatgatgagaaaattgaagtgagaagaaatatgcactggtcagagtaggcttggattgttttaagcccaaacaactacagatcagactcttcgggttgtacggtaagggtaagggttacgggctacaacccgcaaaaactttaacacgtaaagacccgcatcagtccaaaaaagtacagattacgggccagtaaaacccgtatacggggtctggaccgaatatgatctctataaaacccttcttttcttccaacagttctcaaataagagaagttttaaaaaacaacagtaattgattgattgatcagataaactattacgggctaattgagagaattaatgctaatttgagcatcagaacaattacaaactgatcagtgatcactgatcactatagtttaatctctccaatcataaaaaaaatttggaaagctgactttgatgtatgagaagatgtaatcccatcggccgcagttgatgccaacaatgtaatccctttaattatataaaatttaattatttattagaaaagttttcgattgcattgccaaaaaaaaaaaaaaaaattaaaaatggcatttaaattgaatttataacattttcccacttcaatgcatgcacaatttcgtccatttggaaggtggccaacagatgctcaattagcaccgtgcatttgatcgtcccgtgcggtaggcccagcagtgtttcggcatggccaaaaacatcggcccacagtttggcctcctgcgcattctccaatttcggcagataaaagtaggggccgctgcccttctcctgcaacgccttggcattgtggaacagataaagcccaaagtcgaacagcgaagcggacatgggcttctcgttgatcagcacatgcttttccggcaaatgccaaccccgcgggcgtattttgagcactggcaaatggaaattgacattaattacatagttaatcatagtacggtatcgaattaaaacgatcaaatttgatctggtctctaatttttttgtttgatctttcatattctaagaatgtaaattagagaatgataggctttctggcaaaatgtcaatcaaccgcaagaatttttaaaagatttaaaccataaaaaaaattctaaaaagaaaattttttcaaaggttttaattccgccaaacaaaatcccaacaaattctctatgtatccaaccagcagtgtcctgcttcagcgtgtactcctgcttcgtgaccgggttcacgtagtggatttggccacgaatggcatcgtacaaattgatttggccctcaatctgattgcgccaagttggagaatttgcgtcctacaaaatttatttgttgatcaatgattttaaaaaaggtaatttagcatagtaattagtagggctgatcgcgattatcggtctcagttcacgagtcaaggaaatccc

SEQ ID NO: 9510 - DNA, 4955 bp, Heterodera glycines
  unsure (1)..(4955): unsure at all n locations
ctctatttgttagcagagttgtcatcaaaaaatgatgaaattgagtaaaaagagtggtggtggtggtgtgccgtgccaatcaaatctttcgaataatttacagagttccgccggtctctcctttgcctgaggcatgaaattgctgctcattcactcacctcccatgtcgccaatgatgaaaaatgtcattttgtccagcttgtcaaatgcgcttttcctgcacgtttccgcgttgtaatttgggtccacgcccggccccttggcacacatcacgcgaacctcccactgcggaaattggaacatgcccgccctgtcggcaggaagcatgcgatgccgacttgagttggcggagttggcgccatccctctgggccaaacagccgaatgttgtggccaaaagcaaaagcgaaaattggcgcaacatcaaatggccatcaaaaaagagaagaaaataatttaatattaaactattctttaaataataaattgttagacgcgttaaattaaagatttcaaaattggatgcttaatcataaaaaagggtaattaacatttatttgtttttctcgcaaattctaattatttaatgatatttgttatttaaaattgttccgtattagaaaaacaaatgaaaatagggaaaaaattaggacaaatatcaaggttaatttttgtgtggaatgaattagcgacgacgccaaactccaaattagagaattacaacaaaagtttcggtggtgatttgatggaagatgaattgagtgatgatgattggcatatgaaaatacaataataaaaaaagtggaaattggaaccagttctcagcagtaattttgccaaaaaaattgttattcaaaattctcattaaaataatttcttttcaataaattttcaataaaacaattgattttcaattttaattaatttattataaattttgctcttgcagactttttttaaaatacactcaaggtcattatttataataattttccatttcgatacatttaagctaacttttgatgctgatcaaaaaaagtaattagtaatttacagcaattgtatcaaatcattccttcatgctgataggacaacctaaaatacacagaaaaatcgggaaatttttcaaaaaaattgacattttggggaacgaatcccgggcccagggattgttgtgaaatccccaaaaaagcctcgatgttaataagttaatttattctcagcggataaatgtgtgatcgacatatttccatacatagacggacgatatgagaaaaaagaactttcgactaatttaaaatgatttgtctctattttcactttgtttgtattaataaaatccgggctcaatcaattataattggctcaattaaatgttcgtaaaatggcgacgaaattaaagcagcaaatttcttttcataatttcttctctgcgtttcacttttgttgctcacatttttttccattttaacattttcctgtgcgttttcatatatttttttcattttattctcaaattccatccgaagtttttccgtttcccatagttttttaaattccttttcaaattgttccattgttttttgcttgaattttttacgccaaatttcgcttttttttgcttcataattcgcttttttaaattcttccattgctttttggattaatctattctgccaattcttctcattccccgtaattatttcataattcatttccaattcattttgaagttcaaaattaatggaaaaattgggatcattttgccgaaaatatttcgaatgatcattgaacctttggacaagcacaataaaattaatcaaatagccttctgttaaaaatattggcttcaccgctggcaattgcctcgcttcttcttgctttttagctgaacaaaaattataatttaaaatctggtaattagtatgaaaagatttgggtttaatagacttagaaactgaagagaccaaaatttcccgaggtttgaccccgagactcgaccccgagaccgagaccgaaaacccgagacacaaaaagccgagactaaaaattatttaaaatttttttgagcctttcttaatcaatttttaattttcaataatcaaaattttaagcggttctttaacaaatttcgcgttccaaaataagctattttacaacaaaattttaaaaaaatccaaaattccagttacagatcaaaattaggaaaaatcgtgaaaataaatttaaaaataaatacatacctccagcatagagccgaaacaaatattcgtaaaaaatgcgcaaatatatgccatatttttgacatcttcttatctaaagtattttaaaaatttatttgatttcaataaagcacaatatttgagctttaattagttttatttaaaaaaatttttaggatgctaaaaccatttaaatttataaataaaaataacttcagtacaaatttttgcactatgggatcccgcggattaatcccgaaaactccgcattgaaaatttgcgggatcccgcgcaggattgcatcatctttgaaatctcgaaaaacttcaaagttaactttgttaatggaatcaatccataaaaatttaaccatttaactttttttacatttttagattttagattttattgattaaaattattaattttatttaaacaatacttgacattctgtcttttgaattttcaaaaaatccaattcattcccgaggaatagcgcacaaaaaattacatttgcgggtcccgcttcgggattggtactaaaaaattttgcgggacgggaccccgcgggattaatcctgaaatctccaaaaaatgcgggatcccgtttgcgccaggctatagaaaaaaatatatttcaaaatttcataaactcaaaaagccaaacaaaaaaaattacgaactttgaaaatacattttaatttaaaccattcacaattccatttaattttcatcaaatacacaaggccaagaagagctccatattcttgcataatattcactttcatctcatggaaaacgttcgaataagctttgttgatgattaattaagaatgccaattatgtggattaaagtcacgaagagtgcgaaatgcttacattcatttcaaaaatatacatatttttattaaagattttttgaatatttcaaaaaaatatttttatagaatatttaaaatttctcaaaaatattttttaaatttattcaattcttcaattcttctctgttttcctgaattctttaaaatgaaaacttaatccaaaatctggaattttatggaaaaaaaaactaaaattatatttttcgtgcatttaagctctattagatagcccatataattggcaccctcatcaagaatgagcttgaagaatttgtcaaaattcgtcgcctgtccctttacaaattccacaaataacacgtcatcctgctaaatttgacatgattaaatttcaaatcattgaatgctttcttctcacccaattcaatgagtcatcaaattttgatctccaaattattttatgtgcgtcttcacttatttcatttgcactccatggaccgttttctttggcattttgttccgcctttttaaacattttctttaaatttcgatcaaaaattattcggttaataattttttccacaatttcatccgattggccattcgctgtgtaaattgccaactttaaaatggcttcgttaattggcatttcttcctgctcattatcattaccaaatgcgttcaacaattttggttcaaattcattaataaaatgtttgttactgaacaaattgtttaatttgtattgataacgattgctattaaatggatttaaataaaagcgcaaaactttggccaacgaatgcaaaacgtaaataattgatggttcttccatttcaaattggtgtcttttaagcatgaattttggcttcactgtgttgtgaccggcgaattctctaaacaaatattcgtacaaaatccccaaatatttgcgatatttttggcattctgtccgttcatattgttcaaatctcttccctattttggcacattgccaattctttctcataaaatacacagtgccaaggtaagcttcatatttttgcgtggaatattcactaatttgtgtttgttgatgacatttcataaaagcaattaacatattgtcgtccatctaattaaaatagaccaattaattaaataccctaacatttggtcgacaagtaaaaactcaccgatggatttgcatgtgaaattggaataaagaagaattgaagaataataataataattataaaagaaagcatagaagctgcagaaaacaaattattttttttacggattttttaaatgtgctgtttatgagcggtttgggaaagaattggcaatttggcaaaaaaaaaatggaaattttttaaattataatttcacgtaatttatttattaatttgtatttgaattagagagcataattttgtggttttgactttctgaatttgctgatccaatgcaaattttttcgataatattattttactgaaatattccaactctccctaaataaatttaaattgatgctctattgtatcagaaaaatttaaagatataattgttgttgcattaaatatatttcaaattttttttcaagccaaattataagcaaatgaatgaaattataaatgcttaaattattaagaaatttaattaataatttaaaaaagtgtcatatcgaattgctttataaacgaatcaatttttagctgctgatgtacgtgggtggggtgatcttattcagcccaatttcacatgataaaatggcttatccttcagtagaattatccaaaatatgtaaatatttatgagagttttaattattttatttttaaaaacatcacactaattaaattataatttctttcttccgtntggtttctcttattttattattttattct

SEQ ID NO: 9511 - DNA, 1397 bp, Heterodera glycines
  unsure (1)..(1397): unsure at all n locations
caatgcttttgcactgcccgtccgatactcaaattggtaaagatgactatccaagtaagaacgtaganngaaatngtctganaacnttaancaagtgagatagagaagaagaagcttcccctagagaaagattaatggatcaattgaggcgataattgatcctatatgattgagcaaagtggggagccggagagggaagggtcggtagttcagctggtagaacactagtctggaaagccagagacgccggttcaaagccggcccgccccattgggttttccctcaagggcttcctcagctcgttcatatatttcataaggaagagattttatccatttaaatattttttgcatttaattcaaaatgatgaaatttaattattttcctgaataaaattttgcatcaatttttttttcatagaaaaaacagcgacattttaaaatataaactttttgccattttcggcaatatcgccgccaccaatttttaatttatttttgccattaaatttcagcgcgatttttccaaaatgacattaattaattagaaaacaaaaattttttgccagcagcaggtgggattcaaacacacggccctccccaaacccgtggaatgctctttaaccaactgagtcacattattttttttaattgcgaataatttccatttgatttatgtaattagctcaactaaactttaccgatatgcacattatgtaataatttcatctaattatgtaattaatgtgattaactcaaatttaccgatatgcattatgtaagggaattcttcttccaataaatatgattcatttattcccattaaataaggaagccatcttttgtaattatcaatatttttatggtagcacaaataatgttgaaactctgtcaaattcacaattaggagttcaaagaattttctaaaatgtgaattttgtaaaaataaaattaaaaaaaaataaacgaaccgataaaaaacatgggaaagcattttttgcgctatatctgcggaatattccttcttttcgttgcacttttttacatgttcaaaaaattcttcttcactaattgttgtgaaatgttccttanacttttagataaaaaaatatacactaaaaaaataaatgaataaaatttattaagaaaatgagatttgcgaaattaattaaattttgtaataaaaaaaaagtttgtcgtccatgtccaaaatgggaatgaattgtaacaggaactaaaaaatcccaaaaattatgcggtataaaaaattatcgacaattatggacgaaatttttagttttagaaacaattaatattttgaaatttttaatcttttattatgactttttttcatttttggtatctttgtgttatgaatttgggtatggcttctttaca

SEQ ID NO: 9512 - DNA, 1513 bp, Heterodera glycines
  unsure (1)..(1513): unsure at all n locations
aagattggaatgcgataagttattttcttggcattttttgcccattcttcgttggcattcatagtctgatttcggactatgtgatgcgcatagccaaacagcaaacatatttctctgttaattagttcactgttttcattataatcatcatcatcatcatccgcaaaagcaaattccgtccgttccgcccattccattgacaatttatttttcatttcaaaaaaagtgttatcattgctatgaatctaagaataaaataaatataaaattatttttataaaatttatgagcgattaatttggggttttcgtctagaaaataggggcgcgtcccttttttgtcgtctcgcccctatttttttcccctcattttagctttttgaaaattcttttcaatattgtaataaataagattaattattgaaaattgctgaaaatttttggaaaattttcgatcacagctctgcattttccatttttgcctctgtttttgcgatttttcgccccggtataatctcttatttcgtgatttttcgcctcaaaatcatggaaaagcttttattctggttttttaactataattcgatgggttttttgttttaaaattaaaaattcgaaaattacggattagataacttacgctcatggtaaaaaaatacaagggtttttatataattattttaaacaaattatatacattaatttcatccatttttccgaatgcgtcttcaatggaaagattgaaatgccaaaacagcatttttacgtcgagccatttctttcggtccgattttacaaagttatttttgtaatttgacttcgattcgttggacaaaatctttttgaattcattttgcatttcgtcaagaattttgtattctaagcaaagagtcgaattaaattaagcacataaattatttaattcaaatgagttaaaaatcgagaattttgtctttttaaattaaaaattagatttgtgatcaaaaaaccataaaaaaccatggaccaaaaaagcatacatttacagagattgtaattaatattttcccgacccattgtggaataaattctcggggagcgccggggaatcaggtcgggggatcggggaccccgatcggagaatgacttaaattttctttaaacaaaaaaattcaattctttttactaattcctagagatgaagcaggaccggccctgtattattaggcgcgtcttggaaaactagaaaatttttggcccggtttttgagaaaatccaaaaatgtcaatttacaaatgcctggggggagtcggtgaaatatttttaattttgaaaaaatttttctattttttttacctttagctgacaaatcttggttatgggcgtcattttgtcttagcacagaaattggcacattttcttttgggcattccaacagatcatctttgtttttctgaaaattacaaataaaataataattcatttaaccgaaagnaatgaaaaagttcataatttttanatatttatccattaat

SEQ ID NO: 9513 - DNA, 2866 bp, Heterodera glycines
  unsure (1)..(2866): unsure at all n locations
tattacagtttaaatttgtntaaaacataaattcacttacttcttcgtccgattctgcattgtcagcgccaattaatntaatcgcaattaaaaataccgtgacaaaacggattaaattttttaaatgtgtttgtttcatctctgtaataaaaaaaagttggatatctcttaatgacattttatagattattaaacaactatatttttaaacatgtataatttttataaaaaaaatataataaaatgctttctaaaaataaaatctaaaaaaaattaataaattagaaagagaaaatgtaaaagaatgaataattttgaataattttgtaaatcaattggatatacgcaaatgatatgcgtaatatagaaattttttatattttacaattttaatttctctacggcgcccattgataaattagttattttggccaacaatcaattgctaaattggtaaaatggcaaatataatttgaaatgataatattaaagaaatggaaaattttaatgaaattgtttaaaattaaaaaataaatgactttaatgagtggagtggttctctcatcagatttcatttgatctgttcatttggcattgtttcgccgagttccatccgaaacaatgccctcatcaccaatttcggcacctttgccgttttcggcattattgctgttgttttggttggtgtacggtagcccaagagttagcggtggtgctaaattttctgtcattatgcatagaaaaagatcatgaatagcttttgagataacatttctaagaaatttggttatttttaattttttttttcgttaacgagactataactgactgagacttaattttcttaaaaatagatttaatatttgttaataaatcccaaaaattttcaaattttgcccggcgcaaccgttcggcaccgctttaaaagccttcccattcaaaaactcgattgatacaccattaataatgaatgatcctacccttggtaaatctacaaatgacaacaaaattttttccagaatttacgcgttagcatgaaagatgtctgcccgaacccatcaccagcatttgatggtgccaccaatgttccgttgttggccaaaacgcttaatccggccaccgccgacggcaccggcgcgtccagcacaatgggatgctcaatgtgccagtcgtaggtgcgcggagtgtacacgcggaaaatcggccaaacggtcaaccattcgccgttgtccgtgttgcattggtggtaaacgcgcaggtaaaattcgggcctatcaaaagtataaaatttttttattttttagtaaaaaattcacgtccagacctttgcctgggtttttgcgtaccgcttatttgttagttaaatattgaaaaaactgagcaaataagcaaatttgttaaatatttaaatgctttatataatttgcttgaaaaatttaatttacttccataatattattttaagccaaaattatattataaatacaattattatgcttaattgctccgtttttattcaacaaaaatttgattaatatccaaatgacacccaatgtttaagctttgacaaattttcattaatttctgagggtcaatggcaactcgtataatgttgtaaaaggaaactcgtattttaaaaaaaccataagcctacggcctaagcctaaagcctaggccaaatcgaagcaattgtacgagttgtcatgacaccatttttgataccgattgatgctaaaccaatcatgatcagatgcgcagccatccaacttccataaaccagtcgggtcgtccacctctgtgaatgtcgccttgtcgtctgagtccagcggattttgaaaatccgtctgaaattgtgatcgtaaattaaaaataataagcctcattttgattttttgttcatttggcatttttaaaatttgttataagtttttttattcttttttaatattcaaattttatataatttttaatatattgtaaatttatagaacatttatgaatctttcatgtttaaaacataatcaaagaccattagtcataattacttgtattaatttatacattttgtggactgtccaagtcccaaagttccaccaccgcccccaacactttggtctgattcttgttgcacttgaccagccctgttgcccatacacattctgtgtttgctgcgcaagatggaaaaagagttgcaagaaggacaaatgttgccgaaaatgacaataccaatccaatttggtgcattttaaatttaattttaaaatattaaatagtaagtgtcatcgataaaacaatttgaaaaagttattctttcaaccaattgaaaaatattcaaaaataaataaaccaaaataaattatttcgcaaaaccggtcattcatctcaattatttttaagtatattatgaataaaattttggtataaaataaaattatcttattctaatattcacattatgcatttctcatttataacattttacaaaagtacatatatatttttatatttttaaaaatgttttctcacaaaaaatttacacagctttggttggattgggagaggggaaaattcagcagattattatggcgcatttgcgcgaattcgaaagcggaatgcgggcataagtatcattatcaacacagcacaacacttattataattgcttgtttaccactggaaattcatgtaattgaaaaatggcatcaaattacgagtaaattcaaatatcataggtgacataaataactgaaatgggcgaacgggtgtagtgcagaattgggcccgctaaaaaaccgcaaaaaacatgtttcaatcaatctcttatgacctctaatcaacataaaaaatagtcccgaggtgcggaaat

SEQ ID NO: 9514 - DNA, 3079 bp, Heterodera glycines
  unsure (1)..(3079): unsure at all n locations
tctaattggtgggcgggcacctggataattttgaaatttaaaaattgagaaactcgctaatataaattttttgaaatttctattttcaaaaaaagggcccatcatctaagtattaccaaaactcaatttttttgactcttccaaactacaaaatgccttaaatattacatgtctcattaaataatattgcctctttaggtttattatttataaatttataaaatgcaaaatcaacagaatatggacaattcagcaaggtcaattttcgttggcaatatttcttacgatgtgagcgaagacgaattgcggaagcttctctcagcagtaaataaatatgctaactttgacatttttcagactttttacatatttctctcttttttattggtaattcgtttttagtgtggtcaaattgttagctttcgccttgtccatgaccgcgagacggggcgccccaaagggtttggtttttgtgaatttgccgatgtgcctcaagcggaggcagcaattcgcaatttcaatgggttcgagtttcggggacgtccacttcgtgtcgactcggctacgggcaatgatcggagtgctgatgaggtgatcggcggatatgccgtatttactgtacaattatccccggcagcctcgtagccggggggagggaatttccccaaccctcgaaaatggcaaaaattagtcctttttggcaaaagaaagctacaaatcactccggcgtttaaattttaaaataactggagaaattggcccgaagagcacaaaattacaattagatgtgttaattttctgtttttttttctttacttttctatgagaatgatattacacttaaaataaagcaattaaaatatgacttttatacataattttaaatttttctgggagaataggtaaattggaaagttcttgtttaaattagcattttcataattttctatttttactttagatgcaacacttccaaatgactttgactcgtccgcaaaatcccaccgacgaattgagtccttatgggcccgaattggagccgggaaaagcaccggaagtaattgcccgcacagtcgcgtcaatgcctcccgaaaaaatgttcgaattgatgcgatccatgaaggaaacggtgaacaacaatccgcaaatggcgcgccaacttttgatggaaaatccgcagctgtcgtatgcattgctgcaggtgcaaattcccaatttttaagtgttgaaattctcaattttaaaagtaaaagtagacctaacttttgtcggaaatgggaagatattaatttacttaaaaacaactcttttttgtccttattttttatggtaaatgtattgtcgataggtttttgtgtcgtcgctgatcacgaaattatattattttgattcgggactatgcatacacatttaacacataaattggtttgaaaaagcgagtttggtgttgacaattagattaatcaattctcctttttatattgtttttttccaccggaaggctcaagttgtgatgcgagtggtggacccgaagattgcctaccaaatgcttcatcgtgaacatgctcagccgcttgtaccgccgacttccatccccactcatatccctcaacaatttgctggcaaaccccctcaattgcctccccaattcaacatacctccgccctccgtcccctctcatcagtttcaaatgcaacctcctccattggtgccaggccaatttcaccacggatttccatccatgggcatggctccgccttcgctactgcaacagcagcagcaacagacgccttttacacaacaaaagccgacacccatcgctcctttggcagtgcctccggcagcgaccgctccgcaacagcagcaggtggtggacaggccgactgaatgccttcctcccgccagaattggtctttacgtatcatttaggctgttactccgcctccgcttagccaacaagcacagcaaagcaacagcgacaatttggacgaggagcagcaggcgcaaatgcttgtgagtgttcaaatgaaagatgtccttttatataatagtggcaaattacccctcaaactaaaaaacgatcaaaaaacagtaatttcggttatgtgtaaacggattttatttaaaaaagcaacaaaggccaaaggaattcacacaaataggggcccaacatttggcggttgcctcttttaaatttcgcgctgttttcacataaaccgaaaagtaccaaaaaactcaatcgaatctcaaaaattcaagatccgcgtgctgcaactcaccgatgagcaaattcgtatgttaccacccactgaacgtgcccaagttatcgaattgcgtaaccaactgagaagtgcggatgcaaatgcgtgaccatatcaaatcgcactgacagaggtcgaaaagccaactgatctcttctttctccatcaacctatttttatataatgtttatttctttgttgttgaaaatcaagatttaatgaaaaaatttttactaggtttccaaagttttttttatgcttgacccttttgctagactattcggtaaggaaacatttgcaaaacgtggataagaaaaatattcatttaaaacaaatggtaaaaacagcatcggtgaggttaaatatcattccgactgtatcttttctggcgcaagctccataaaattaaacaatttataagtttttggggtcgctgatcatgaatccagcatccatttcgaacttgtaatttgttgcaaattcctcgtagtaagttttggagctcatccattgattttgcaattctttagataccagcaattttggtgaaaaatgaattccgacttttggttcggggttagaaatggggcgaaatggatgtcaaacttagtcaacgaccccgaaaaacatgtaaatttatttagaaataaaaaaaatttggggcttanactgtagaatagccttctttgtcatccttataaaacgaaggatagccatcccaagatgaacatcagacctgaaataatgaaaaatttaattttcatcaggaggctcaaaacgcgtggatatttacgttttcaaaatttctaccaatttta

SEQ ID NO: 9515 - DNA, 1825 bp, Heterodera glycines
  unsure (1)..(1825): unsure at all n locations
aaacatcagaatgccagaggcaaaaagagaaatggtcagcagagggaagcgggcgtaaggcgagacagaaattgccacngtgtggaggaagtgatgtttgttggcattgtccaccgctttttntcgtctctcatcgatcgttggatccatcaaaactgagaggaatgatgggtttatggcttttgcaaaacgggaatttctcttctacctctgtgtgcgctaaagccggccattgccactgcagcggcgcccgaaagtccggcaattcgtcgagccaacgaattcatcgcaatttgagtgccacaaaatgtgaaaatttgactttcgatttcaggctgatggtgcacgagattcttgaccgcggctgatgatgttttaatgccaaaaattgaccataaatattcttgtgcagaaattgataaatctgcggtggattgtaaaaaattgaaagcgtatctttccattttaattgcgctaaaaacaaaataaatgcattttaaaaataaaattctaaaaacgccatccgttcctgaggtcagattttcttgaaattttgcataggctcatattttgatctcttctagagaagttttgtttgttatttttcaactcgagaccggctcttgcatttgacaagggaatcacaaatcttttttaaattgtggcaaatttggcgttcagatactaactgaataaaaaataaacttacctaattgggagcccaaattgactcgctttgattaaaaggctttttatcacatcattttcataacttgtccttatttcctttcgtttatgattttatttacagaatgtttaaacctcggattcctctttttctcacaacggacagagtaaatgtacaaagagcacattttgcttttgagagaaaagtaccatcaaaaaaattccttggctatcgtgtttgccatgggaatcaggtgatgtttcagcgaaaaatgatacgcaggttcacattggaatgtctcagcagattcgggaccgaagtggaagacgtggcaagtgaaaaaatacatttaaagagcctttaatcttgggaaattggcaagggtaaaagttgtttttgtgaccaggaaggaaatccaattcaaatcgaacacgataaaacagtatatgtattgttaagaaactggttttgggcaaccaacattcgtatttccgcaaattgagcgacaccaagcggaggcaattcgctaatttgtaccaaagggcgctggaggatttgatatctagcgattatgaactgcacggaatcctcataacaagagtcagattaaattagacaaatggattaaagaaatatgtttttttgttttaaattagttacaattcaaatcctatgggctggttataaaaagatgcgtttcagatagaagtgcccttgattttgaagcacattcaaatccattggcgctgcaccggcgacgtgcagcgcgacgaagtcagtttttgggaaggtgcggtagtgataagataagttttgcttgcccttaggaaattgaccaattgttggaaaaacacgcggattctctgcgcagaaaattaagcgaaatggtattgttgtcttctttgcccacttttattcctcgaaaaggcatttgtttaactccgatttctgcttttagttttttcatacgccaattcctccatttgtttttgttgaggaccggcgacatttgtacgaacaggtcagtcaacagccagggaaagcaattagtagggccggcaattttaatgacgaaacgcccccccccccaaaaaattgacgaaaagatgccaaaaagtgacaaagtccgaaatatga

SEQ ID NO: 9516 - DNA, 2212 bp, Heterodera glycines
  unsure (1)..(2212): unsure at all n locations
aaaacccatttttctgtatgagatttctacatttattagttattacttttcacatatgcatatgtaatttattatttatgtataatatgaaataaaagtaatccaagcgcataaaatttattccttgcaaattgttaaaaaaagacaatgatttttcctttgacgttaatattcattcgtaaattaatttttatccattttcctttatgcaatattatcatttttatattattttttctttatgtttaaaattttcattcataaatttattttacgcattttattttataattattattgccattattttaatttgaaaaatactttgaatgtaatgaatagtagttatataacctatattaaaaaacacttttttgttaccaatttaaacagaaaaatgacattttattatttgtttgcttgcttatacattattttgctcctcgctaattcatcgaccggtgggaataacaaaaaaggcaaacaaaatgctcaaagttacaatgaaaataatcaagcttcgaatacctataaagaatatttacctggatctgttctgaaaaatggtagaaacattaaagagctgaaggaacttttcgtgaaaaaaattaaaaaaattatgaaagaagcatcggaagaccgaggacaacgaaccacgaacaatgaatgcgctgttgatctgccagctgatttttgggatcaatttcaagaaattgcaaaactacctgaaattaaaggggttaaatttgatgggaatcgcatgataatagaagaaaagtgataaatgaacaatattttgaaacatgaaaagagatggatggaaaagatgcttttttagatttggttagtcataaaatttaacaattttttgctgttcttttatacttccgataaatttttgttgcgggaatcagtcagcgtgaaaatcttacagttttggatttattttaatgtactttctaatttaactcaacaaattggtttatttgcacaatcgttgaaacaaacattccatagtttccggaaggcggagtcgtacacttgcaaaaggtacaaaaaaaattttggggattgaagtagccaaggcccatatgactaaggctggcaagctaagcaactcctaaccaattgagtgatgatagggcaactgacgatacaactttaccaccaatcataacaattttcagcatttgcgcacagtcctaaccaccactaacttttgtgcctcctgccctaccgctcgtcggaaatctccactctaaattcaattttcttcaaaaaataaatttgcgctacgtaaaatttgaatactcaattttcaacaaaatagaaattatgcgacaaagatacattaatgtaattgacccatagtgtggcttttgcgggtagacattgattgattaattactatatatgttatattgacaaggagtttcgtctgcaaaaacaaaatctcccggccgaaggccgggagcgccctgaaagtagtggaagggtcttacaactttttgaggcgcatccgggaaaaatataggttttccggtccaagggccaactgagtaccagggactgatttctcattttttcgtgcgtttgacggcccataactttttttctaaatcccgattcaaaaactttccgctggtaggaacctaagttgaagtgttgtctaaaagtcaaaaaaaattccaggcctctacctatagtaggaagggctgcagaaaataggagaaattcagtaccaactttgtccacttcagtcccaggtgaataccgcgtcagggtttgatctgagcgagggggctccagcggacttattgtagagctttgaaagctcgatttttccaaattttaaaatttcgaaaattttcaaaaattttcgagttaggcctaaaaaacgtttttttggtttttgaattttatgattttttaacgatttttctgggaaaaacggagaccacttccaaaacatcatttttcgagttctatcgactggtaatttttttggaaaaatttcgggtttttcccggaaatagaaaaaaattttggcctgagcgggacatttgagtcctgggcccataactcgtcaggngttgattttagcgaaaaattgtcttagaacatttttgtagagcttttaaatgctatcgaatagtgtatttatatggccgnaattttcaaaaattttcgtgctangccccctagaaatttt

SEQ ID NO: 9517 - DNA, 2484 bp, Heterodera glycines
gggggggggaaagttcagaatctgggcggtgtaacattatttttttgtgcatttttacgttatttttaatttttatttatttaaaatatttttattttattaataataaataaaaaattttcatttgaattaaattattttttggtgaaaattttatttaaaaataattattttttaaattaaagaatttaatgttttttaaattagaaattgtcaaaaaaattatatttggtgtaattttcaaaaattcgtaactcgggttagggagggtgaattttcacaatcaaataattaaaaaatgaggaaaaatacggcgcattttatgacttttattttaatcgctgttgcacctcttctaatcacttttgtacctcttttatcacttttgtacctcttatcaaatttgtacctcttcaatctctgttgcacctcttctaatcactgttgcacctcttctaatcacttttgtacctcttttatcacttttgtacctcttcatcaaatttgtacctcttctaatctctggtgtacctcttctgatcactgttgtacctcttttaatcactgttgtacctcttctaatcactgttgtacctcttctaatcacttttgtacctcttttaatcatttttgtacctcttttaatcacttttgtacctcctataatcactgttgtacctcttctaatcacttttgcacctcttctaatcactgtgaacctcttctaatctctgttgtaactcttctaatctctgttgtacctcttctattgtacctcttctaatcactgtgaacctcttctaatcactgttgtacctcttctatttactgttgtacctcttttaatcaccgttgtacctcttctaatcactgttgtacctcttctaatcactgttgaacctcttttaatcactcttctaatcactgttgtacctcttctaatcactgttgaacctcttctaatcactgttgtacctcttctaatctctgttgtaactcttctaatctctgttgtacctcttctattgtacctcttctaatcactgtgaacctcttctaatcactgttgtacctcttctatttactgttgtacctcttttaatcactgttgaacctcttttaatcactcttctaatcactgttgtacctcttctaatcactgttgaacctcttctaatcactcttctaatcgctgttgtacctcttctaatcactcttctaatcgctgttgtacctcaaaatttaaaaaactggcgcgaagcgcccgtatgagttcaacgaatttaaaaaacgggcgcgaagcgcccgttcaaggctaacaaaaattgaaaaaccgggcgaagcgcccgactgaggccgcgaagcggcctaacaagctaaaaaacgggcgcgaagcgcccgtatgagttcaacggatttaaaaaacgggcgcgaagcgcccgttcaaggccaacaaaaattgaaaaaccgggcgaagcgcccgactgaggccgcgaagcggcctaacaagctaaataacgggcgcgaagcccccgaaacgggcgcgaagcgcccgtataagcccaacaaaatttaaaaaacgggcgcgaagcgcccgttcgaggccgcgaagcggcctaaaagtcccagataattttttaaaaattccaatttccacaaccagagctaatctaggtagcgaagctcccaaagcgcgaagcgctttttcccatcgggaacggctgggcacaccgggctgaaattttgcaccaaggggtagctcgagacggcgcatccgggaaaactatagaaaaaaattctcgacgcccagctgagtaccagcggctgatttctcattttttcgtgcatttgagggcccgtaactttttttctaaaacagaagtcaaaaagtttccgctggtaggaacctaagttgaagtgttgtctaaaagtcaaaaaaaattccaggcctctacctataatagaaaagcctgtaggtgcgcggagaaattcagtaccaacattgtccagttcagtaccaggcgaataactcgccagggtttgatctgagcggggggtggccagcgaacttattatagagctcaatgagctcgatttttccaaatttaaaaaattcgaaaattttcaaaatttctcgagctaggccccctaagaggttttggggtttttgaattttatgattttttgccgatttttccggggaaaacggagaccactttcaagcaaccgtttttcgagctctatcgattggtgggatttttggaaaaatttcggtttttttccggaaatagaaaatttttttggcctaagcgggacatttgagtcccgggcccataactcgtcaggggtcggttttagcaaaaaattgtcttagaacatttttgtagagcattttaaatgctatcgaatggtttactacatgatgtaaaattttcaaaatttttcgtgctaggccccctaaaaattttcggaaattttttttgg

SEQ ID NO: 9518 - DNA, 2365 bp, Heterodera glycines
cgatgcaaggaaaatcccattcagttgatcaattggatgtgcacttagaaaatacccagagttttttatagaaaaaatgcaactgatcaagaaatcgaagaggcattgttaaaaaattcaaccttaactgcttattttaagttttgcctagaaaatcctgataaagaaattaaatacactgatatgccaaaatattgtacctgggttaaaaaagataaaaagtggaaatatccaagacaaggttaccaaaataaaattggtagaatggtaccagtacgcccatctgaaacagagaaatattatttgcgttttcttttgctaaatgtttatggaaaaagttttaaagatttaaagaccgttaatggagttgaatatgattcattcggtaaggcatgtttggctagagggttggtgagagacgatgaggaatggcacaaatgtttagaagaagccacgtatttttctcgaaaacacgcgaaaggcttaagaactttatttgtaaatatattggtacattgtgcaccaaaatatcccgccagattatgggattcattcaaagagcttatggttgatgatattaaaagaaaaaatccttccttttcaataaaacagataaataatattggattaaaattaattgatcaatgcttaagatattatgacaaatcattgagagattttaaggatatgccacaaattattaacaagacaaaaattgttgatgaagatgagatttacgatcctgaaaatgaattagaattagcgaatagattaattatgatgatgaatgatgaacaaaaagcaataatagataaaatgcgtaatatcttagaagaaaaagacggacaaaaatgcatttttatagatggaccgggcggaaccgggaagtcattcactttaaaaactatttatcatttggttagatcttttaataaaaatatttgtaacatggcattctcaggaattgcggcaacaattttaaaaaagggtcggacattgcataatcgatttaaactccctttaaacattaaaaaaacgtctacttcaggcattgaaatcaatagttcagacgcagaagaaataaaaaacattgaagtatttatttgggacgaagctccgatggcatcacgttttattattgatattatcgatagaaaattaaaagaattaatgggtaatgaaaaaccatttggtggaaaaattttcatactaagcggagattttagacagtgtttaccaataaaagaatttagtacaagatctgaaactgttaatttattgattaaaaattctcatctttggaatttttttataactatgaatttgaccaaaaatatgcgggcaaatccaaatgagagggaattcgcaaggcaattaattgaagtcggcaatggaaccgctggagaaaatggttttataactgttcctgatcagtgtataagcaagggtgatttagctaatgaaatatttggagaaatcataaaagaaagtaattttaatgaattgtctaattacgcgattttatcaccgtataataccgtagtcgatcgatacaacgaagaaataatggaaaaattccctggtgaaacccatacttatcttagcattgacgaaactgatttgattagcgatttaactgttacacccgaaattcttaattcgcttaaatgccctagcatgcctaaccatattttaaatcttaaacaaaaatcgatggtaatgttgttaagaaatttaaatgtaagagaaggattatgcaatggtacaagattacaaattgttgatacaggtgaacatgttttaaactgtgttataagaagtggtgataaaataggagaaacaacccttataccacgtataacattaattgaaaacaaaaattttccgtttgtattaagaaggcatcaatttccagtaagaattgcttttgcttttacaattaataaaagtcaatcacaaacatttgaaaaaatagggatagattattgtgacgaaccatttacccatggacaaacttatgtggcactatcaagggccaagtcatggaacggcattaaaataaaactatctgaagataacaaagaaaataaaataaaaaatatcgtatggcacgaaacattactgtaaaaatttttacgaataaaaaattttattcgaatacttaattttatgaacggtttaaaaaggagccagtaaggtaagttaatcgctacattaatgaggagggtgtagcgtgtgatagggcgggactcttgatccctttaactatcacttaactcctcggctcctttggtacccgagctttggtgcgttcacgtcgcgggtaccgttagtaagcttaattgccgaagctaaacccaaagca

SEQ ID NO: 9519 - DNA, 1542 bp, Heterodera glycines
gcaaaagctcgcaaagatctttgaggaaaaattagacaaacaagcggtcatcaaattgaatataaaggtttgaataattttataaataaataaattaattaattaactgtttcaatattgaaatttaggagtcgaaaagcgacttcgagggccatgaattcgattgggtaattatggcaatttgcatggacaacaaaaacgaggaggaggatgccaagaaaaaaatggaaaaggaggaaggagaagttgatgaagagtcggaggaccgcgaagatgaaattcaactggttggtgaggtgaaactgtccagtactgaggctgcaaaaaaatcgaaaaagaattgagaagggaaaaatcaatgatgatgatgatgatgatgaagagattgttgttgttgttgcaccataaaattggaaatgttaaacaaaacctttctttcgaaagacaataaggcattattaaatttgcttaatatatctgcgtgtaatgaataatatatttttttgctccaaacagcttcagaatgaaacgaagatgggactttcgttcaatgagcttttttgaacagcccagcttgcccgaacagtcgtcatcatcacaacgacaaagccaacaatatgatgatgataatcaacagtatggcgaaggtgacacaacaacaacagcagcaagaacaggaggcagaaaggacaaacaacaaaaggcagaggatctgtttaagcaggtcacccactcagtgcatagacttgaacgcttctccgtctcccggcatataactgaatttgttttgaacgcaagtgttgaagaaccggaagaagtgatgcgcagcgcattccagatgctaatggcacgggcaatccaacattcagaacagcaaagtgggaggaaagttgtgaagattggcgttactctgcaaggcagaggtctattgattgggaagtgtcgccattgctatgctctaacccatccatttgaacaggcctacatgatcccatcgtcctacctcttcgaccaccagagcaaaacagcagcgacacactgatggccgagttggacaagctaggccaaagtgatggcgatgaagaaggaggcagtgaagagcacggcggtgcgcccatggacaagcggtcattgctgctcagcgagcctgtgcaaatcacggtcacgtgtctaactccaccgaccggtgcggggcggccacgcttttatccctatcagcattggggttacaacgatgcgcatcgaataaggataagaaattggggtgacagctattgcctattccacgctttgattgcttctcgtgcatatcatgaccctgtgttgttcaaagaatggatgtcagcagggcagcagcagcagcacacaatggcacggctgactttgatgcaagacttttgtgaaacaaatgaaacatttcggcgtctgatcgtcaaccgagagctcatgtgttccgcagttcgccgtctcatgcttgaacttgccatacctgaagctcaagctgcctatggaatggatcatttgcaggcggttcaggaatat

SEQ ID NO: 9520 - DNA, 1882 bp, Heterodera glycines
cttttgtgttgtccgccgaaagtgccgtcaaatttgatacattcaaatcgtatttttccattattttgttgatccattggtgcaccttttattgcaattaaaaatgcaaaaaattgatctcacttcaaatgacgtttcacccggaagtgactccaagtcaatcacacgggtttcaataccattatcttttgtaaaaaaccgaacaacaagaggaaaaagtttttgattcccaaagtttgacgcatcgatcgatatggagaatccaggaaaaaaatatgtatttacataaaaaaagaatccctggtcattagatgtggtatggaactttattttttttaattttgaagaaaattccaaatttttacggaaatttaattaatgttggaataggtactaaaaaagttgtttttttaaaatacgtgttaattctatcgattatttataaggatgccaaattggtgttcaaaataaaaaaaaatgaaaaatatgtgccaaagggaggagagattaacgggccaggacgttttcgtaccgccgttttcgtaccgccgttttcgtaccgccattttcgtaccgccgttttcgtaccgccgttttcgtaccgccattttcgtaccgccgttttcgtacgagtggatatgcaaaaaaaattgcattcaaataatttgtttattttttaaattacttttaatgttttgacagttaagcttttattaactacaaaatgaaccagcagcaagtaattaaaacaaaacgaaataatgataaattggtgcatgatggtgcacttcagtaacgatggacttaagaaattttggcggtgtgagtttcatggcccggcagaccaatgcaagggtatgctaatatattattttgaattttgaaaatcttttaaaatccaggacgcttgcacacggatttaaataacgttgtgcagaagttggtcggagttcattcgtgcgacatgaacgctgcgcatgtgtaatgtcagcgtcttgtaactggactcaagcgacgtgctgctgagacgtgcgaagcacctgcgaccattcgtgctcaagtgcttcaaaacacatgcacacctgtgctggcctcttttccgagcaaagatgccacaaaaaaggtgggttactatcaaaaacaattttgtaaataattttgttttctttttattcaggtcatcaaacgtttgcgccgtgatgaaaatgcaccgcgagtcgaacctctcaatttggagcagttggagattccgaatacctatcgtgtttataagcgcactgagattgacgaggagcaattcctgttggcggacactggcgtttttcaaattcacggacagaatggaccccaacggtaagatattaatcgtttaaaccattaaatgatggtcgtttacactattaaggattctcatttttggaagagcgtctacggcagattggacccaccagatgaaagacatttacgcggacggcacttttgcattgacaccgccgcttttcagccaaatttatgtgttgttggcaaagtaaggttaagtgtgttgtcattaagtttaagcttttttaggagagatggctgggtctttcccatttgctactgccttttaacgtcgaagtgtgccgcaatttatacgcgtatgttggagcttcttgtggaacgatggccaaatttcgagccccgaacaatttcgctcgacttcgagttggccatggtcggtgcggtccgcacagtctttccggcgtgcaatgtgcgctactgtttttttcacttggtccgcaacatgaagaagcaaataagggccctgggcctcactcgtgtaattttagaattttttattataaggttcccattcaaactcattaaggtttacaacactgat

SEQ ID NO: 9521 - DNA, 981 bp, Heterodera glycines
ctcattgacaagatgagttgccactggcttctgctaaaaaacagagatgttatttttaaataaacattcattacacagaaaaggcggagatgaagcacgtcctccgctctcaacagtgttggacattccttttctgctgttttcgtacaattcatcgcctaacatgaacattttgtaagtgatagctgcagctgttcgttggccattcttttttacaaaggcattaaaaatggtggaatgatgtgcatcagtgacgtttagaccagttaaaaaaataagctgacggagtgcgccattgagaagatgcgaatcaatgtcctgcggttccatccaagattctcttaatttattttgatgtctgccggttttatgtttgggaccaaatcaaggatttcaaaaaataaagaaatttctaattaaaaaatgcaaacaatatgtaatttaaaagcgtaggtcgctgatcagtgatcacgaatccggcatccattcgggcaatttcgaaaacggacacaaattcgaacataaaatcgaaagttctgattttcgaattaggtaagcatttttggttcaaacttcatttcccgtttgacagtatataattggctacatgacatttcgcctactcgacatttcgcctactaagccaaaaaattcatttcgcctactaacctaaaattggtcatttcgcctactgacatttcgcctactattcatttcgcctactgacattttgcctacttttcatttcgcctaccaagccaaaaacattcatttcgcctactggaaatacataatgccaacgagaaaataaaaatatctatcattttttttttgcatcaaataaatcgggtcggggtcgttttcgcgtgggccgttttcgcgtggggcgagtttttggactataacttttttctttgtcaaccaaatccaataatcttggtatcattcgatagccctaagtgttctctattagagtacaaa

SEQ ID NO: 9522 - DNA, 2109 bp, Heterodera glycines
ttttgggttagtaggcgaaatgtccgtacacctatataattccaccaaacctcccccccccctacatgagcgactgttttatttcctattcgaaactccgagggtttttcggggatctttgatcacgttctgacatctatttcaacaattcctaatccttaactcgccaaactcgaacaaaaagtcgatacatttattaatcggagacacatatgtaggtaggtacctaagcattatttgagttaattcgtatatttgaatcgttttttgttccataaatgtgcattttttgaaaatttaaattttgactttttgttcgagtccggattaggggttcaaaatggaccgaattggatatcagaattggattctgcgaacatgaaacaggatggcgtaaaatcgaaaaataattattaacctttatttcattttgtactttggcatagtttcccttactggacaacaacagcacatcaccttcttcttcttctttacatacacactgatcggtttgtttctgcagtgcttctcgtcaataactaatttaaacacacaaaaaacagctttaatgagacaaaactttgccggttggcccaagacaattaataaatgaaaaggaatgagaaaagagattatgcgaccaatgccgaaagtgacaacattttttgtgggaatttagagatcaatcagtccaatgctccgatcactccgttgggaaagagagaaatagcagccaatacgccactcccaactcctttggcgctcatctcttcccgtaacgcatcagttgtccatcgtccgcatcaatgacaattacggaccgttgttcctcgggcgactgaagaccacgttgggagcgcattatggccgatgccgaagagccatcgacgccgtagagacttcgtccaaagcgatgaagctttgtttggccagcggaagaaagtagtaatcggaacctttcctaagcaatggaagagagagagagaaaactgtggttcttgactaattgtcaaattaattgactgtatcacacatggcttgaaactggaaaaccagaaacatgatgatttaatcaatttcgacttgactccgaaaatcccgactcctttttccaacccagacgtcttttcattagtttcagtttttaaattttcactctgtttcaatttttttgggcacagcacaaacgtactaattgacggggattatgttggaagaacattgggtaaggcgattccccaggaggagtaacaatgcgaaacacatcatcatcgaatttccatgaacggccaactcttggtaaggcacctttgtttaaatatgttagcataaaaacattatatgacaggtctataagacctcatagagcagcactttaaatggacgaaattgaccagcatggctaaattaggagtcattaaaagaaaacagcgttttattggcattaaacagcaagtcgtttgtacattgaacaacccaattacccacgctcgaacttactaaacgatagcagaaccaatgccttagcattttccctcattttcgtttgccagttctttaattgttagctcgcttaaatattttttggttttgagtagttagatcagagcagcagtaggagacgagatggactcaacagtaaaaaaaatgaataaaaccccaaatgaatgaatgtccgctccccccccccccctcccccgtttgctgctgcctataaattaaatgacgtttcatttcaaccgctcgtttctgtccagagaaagccaaccaaccattattctgttacccatttgtcccagtaaatttcacacataaattcgtcctcactcataaatcagtggaaaaggaaaatgaaagaacataagggaatgaacattggattttccaagaaatggtaatacggtcatggtcatatgtataatgcagttctttttgtagacaccgaaattgaagtcccccccccctccccttatctcactccctctccccttctctcttctctccccctccccctccccttatctcactccctctccccttctctcttctctccccctccccctccccttatctcactccctgtcccttctctcttctctcccgctcccc

SEQ ID NO: 9523 - DNA, 2546 bp, Heterodera glycines
  unsure (1)..(2546): unsure at all n locations
acaagaaanattctatgaaaaaaaaantttttgagaaattttcattgtgaattactaagatttttcaaaaaaaattcaaaaaaatcgttaaaaatttctcaaaaaattttttttcttagaattttcttgtaaaaaaactttctaagatttttttcttgaaaaatttctaagttagcaatttttttttttaaaaattttctcgggggggaaacgattcgggggggaaacggcgggggggaaacggcggggggggaatcggcgggggggaaacggcgggggggaaacgaggtgccctcgtgtaaatgattgtcaaacattatgccaatttattaaaattatccatatgattggcatccctactgatgataagagaaagagaatcaaaaggtcaatgtaggtggaacattcaacccgtaccatgccgtttcaaatgccagtcacagattattattattttttttgaattaaatatgctctgtaagaaattatagcgccaagaattttttttcggaaaaaagcgtaatttttttcatttacactttccgattttttttttgtgtgattcttaatattccaaggaggtttaagaagccataacttttgcacatttggactaaatcgtaaatacataggtaggtggtttcgtacaaaaagctcaaaattatatgtttatttaaaatattatggaaagcgtcattgttaacactttcttttgaccattaaaatgcaagttgagactttttcgagtttttaaaaaatccttatttttgacatcacaatctctttttgacctgcgatgacctttttttagaattcgagcacagctctgactatcaagattattaatatttagagccaaagaaatcatcctttatttgaatgtcttcgtttgggcgtggtgtcagaggtgtaactggggtatcatccttcgggggcagaggaggcggcaccggcagaagtttcggcagtttttcagccgataaagccgataagtgagctgcagcaatattttataacaaatgtctttccttaagaggcgaagatttcggtggttctgatggtgaacgaacaggctcattcggttcagctggaggtggtcgaggcggtactgggggagatcgtggtggttctggaggtggccgtggcaactcgttttcttccggcgggggtgagcgcggcggtcgagacggctcgttttcttctaggggtgagcgcggcggtcgaggcggctcgttttcttccgggggtgagcgcggcggtcgaggcggctcgttttcttccgggggtgagcgcggcggtcgaggcggctcgttttcttccgggggtgagcgcggcggtcgaggcggctcgttttcttccgggggtgagctcggcggtcgaggcggctcgttttcttccgggggtgagcgcggcggtcgaggcggctcgttttctttcggcgggggtgagtgcggcggtcgaggtggctcgttttcgttcggcgcgggtgagcgcggcggtcgaggtggctcgttttcgttcggcgcgggtgagcgcggcggtagaggaggcacattttcttctggggatgaccgtgcaaaattttccagtatgttttgtattcatcaatcaattgggctcaattcataattctagccgaagaagagcgtgcacgtgctgagtcttacatcccaaccactcgcaccatcgaggacatttttggcgatgatttgaaggtaaaagacaaatacttggacattcgtgaggacgacgatgatgtggaaataacggggaccaacagtggagaatgtcaacagaccttagagtaagtgtgccttttttgttttttttctggtaacagcacactgttgattttgtgcgtcagcaactggaaggaagctggctttgaagagctgctggctaagaacatcgaacgttcgggctacactgtgcctcggaagatccaatcccgcacaattccactcataatggatggtttgtattggatttcctgtctgttaattgatctctctgcaattttaggccatgacatcaaaggacacgcggagacgggcagtgggaaaagcgcagcttttttgctgccgatcatcaatacaattatggtcaagaagaagaacaacgaatttacctccaagcgcatatgtccttttgcactaatcatcgaaccaactcgggaaatggtgattcaactgtacgaacaagcactgaagatggcagacggtgggtggactttcatttgtgataaaaacggacgctacggaggaactgttgttgattttgtcaaatcaaaaaagaaagtatttttctatgggttaccttctcatctccacctcccctgctctactagttacactaattgaatccaggaacatactctgtttgaatgcattatgtaaaaaaaaggtttaacttgaataagcattccaggttgtgacgtttctgtttctcgcacttatgggaagtacaaattccgcgagaacctgaaggacatctctacaaatggctgtgatattctcatcgggacactcggccgctttcagcatatg

SEQ ID NO: 9524 - DNA, 2420 bp, Heterodera glycines
  unsure (1)..(2420): unsure at all n locations
ctttcagcatatgctcaaagaagaattggtagtggccttaaagcataattgntaaattcttattttctgttcagatccttatggaacagatgaaggttttggttttggatgaggcggatcaactgctggaggatgagagcgctcgtgatttgcgccaaattgctaagattgacggatggcccaaggtaaaatagtgcatgacggaggttgtattgttttatttttacacttaaaacccgtgctttttcggtggaagaccgccagactttgctcttcagtgcgacttttcccgatgaggttcaaaaatgggctgacgaatgggtgaagccaacggcgctctttgtctccaacaagaaacctgtctcagcgaatgtgaaggttgtccaaaagtttatccgtgtcagtcgatcttcaaaaaaccatgagttgcttaaggttggtattattgtaagcaatccttcaaaaatgcaactatttcgttaagttattcgagcaagagcgtgctgaactgaaggcggaaaaacgtgtgttccctccccttaatttctattcgatgttccatcatttagcagatgagcccgagccaaaaatccggcctactatggtgtttgtgaagatgaaacgcactgctgatgtcatctccacatatttgaacctcaacaaagtgccgtcaaccaccatcaatgggttgattggttcttttaggctctttcttaatcaaagtgtttcagagaccggccgcaaaaacttcgacatgcggccttggatgattttcgggctggccgttaccaagtggtcgtcacgactgatgtctgtgctcgtgggatcgatctcaaggaattggaccatgtttgtctgggatgggttggaattataaacgaaacaccaaaatgcttataggtgatcaacatggacttacccatcgactacacaacttatgtccatcggatcgggtaattaattaccaatgataaatgcttattattcctttgtgtggttaggcgcactggtcggatcaaagaaggagcatctacatcgttttttgatctcgcggaagatgttgagctggcgaaagaactcgttgaagtaacttttattggttggtgccttaaatgtttcgcacccacagggactccaaaaacaagaccaagaagtgccggattggcttaagctggtggctgaggggaaaatgccacttgacgagtcggaagcagccagcggtgcaaattcggtgccgatcgctgttcgcgttccgtcggaaactgttcctgacaccaattctttgccaactgctgtaactgttccgactgataatgtggctgcaaccggtgctaattcggtgccgcttggaacccgcgttcaagacgacggaaccccgaatggagaagcaaaggacccagccatccagaacaattctgctccattgccttctgaagacgccaacgatgagtggtgatttgagtagggtttattcggctccggactttcattgttttgttgttcagccttatttattgacgatctctttcatcattcttaaatcacaacgtacttagacattcgtatagctgccccatttgattacttacggatatctagcaacaaatttttgatcagtgtcttatctatttttgagagttgtttctggttttgttttattactttgataaaactttttattgcaattcacattacacgaattagaaacgccgagaattttccttggcaaataatgcgagagaaaatctcggttataaaagaaattagaggggtcagttgcttctatttgtgagcaaatttttcaggttgtaatttgatgacctcataaatttatttttatcagatcattccttcgtggtgatctagacaccctaaaagtacgtgcaatcgcggaattttttataaaaaatcttagattttgcgaaaattttaccagattttgagtacgctcattggaaagagcataaaatgttttttaaataactcaaatggttcaaatttttgaaaaattcagtcaaatcccagaacttagccgacaatggtcaaaaattgtaaaatttagaatgttttcgaatgccttttttatcttgaattcaaggatattttcaactgagagggctcgatttcaaggattccttgccattcaaggacgaatgggaaccctggctcggatggaatgtgttcgtttcatcatcggtcccccctccccctataaacaaaatttttcgacatgcgaaatgcattttccgacttgcagttcgcgcccttcccttgtgagtcgtagaatccagcactgacactgaaaggtcgaaccaattccctatcatcaaacgggtgggcgtattttgtatgtgtattcgtttgtgacagtgctccccgtatgagcataaatcttgaagtcccctttggttgtgactgag

SEQ ID NO: 9525 - DNA, 1036 bp, Heterodera glycines
tgacagtggaaaagggcgaagaaagtgaccacagcatccgatttgagttggaccgaatcggtcggatcaacttctccagggatttgccagtcagaagggtaaaattcttgccaataaaaattgaaatttctttccttgggacaaatggcaaaaaaaggaacaacaaaacggtgccatcgaaatttaatttattgtaaaatgaatgaatgattcatttcgtgactctcgagtgagtgttttgttttccatcatttcgtgttgtcccctcgctttaatcttcgcattccgcgatggatcggtaagtgtccgtctcgcgcgccttccgtttgtttttctccaattgcaatttcgactcaaagccattggagcggttcacgccgtcccaccggtagccgggcgcaattgaaaagcgattggggggaaattggcctttgtaggaggggtacactgaagcgggagaaatgaaggcattttgaattggcaaaagcattgctcaaacagattttgtcgtcaaaatgaatgagtttattaggtaaccatttagagaattatttttccgaattttaagaaaaaattgcattaaaaattccaaaaattttccccggaggcgcctaatctcggcatcacggacccccaaatctcatatttttgaaaatttaaccaaaaatggcaaaaaaaattttttttttttggcaaaaaggggtacaaaagttttgcttttctccctggcgatgaacatttggacaaaaaatttgagactcgaagagcaaaaaaaggggtattcggtttccccctcccgaaatttttttggctacgggcctagggttacgaatgtgccattttaagtggtgccaattccaagcataccaacaccggtgcgcatttggactttgtgggatttgacgcggaaatactccgccattgggtcctcctcgtgcaactgttccttcaaccgcgcgttcattgcctcgtcgtccgcgtaacgcgcaaatccctcgtccaacactttgcccatctcctgcagcttggcatcacg

SEQ ID NO: 9526 - DNA, 2930 bp, Heterodera glycines
  unsure (1)..(2930): unsure at all n locations
gaaagcaacagcagaactgtgaggacacattttgagcgttaaaattaatgnttttttgtccgaaaataaatgcggccccctattgtttttggagcgaatttacgcagccattaatgcaaaatgaccggtcatgatagctccaaatggacaagggttttcaaaaccatgccaatttttgcgtatttttttatcccaaatttgttccgttaccccttggaaattccttttgtcacattttccccaatttcgccccctctgcgtctctgtccccttacttcctccgcctgtgccacccctcggttccacagagaatatttggcctccatttccttctgtttggccgcctcgcgctctttgcgtgccgcgtcctccgccgtctcgcgcttctccccgcgccgccttcgctcaaaccccgtctcgcgcttgcgcgtttccgcgtcgcgaccactctccgcggtggacgcttccaactcattgaggcgcttaaaatggtcaaatcatttgtaaatacggacgtaaaaagtgccgggccagttttcctcactaatcaggtggaattttgtgcaatttaaattttaaaatggaacgaaccgtcgcccatttccttcccatgttttgctcacttggaggtccctctcgcgcagctcgcgttcctcccgctccatcgcctctttgctcaaaagccccgcgcgtcctccgttgtccatccgtcgctttttggcgattgttggcatttcgttctggtcaaaacaaaggaattattcactttgataaagacaaatttaaaaagctatcaattaagaaaggaataaatgccaaaaaacatttaaggtttataattggtgaatttatttgggaaatgttttgcaattgcaaaaccgggttttactattaaaaagaatcgatgacaaaatttggaaaagcggaaatatgacaattaattgggggttttgtctttctgtcactgctctcttcccctgggaattttcgttttttttttactaaattttacatctgtcccccggttttccattgttcaaatgaccaaccgtttcctcctccttaatttcgtgctttgcctctgttgtgtcttttgtccgtcgtttcttttcttttgaccgacttttgcccctttcttcgtccgcttccaaatgggcgggggaaagcggctcttttttgatgtcgtcgtccgaaagggctaaaattcagttaatgaataagtaattgaatcataaatactccagtaaaatgcacttccccacctccttcgacggtgacgaatgagtccgttttgaaattgggcccagccatttctttgcccttccgtttcaatgccatcaaattgcggtcgatgtcgtcccattagctcatcgtcctcatcctcctcaattcgttcttcgtcgattttgctcggcttggcatgcggcgtccgaatgaaagtgtcctcgtcgtcgagcagtcgcattctaaaaacacttttcgtaattttaaaccaaattttttgctttttacccggcactttttccgcttttttgttcctttgcgccctttttctttttcttctcatctgtcatgtaccgctttagataatcggcacgagaagaagccgaaattgaagttgaatcggccataaaattgaataatttttgctgaaattttaaaattttttttattatttaacaaaatccgaattttagaaaagcggggaattgccaattcagtctcattaattaagtttgcgaaaaaagtgccaaatggaaatgaattgctttttagatgatccgtgagtggattttgctaaatgccacccatttggaggcgcgtctgcacatggccaccgtccacccgaactgtggcaagtcgccccggtgtgccacctatcacatgcttttgcacactcaaattgtgtacaaaagagtctatccgttgtgagacaaaaccaaaggaatgcaaaaaacaaaaataatacccgtgattatttacgaataaaactcatgaataacagaagaaggaattaagtattccctatcatcattttacattttcatttgattatttgtcaattttatttgaaaaaatgaaaaatgtgcttcaacttataaatggaataaaaatacaacattaatgaaataataataaagaaaaggcataataaaattaaaatgagaggtttttgtgggagatttaatttaacatttataaaccattcaaaatgatgagtttgggaatgcgttcgttggtttttcttttctcgcctctcccaacaccaaacagtgtcaagtcaatgtggcggcagtgcgtttggcgatgagaaaatagacaaccgccgctgctgcaattccgcacaaaacgacgccgaggaggggagaagccgagggaagggcaatcgaagctaaaacaaatttgtaatttattagtctcgttgatgcaccgactttcccgttctttgagggatgaaatgtgctcaaccaattggagagagtcggcgcaaaagcgatccttgaaccaaaaaattattacgcaactgtcctttggatgtgccaattttaacgaaaacttgttaaaaggtgtaaacaagatgtttttatattacaatattttgagttttttggatacagctatatatattttagtccgaaaataaaccattttgagctaacaattaactaaaaagaaaggcgccgccgaggaaatttgtgggatttaggcctaaaatcttattcaaataagcacaaatggcaactcagtttggggtggtttagtgtttctgttcatttaaacccgtacccatgagtacgccgctgtactgtcttcgttgttcgcaaatgtgtacagtttgtagcgcaacatagtcgacccgtagatggacacttggtanatttcgcgtcggaaatccctccgatcttgttgctcttcacagaaaacagttt

SEQ ID NO: 9527 - DNA, 3712 bp, Heterodera glycines
atccgttttctttttagggtgggcatttaccacatctgtccgcccatctatattctctgtttttttaaacatatcaatgatcttctcgtcgcccgaggagaagtcgacagagcggaagacgaaatgaacaacgacgaggatggtcctccgcaccaccaattcccaccgcccattcatcaccctgtgtggatcacaccgaatcatatgcgcatcggctacacgtgttttgacaacacaagcacatacaaagtgtggaaaatcggtgtcaaatgttaatggcattgaaataatcaatttttctccttttggtccggtacatacgaaaaaatggaatttgtgttccagtggggagaatttttgaactttaaaacaatttagcaagagcccgaacgtttgagctggtatactaagaaaattctgatatgaccagcgcaattgcgaaatattacaaaaaaacacaaattgttattcagcttctaaaatttttcaaaaaaccaatagggatttcatcacaatgcttcgtacaaaagtggctttttattttgttgttcaccgttaaagctcctattttttctgctattcactccctgcccccctagggtttcaaccgtggcaaatggaacgacgacttggaaatgaatgtgtggaagttggcgcggaaaagcagcatcaacatgttcttgttcaatggaccgctgtgcttggccaaaattgcgacgaacggggcattgtgtgtcaaatacaatgttaaatttttacaccgattttcaaaaaagtttcctcattgtccaaatttcacaggtgattggtgacagccgagttggtgatgtgccaacccatttcttcatggttgtgctgattgaacggacggtggacaacttcgtattggaggtttagaatttccgaggctattatcacaattactcccgcttaattaggtctatttgatgccaaatgcgccaattccggacgagaagccgatcgccgacttcctggtcagccttgacacggtgaaaattgcggccggcttgctcattttcgaccacctgctcataccgttgttgaagaaagtgaacggaagaagcattatggagacgaacggggcatttaatgtgaaatacaaggtttaaattttaaccgattttcaaaaaattttccgctttgataattgaattggaggtacccaaattggatcggctttccattatcatttaaaaaattctaaatgtttatgccttttttaatgggatagagggttcaaaacttccgtgtaattggtcttaattactcccggttaattaggtctatttgatgccaaatgcgctgttcccggacgagaagctgttgatcgccgacttcctggtcagccttgacatggtgaaaattgcggccggcttgctcattttcgaccacctgctcataccgttgttgaagaaagtgaacggaagaagcattatggagacgaacggggcatttaatgtgaaatacaaggtttaaattttaaccgattttcaaacaaaattttcctcattgttaaagtccaaatttcacaggtgatcagcgacagccgagttggtgatgtgccaaccaatttcttcatggttgtgctaattgaacggatcgtggacaactttgaattggaggtacccaaattggatttggttttccattatcatttttaaaaattcgaaatgtttattccttttttaatgggacagagtgaccatttttgttttctatccactacccattttttattccaacttccggataattggtcttaattactcccggttaattaggtcgatttgatgccaaatgcgctgctcccggacgagaagcttctgatcgccgacttcctggtcagccttgacatggtggaaattgcggccggcttgctcattttcgaccacctgctcataccgttgttgaagaaagtgaacggcaaaagcattggtggcggtgatgaccaaagtaatggaatgaatgatcatgtgcaattagacaacaaattgcaaaatacccaatgcttgttaaacgaaatgcatagaattgtcgttgcttgtaaaatgaataatttgttatgtataaagccgatgataaagaatgagattctacattgtgcatgcggtagggataattaccccataaaacgcatgaaaaagcatttgcccgttttttatagacccttaaaaattttaatattttttgtggggctcaattgaggccatttgattatagttggctgagcctactgccgtgccggtaatcactttttttgcactcttcattacatatacagtcaggtgcaaaagtattgcctcacaaaaaaaatttttttttaaatggttttctcaaaaatgaatggtgaaaaaaagtcttatttacccaaaatgcgtgacgaatacaaggtggtcgatctccaaacggcaggggaaatgttttttaaatgccaattttcaaaaacgaaacaaaaaagatatttttttcaaaaaaattaattttttaaaaaacgagaaaaagatttggaaaattgctaagtattaatttcttcaaaaatcttttggagacaggaaccgcgtgggggttgaatgtgatgaaaattttagattttccttgctggtaccccccccccagaccgagcctcaccaaaattttccaaaaaatttgcaacatttttcaaaaaattcacaattttttgatgaaaatctgctaaaatggtttaaatcgcaaaatttgttcttttttggacaaaatttcgttaacaaatcgcattaaaaaatgcaaaaattttcccggcggcgcctgtcggcaccgccggaccccatattccccaaaagttttttgaaaaaagcgccgcaaaaaaatcaacttcgatttaaagccaatgtgccggtaaatatccatcataggttccagactcaaaattgcataaaatcacgttttctaaattgatcagaattttcattgccaaaattggcctttttggtgaaaatctgttaataaatcaggacgaagttacaaaatttttccggcggcgcctaggataatttttcgagtgcccgacccgaaacctgaacccgaaatttttttcaacccgcggcatcactgatttgcacctacatctttcacaattgatttcaattggccgtgagcaatgcggtcacaactgtatttggagggtgtcaaatcaatttttgtttcttccattttgtgcgaaatttgcaaaagaaattgaaggaacaaaatttgtggcaggttttaataatttttttttaattagctgtttcagcgctactgcaccgattctgtgtttgcaatgcggatgcacggaccaacaactagagaccggaaattttgttttgagggaaagtaattagaacataattcgacgcctctcggtctgtaatgcacaaatccgaaagcattttttggcggaaaccattttgggccgaattatgggcccgtgactgaagtggtcaaatggtggtgggactgaaccgtccaaagccgtaaaacgcataaaatgcaacaaaatagatatcaatcgcttcctttcggcatgtaaggatgaatccgaaagaattttgatccaaaaagaaattgacaaaagttatgggtcctcaaaacctcaaaaattgacactcataaaaaatattgtaatggactgtaagtttataaattaaaagtgaattggtgagtgtattttggc

SEQ ID NO: 9528 - DNA, 895 bp, Heterodera glycines
catgtaattggacgaacggagatcgtaattaaataatgaaaaattcggtaaaattaaaacgttgaaaatatcagatcgaatctaaagaaatctttctccgactgaatgtagtatcgaagttccaattaattaatctttgaaattggtattattggagcccttagatattaaaaactgtttttgatatgattgataaatttaaaaataacctcttttcatttcaattttgtagccaaacagtcaattatttttcgtttgattataattataatttaaattttgtaacccaatgtccgacaattcccaaattgctatccagcttcaacgaatggcttttttgctggacgaaaaggaagccggattggaaacaatccaaaaacttttggtcgccaaaaacgaatttttggaaaaaaacgcagctgatatattggagcgacagaagattcagcatgcgatcgaatcccagcaaaatgcgcgtgctcagctgctgatcgaaataacgaacaatcttttgaccgctgcgagcgatttccaatttcatttggatttgcatattattggggaaaaccccctatcagaaagtccttaacctcaattttctgttcccggtgcccaatcgctaacaatcattatttttagagacaccggtgatacgtatagttatttgtcacttaataaaactcattttattttttaaatgtttgacaaagttggtattggaaaaggattaattaaataaaaattaaatattttattttgccgataattaagggtttaaaatctccatttgattttaattggtttaaaatcgtttaaagttggtatttattaaaactatattttcataaatcattctaatttgtgatatgatagaaagctgtcactttaggttacg

SEQ ID NO: 9529 - DNA, 1730 bp, Heterodera glycines
aaaaaaaggcaccaaaaatcgcgaaaaaggcactataataggcacgaaaatcccgataaaggcatgaaaaaaggcatttaaaaaaatttttctaaggttttttagggtgcaaaacacgtaaaacttaaccaaaaacttaattttggtcatttaaatggttattaaatattttataatgttttcgaataaggaaaatttttaaaccgagaattttttatcaagaaaaaaaaaagaattttggcgatcaatttttgagaaaatttttcaattcttaggggtgtattttctgaaattttttcaattcttagggatgtattttctgaaaatttttcaagtcatttcttaagggtgtattttcccgattttattctatttttaatggaattttcggaaaaaacgccaaaaagggcactaaaatcggaaaaaaaacgtcaaaaaaggcaccaaaacggcaaaatgccaaaaaaggcatttaaggcacgaaaatcccgaaaaaggcaaaaaaaggcataataaaagtcaacatagaagtctcaaaccaagtggaaaatgtgttatttatgcttaatatacgggaactagtgcgcagaaaaaaaagacatatgcctcaaaatgcggtctctaataatcacaacgaaatcagtgaccttttgaggccgagttgagcatggtcaaaaagtgggaaaatgtccatccaaacgtcaatacaaacccaactgaaattggggaaaatatttagggcaaatgaattttgatttttaaaatgcattaccgtcggttcatttcgtggcaattagaacaatttgccttatttcgaatgttgtcacaaagggcagaataataattgcgttgaaaacgtttttttctttctgataaatgagagaaaaatcgaaaaacaaaacatttttatagtcacgaaaatggaattgaagaatgaatacctatttgtttgtatctttcaaaaccgaatttaaaaagtcaacagatttaaaacggcacaaaaccatgaaaatacaaatgaactgacgcttactttaataaagccgtgaagtcccattacccagtgctaataggggaattaattccaggagaccttcttacgcgtccgtaattagggccctcagggcttggaagggaagggatgatgatggatgcctggggacgtctcccaggcggggatcgattggccaagtctcttagatggctcccgactgactcgattgatcccgttggctggctctccattgccttttaagcgcccctcgggatgggaggagtttatcggagtaataaatgggcgtgggaaaatgtcatttccggtcccagacttacactttgttaaggaaaattggaggaattttaaatcattttacataattaatttataaacatttcagcttgatttgcaacgatgtttgtatggacggtttcccgttttttcgtcttcctcaacttggcctcaaaattgcgctgctttcgccccgttttgatgttttagtgttggcacgcatttcgatggcaaaacggaaattaacaatttggaaaatgataattaattaacaatggcataggatcaaaaccggaactgtctgtacgaattgatggaaattttagtcaacggttcaggtccaaactcaaacataccgtattatctctaattatcgcccatctccattaatcccccatctccatttatccccccccccctttctgaggaggttgagcaataa

SEQ ID NO: 9530 - DNA, 2280 bp, Heterodera glycines
  unsure (1)..(2280): unsure at all n locations
tctccatttatctcccgggggaataaatggaacttttggaaaaaaataatttctttttaaaattntaataaaattaattattcaaaatcgaaattcatttgcaaaaaattacagatttttctttctattttaatttatgaaaactccttttaagaatnggagtgctgaattttttgaagatatgcaccttatcgttctgaatcaaataatttgaaaaaattattaagaaaaagcaccgacattattttaaatgtattttattttattctttttttttgctgaataattgttttttcatttttattaaattttttgttttattggcaaggattttaaaaaaatttgctatttctttctgaggattaaaatttttcactctctctgtcaaaagttctgtttaatatttgtacttttggcggtaaataattgtttaatacgatgccctaaacaatactgaagaggatgaagtgggtggaatcccttcaaaagaacgaattcattttttttttgaattttgaaatgtcctttaaagggattaagcgactgccgcaaaacgacagtaactaatcagagcttggaacattctgtaaggcttccccgctgggatttaagtgccgtaaatttgcctttttaattaattcattttaaaattttcattgcccaaaatttccaaaatgaaaatgccgtcccttttctccctcattttcttcctcatgctctttgtcagcagcccttctcggcaccgattagtcactgctgtcagcagcaactcatcgtcgtcgcccattggcaccagcaccgacgcttttggcattccttcgccgaccagcccaatctctactgctttaacatcctacacgaatggcactgccacttttggcatccccccaccgccgatcagtccgatcattaatgcttcatcctctctcccaccgattgatccgttggaagcatcggttcagttaaaaatcggcttcctctttgccaacggcacccaacggttgcgaacgcttttcggctttggccaatccgcgcccgccgtcactttggcacttgaacgggcgaggcaagagcacctcatcgacagcatcaacttcacgtgggcaattagaatggatttcgaagctcataattaaggcccggatttttagaggcgaaaaattccaatttaggagcctaaataagggcgaaagaatcgcgaaatttttgaaagaaattttcaaaaatgccaaagcgaaaacagggccgaatgctaaaatagaggccaaacttttattttgggagcgaaaattcaaaaataagaatttttaaggtcgaataaccaaacttgggattccctagtgacggataggggcgttaaacgaagaaatttcgcgttaaaatgtgtttttcgtgcatttctcaccgaaacaaagccgcagaaaaaataagtaaaaacttaagaatccggggccctcctcataatcttaaatcaccttaaatgattattggccgtaaatgccaattttcagttacacgtggcgaatgtgcgactgctttcagccttgggctgtcggctacgctactcaactgattctgacggaaaatgtggacgctttgatcggtccgccttgtgttaccagtaaaacatttttttttgatgacactttgccaaaataatacgaaattgcaaaaaggtgccatcgccgcgggctatgtggcctccttttacaacactccactgtatctgtggggtgctaccgtgtcctcggaattttacaacaataccgtataccctacaatgaacaacttgaatgttaactcggacatgtcagttgagagaaaacaaattttttttttcttctccctctcctctcctcccctcaaattatcaatttttaccaaaaaaaaaaaaaattaaaaatggattttgcttggcattccgtgccgtcacaaaattaaatcgacatattgttaccaagggcgtagccagacccttggctttgggggggggctaaagtcaaaaattcgatttttaggggtgtatttttggttttttgaaatcccgaattatggggtgtattttacaaaaattttcgccgttttcgccaaaaattaatatttttttgccagttttgcctccatttttcaaaaatatggtaaatgtaggtccggcggtgccgataggcgccgtcgggaaaattttttgagtattttaatgcaattttgttatgaaaattgcttaggatttcaaaaaaaatttactgaaaatttttacttttttgggtttcgggggggggg

SEQ ID NO: 9531 - DNA, 904 bp, Heterodera glycines
ttatttataaaattaatttattcattttttatctcttttcccatcaatggaatttccacagttttcacaatttgtccacatttttcgcttctatcaaatcatccgacaaaatctgttctgattttgctgttgatgagtcacttttcatcaatttcaatgcataaaattatggaagcaaaaaataaaaataaaataatacacatttagaaaaaattgacaattaaataaataatatggaaagttaaacaattaagaattttgaaatgttacagtgttttactcacaaaactattttggcagtttttagcatctaaaaatgttattcctacttctaacatgcatttgtttttagcaatcctgatgaatgggcattcctaatttaaatttgtttgtttgagctaaaaattggtatattgggattatccggggtgctaatcactagggttataaattatatggattaacatattttttctgcgccaatgctatgaagaaaggggctcaaaaatagcatttctacgttaaaatttttagatttggtgaaagtttgtagtagagaccggacaagagggtcggtcggtcggtttcggtataaaaaccgaaaaaaaccgaaaccgaaaaaaaccgaaccgaaaaaaaccgaagaaaaattttcggtataccgtttcggtttcggtttttttgaatttttttatcttttcccaaaaaaaacaataaaccatttttatcaatagaaaaagcgaaagatcacctctgagtaaaattgtagagctattgaagctctatcaatggtgtaaaagttgggaaaataattgaaagaggcagccaaaaaacgtttgttagcttcctgattcttcttataaactagggttgctccccgacccctgggggggggggggggggg

SEQ ID NO: 9532 - DNA, 4088 bp, Heterodera glycines
  unsure (1)..(4088): unsure at all n locations
attttaattgtaagcagccaatcatttcttatacggctcttatttttaaatggcataaagatttctgtttaattttcttttaattttcacgaaacacattcattttcgggttgggccaaaccgaaaaataaaagtttattttttgaaaaacttggtgctgggagcttcaaaagcttcgaaaaaatagattatttgttggggagtataattgttgtagtttttttttgtgttgctgaatttatgaaagaattattcggattgattgttttattgttatagatacaatacataaatttacttgttgataaaaatttgttgctaactgttgataaaaatattattattttttatttgttcagtttttttctaaaaatcaccggaccggggtaattattattcacagattttgtacaaaatggtcattttttcactccttaagtacatttttggaaaattaaaaagttttcttttaatcaaacaatcagccccgagtgatgcgtaaaattcttgtttataggtttgacttaataagttttttcaaggcattaacatttttatttttacgtcatttatataatatatataaatatattatatatatagttattttcaaaataaaataacaattagattttgtttttaatttcattgacaattgaaaaatttaagtttttacgtattttgctaactaaaaatgttattaaaaaaaatttttttgcctatttttgtcgcctattcgaagattcttgtgcttatttaatgccgattttacgattttactttttttgccaaaatatttttatttgaaaaaattgaaaatgcttttttaatgttttaatgtgattttgattatattccgcctccgttttctgtgcagcgctcttcaacaaattccgacttcgttctgacatgaaagactgcgccatttgcaaccacagtatcaaatttgcttttggttactgtacacaatgcttttggtattcgtggcaaaacgcaaagactgtaggacagacagcccgattcgccgggcccaacagttttgtagaaggcaaatatttgattatgacaatcaacaagggcacggtaaaagggttgtgaagttggaaatttctgtaaaaaaaaaatttaaaattaaaaaaaaaatgaaaaaaaattaccaaatcttttaattttcttagctgttttaaggcatgcctgtgcatttcgctgatgttgaatttggtcatgaattcattttgaaactcatcagaattgactcgctaaaattcaaaaaattaaaaaaaaatttaatcttatgttggaatataaaaaattaaaagggcccagcgagcaaggacgtagtggcagacccttgtcttcgggggggggggggggggctgaagtcaacaattcgatttagtagagaccggacaagaaggtcggtcggtcggtcggtttcggtataaaaaccgaaaccgaaaaaaaccgaaaaactcaaaaatttgtcggtcggtcggtttcggttaaaaaccgaaaaaaccgaaaccgaaaaaaaccgaagcaaaattttcggtataccgtttcggtttcggtttttttgaattttttaaatcttttcccaaaaaaaaacaataaaccatttttatcaatagaaaaagcgaaagatcacctctgaggtgggggaggggggtgtccggcgctgccgataggcgccgccgggaaattttttgaaaatgagtataatttgttaagagaattttatccaaaaattgtcaaattttgtgattttcaagccaatttttggtaaaaaaatttttggagttttgggaggccggcggttccgataggcgccgccgaaagtttttcggaattttaggaatttttaattaattttattaagaaaattgtacaaatttaaaaattttcaagagtccccaattccccgagttagtgtcggggggtcgggggataaaaagtcggaggtagggggctcggggtcggggagcaaccctattataaaccccccaaataggtgctaaaaatggaaatgagataaatattttaaaaatcaaaaatgtagtcaagtaaataaataaataaattttgaatatgaatttttgataaaattttccattttttgaaaaaaaaattgaaaattttttttccggatatgtctcccaattttatccggttgaatagtgtcatttgttatttttttattcagttcgtgcattcgaatcggttttgtcgcataaatgtgaatttgttgaaaaaaaaatttcgatttttcgttcgaatccgggttcggggtttggaattggttggaatagatgtcggaatcggattctcccacccgaaaaacctataaaatgaattaaatccggaaaaaaaattttcaattttttttttcaaaaaagggggggtaccatctatagtattaccggtttttttttcggtttttaaaaaaagtcggtcggttttttttggttttttgattatttcggtcggtcggtttcggtataaaaaccgaaaaaaaaaccgaaaccgaaaaactcaaaatttctcgggtcggntttttttcggttaaaaaccgaaaccgaaaaataccgaaaaaacccgaaaaaaaccgaccggtccgatctctagtcatcatcgcctgtcagcgttaccacagcgattctttaatcatcatttccccatgaccgctgcaggttcgatcccacaacatttttaggcgaaacagtgcctttaaccactgtgccataatgccgttgtagagcaatcttttataggttaattaattgatagttcataatgagcccaaattaattattcgtaattaattattttgttaatcatcacttttcttattgagccgaaattttaattaaaattaatatttttattataattaaaaaatgttttaagaaaatttagaaaaatcgaaaattaagtctatctgcgagaaaataggtcaaattaaaaaaaaattaaaaacatgcgtgcaggcggggctgaaccccgctagtttgaatcgcggtggagcgctttaaccattgcgctatttgcacgacatgaactgcggctctttgatattatttattctccacattttctcttaatttttgttgcgacattcagaaattattctttttattatttattataaaattaatgttcattaagcctaaaacttgtgttaaatttagcctaatcttgaaatactaaacggctttttgaaacgaattttgtcattgtttttttggttagattacagtatgcccatctgttttcagggcaagaattttcgagtggaggggggggggggagggctcgaaaaccttttttttcacttcaccccgaaaatttttatgaacttttttttaatttttgcaaaaaatgcccgaaaaaaatgagtagaacggcacccaccagaaagtttgcattttttacccataaaaaccgaaaaattttccgaaagaatcattttggtaaaattctctcgagaattttaaataaattttaaattcttgcaacaaaagagcgaacatttctcttttcgagttgattttttcgataaaaattagtaaaatgtttatagaaccctgaacttttgaagtaccgggactgggtttagacaattaatcgtgccgcccggtcattaacttctgtttcaattaatttttatgcaccttccacaacttttattaaaattagtttttggccaattttccgcccatttcattttgtgtgccgtcgggccgacacagtgattatagccaatgtcccccgccggcgctgggatttatttgttttcaaattatccggggaatagcagctaatgatgatgataatgagatcacaacaactgttatacccatcttcatccgtcggggctcctttgtactcacttttatgcattgtctccacgggtttgggctgctggtggcaacttatttaatcgatccccgtctctccacattcccgccggcgtcatcttttctccctgctgctgttggaggagtgaatttggaagaaaaattacttccaaaaattagaattagaatagagcggaaccgggaattttgggcaaatcaggggccgggggg

SEQ ID NO: 9533 - DNA, 945 bp, Heterodera glycines
ggggatctctagagcctaattttgaacccagtttcactaaaccataggggtgttaatacagcgccggttggacgcttttgtaatataacccagtgtaagcactcctgccacttggataaatgtaaagagtaccaagtggtagcagtgcttacactaggctattttttgttgacttttttgtacctcggtcgagacccagaagtgtgaagacatcggccacaatgttttgaatgtcggcctcccgctcaacgcggcgttcatggtttgcaactaactcaatatgattatgcacaaacgttagtttgttttaataacctttttgtcgcagattgcgctgcagagttcgcgtctgctgctccaattccatgattcgtgtacgcaataggtccacgaagtcttcagctttttctgcaaaagcgtcgaatgctgacgcaatttcatcggtcggctgaaggccgatgatagcctcacgatcagcaggtccatgcaaatcctaaattgtttactctaatggaaggcttaaaaattcacaaacatcatgcaatgcatttgcaagagtcacaggcggttggccagcgatgactccgggttgttcttgttcgggtggtggcacgtaaccgtcttcgtcctccggtttgtccgggcagtcctcgatcttgtaatggactccacggttcgcataccacgcggcagacttgaccttcgtgtttttcgagttgacgtagaataagcggtaccgtccagcgatgtatgccggtttatggaattctccattttcgcctcggccgtaggcttaacacaaaattaaagcattttttttgatttgtatatgtaaggagcgcttacagttggacaatttgtgtaagctctattttcacctaatcttcttttttttattaatcatgttaaaaggcaagaaaacattgtcaaacaatcgtttaatac

SEQ ID NO: 9534 - DNA, 2247 bp, Heterodera glycines
ccggccaccacccctccacccgtcccaagggggacagccgtgggaggtgaacaaaataaaatgaaataatgaaacaaaaaaaaattaatggtgggttttctcctcctcctcctcctcagccagctcgatcaacatcctcacgatgttgctctttgcgtcaaggtgatcgatgggatggcccgtttccaacgtgagcagagctgcgggcattcgctgtaaaaaaaatttaaaaacattgcacatgtaagtatactttacagctgacagaattatctctaccagctgtaagaaattctttcattaagtgaggcaaaaccaacctccaaggagcgaaggtgctcccgctgctgttgctgacgcagtttctccttcgcagcatccgcttcttgctgacgcaattttgcggccgcctcttgttcacgtcggcgcacgatcttcccgcctaaaaatcgccaaatttaaatgagaaataaaacaagaaaaaaaaactgaccgaaccccggaactaattcgcagagcattttgccatccatggcaatcttgtccgacaggaccagccgaaacttctgctggtcctgtgggaattcgtgaacgaattttttaaattcgtccagaatcgcctgttttaaaggaaaaattagttaatattgaaaaaattatgaacgaagaccttgttcggacaccggtggaatgtgtggtcggttcgctggcatgcaaagcactatttaccatgaacctcccttctagggctgctaattttatgtaaatacatttttttttcctggcttctccatgctctaaatagtaggaaaacacttttcttttttgtgtttgcgtataaaaatcgggacttttatttgcatatttttgcatattttgggtttttatgaatttttatgtatattttgccattttttggaaaatttgttaacaaaaatgcaatacaaacggaaaatacacccctaaaaataggtcctaaaaaatacacccctaagaatcgaccaaaaatgtttttaaaaatacaccactaagaattggaaaattttttcaaaaattgtttccccaaatttttttttcattacaaaatttttgatttaaaaaatgttatttgcatatttatgcgcatattttggccacttttcgtgcatatttttggcagccctagtcattatttacgtccattttctcgaaaatcattttcgcccgttttcttggcgaatcgtccgccgatttggtcacttcggggcccaacatttcgtaaattgcctaaaaacggcaaaatgttggaaatgtcaagcccccatttgtgtgtacttcgatgattttgatcaactccttctcgtctatcgtcccattcccgtcgatgtcgtacatctgaacgggacaaaggcaatggcatcgttttgaattcaaaattcaaaacccggaatgcccattcgagtttctgctcgggtgtgccggaggaagtgacgttgatggcaagcaagaactccttgaagtcgatgaacccgctgttgtccgtgtcgaaggtccggaacacgtgttcgcagaagccttccgcggagccggaggggaaaaagtcctgaaaagaagcggggcatgagtaaggctaaagtcagtcctcgaccgattaaatcggcacggcactgaccttgtacaatttgatgaactgctctttggtcagatggcccttgggacagtcttgctaaacggggacaaaaagcggtgaacggacggaggcgaaattatgaaggatttaaatgcttttgtcggttcatcaaaatgttttcgttttgtctcttcaaattccgtccgagctccttttctttggccaggctttcttcaatttctgtgatgttgttgagcatattttggtcgatggaaatccattgccaatccctcgaaatccgttgcccaacaaactcatcggattctgacgcattcaaatcctgtaaaaattgatttttggatttgatttataattatcacattttcagttacatcgatcaaaatgtcatggaatttttccgccgttttcgccgtattttcgccatttgtaccatcgatttgatcattatcactgaaaatgttcgcatttcggagtttgttttgttgaacatttggccaatgctccgcgactcaattcgtgccataattttgaacaccatcgcttttcggcatttgcgtcaattggctccggcactgctcagcaattgtctatcacttcgcgctgtctctttcaatgat

SEQ ID NO: 9535 - DNA, 3250 bp, Heterodera glycines
  unsure (1)..(3250): unsure at all n locations
ttggcccactttgttctccggcggcgtgtcgagtcggacttcgccggcacagccgagttgggcgaaaaagttggtgaagttgttgctgatgtttgccaccaactcgcccagcgggtccaaccactcgctgagtctgtcgtccatttcgcgcttccaccgttcgttccgttcgcccactcgccgcacttccgtgcccaatttgtcgtgctcctccaacagtcgctggtactcgtggacatcctgcaaaaaatgcgatattttatctaatgatgtatttagtattaaatgggtaattaattgattttgggatgagacgttcgcgctatatttagaatccaagtgttcaattggcaatttttttttttgaaaattttaagaattttcttaacaaattatattaaaatttccaagagttttcatgacaacgcttaaaggcaccgccggtccccattttaccatgtttttttgttgaaaatttgatccaaaatggccaaaattagtcattttgtggcgaaaaatagctacaaattcatgcatttcccccggcgctgaaaatattaaaataacactggagaaataattttagcccgaagaacaaaaaaaaattcttggattttaccctccaaattaccaagggtctgattgttttgctatttttcaagtttttattttttccaaataatttttgtgccatgccttttcagtgccctcctgacgccctttggacgctttgctcaattccctcgtcatccgttcgtccaatgcgtccgcgtcgtccggaatttgatggttcgtgaaatcctaaatcacaaaaaatgccatggcatggatcccgcagtgccaaccaacacttttcattttggtgaacgccctcgtttcctcgtgggactgttcattctctgccggcgaatatttggccaaagttttgaatgcgtccttcgcttcctccacatttattttgtgatcctcacgaattttgcactgtgcttggtaacgtttctaaacatgagaaagcataaattgccattaaagaaaatgcattttaatttcctaaacatttttggccataacttttttgaaacattacgaaatttttgagattttgtagactaagagagaacacttagggctattgaatgaaaccaagaaagtttaattcgaatatttgtagaaaaagttatgatataaattgtcaaatttattttttggtcgtttgaactgcagtagagccaaaagttcctctcctcttttgtccaatgttcggaattattatttttttgaatgttcccaccttaacggtgttcagctgttcaccaatgtcgtcgtcgtccatgcccatcacgcgccgtcgtcgtttcagccttttcaattcgtcatccgccagcacacatttcacgctcaaagggcgcaaccgattcttaattttgaagttttacttatagttgcagtttatgataatcgaatcgttatttcattgttaatttaataattagagttcgactctctaaaatcaaaaaaagaaccaggagattcggaaaatgagatgaaaatctgtatttctgattcgaacgtttatttgtatttcttgagactgaaaatatgccgttttgagaataccagacgagaccggtcccagagccccgctatttattcaaaattccctcaccaatgagtcgacgtactgctcgaacatgttggcgatggaggcagtgatctcgcgctttcgctgcccatacgcggcctcctcctccaccaaatttggctttcccttgaccatttggtccaaatccaattccatgcgtcccatttgcttgtacaaatgctcaatgttgctccttttgtcctggtcgattgtctatcggccaaaaatgcttttatttacaatgaatttggcgtataaacttcttaccgcattgtttttgtacgtttcgtagtgttgttcccacgctggtctgtcctgactgtactgtttgatctgttggttgagcttaaagaagacgcaacaaataatgacatttccaaaaaataaaaggaaaaacgatagattagccaggccactttactcacaaattagtgttcacaagggaagcatcgaactgtaagttggaaaaaggcatgcaaatggtacggttgcataggacagagtcgatttgccaatcgtgcattttcatacccattttccgatttacagttcgagtggttcccttgtcattgtcagcccaatcgttcccggtaagaaattcgaaaatttttgaagatttgtgagattttatgccatctttgaaaatcttccgaggaacttataaatgagaatactgcttcagtgcctcgaacagcagggagaattctcgggaactttagcaaaaccgtgggccgatttaagcgtggttaacaggacacacacattccccgtcccacaataattcacttcttgctgtcgttgtcgccactcctcctccatggcttcaaaattggtcaaaaaattgtgcacttgattcgtgaagttggaccagttcagtgggcccagcctaaacaatttaaatggaaattaagcaaagaaattttaaaatacccaaacagacacaaacgaaaattccgagttactaaaattgaattccaattgaaatgagagcattctggcaaaaaatcaaatttttatcaattatcaaaaaccccaagattcgttttttggtttaaaaataataaattcaaatttgggactcccattcttcacgattgccagcattttaagttttttcactaaatttaattttattgaaccttctcagtgttcttcagcagtatttgcgggccttgttctgcaaaacttttcactttgtcctgggccaaaaaggtgcaaggattgtccacctgaaaaacgaacaaaattaaacgacgacaaacgaaacaaaattctagtggaaatttatcgttttatgttttactttttcagtatcgcactttttacccaagtccgactttttctgtcgttttgatattttttttaaattgaaatactcaaaaaaaaaaaaattgtgcacccaagtcacctggatgttgtactccttgaccagctcgcgcaattgggtcagcttcatcgactgattgtccacaaaaaaggaggccgagtttggcaatttgatgtgcacgctgaaacagcgttcgcgtcttcgtcgactgtcccaactgaaaatgcacatttattggaaaccaacggaagatgccctanatccaattaaagaatgaaaaa

SEQ ID NO: 9536 - DNA, 2409 bp, Heterodera glycines
  unsure (1)..(2409): unsure at all n locations
cctgaagcgaagcaagcctaatcgttcttttgcaatacaggtatggtttgtatcgcagccataaaggaatgattagacaaatggacgtgtcaattcgctttatagcaattcaagacatttacaagcaaatgcctggcacgggctacaatttggctacatttaattgccagcattggagcaacgcattttttgaaaaaggttatttctttttaatgagctattgggctgaattttaaattgcaaacaaaaaagaattaaagaaacttttaaagcaagtctttggataaattttcaacccaaatttctcattaaaatgaaataaaccccacaaaaatcatcattagttaaaaggaaagtgtacagcctgtccggcattttcaagattccggtctctatttatacacccatgctacgcctttgtttgaaaaacacttgtatctcataactccatccccctaaataattgtgagatcaaaaacggtttttataccttaaaaatgcttaattctcgaatccctttcattctatcagctaccgacccattttttggcaaaaaatttcataaattttttagtctgaagacgactagtgcccactcagtttagatcaaagggaaatatgaaaatctgacttttgacattttgttcgagatgggtccggaatgcagaatttggtcgagtttttttcgaaggggagggggggctaccatccgtactattacctatttttgtttaaaaaactcactaataagaatgaacataagtatctatcttaaatcagcatttatcatatttaatttgctttaaaataaaacctgtatttcggacatgattccgcaaggtacgtggctcactgcacacgcccttaacgctctcataaaactgcatatttacaaggcacatgacttgggagagtgggtaccataatgaattgtcgtttcttaaatttcctccttgattagttgcggggtacttaccaagaaaggttcttcccctttgactgtccccgccaccggccctctctacaatttctatggaaaagcgaaacctcgtctctgatttaattattaaattgaaaaaatgttaaaatttcgagaaagaagtgttaaatcaatgcaataaaattcagcccattaggttaaacatatctagacgggtctatccccttgatctttagtggaagaggctagcatgaaaggagttagggattgcgcctgcagcggcgagggtgtcaatgttatctctatggtgcataacgaatttggcaataagaatgtttgtgtcgccagcattcgttgtacttgccagacgattttccatattagttatgaaatgagcaaatatggcaagcggaagaagcaagtttatttataagaaatatcttattttgcaccaaacatgcaaggaaaggcaaatagaaattcaagagataacaatttctgacttaactttggtactttttaattatcagtactcataagcagatttcgaaatttttttttaacaatgaactgattttaggggttttcagggtaggatccgatatttatttcaaccaattccggacccggactcgagcaaaaagacatttatttaataattgggttatttagcaatggagaatccacacgcgatatgagttgtttgcggattattgttatgaatatgccattgcgcctgatagaagaggcattctcaaaaatgccatcagaatactcgttagtgcgaatgaatgagaaaaagtgggcggaaatgtttatgaatgaagtggcgaaattgactaaataatgttgtaatttcgttgtcgcataaatagggttatttgaagaatacccattttcctctatttctattttaaaaaataataggtcgtgaaattattcttttttcaagagttaagaaggttatcattcgtgttgttacaaattcaatctcctcttttacctcaaaaaatggatgtacctccataataaggggcacgaaatcacattccactatattgtcatcctcaaaccttgtctaacattgcaaaaatcgtaggacgaaattgcgtttttgttgatgccaagatggcaatcccaccatcaaaataaaattggcatttaaatggccatttacgagtgcgagtttggtccacaggtggattaattaaaaatagaaatttctgtaaaaataaaaatttgctaaactttaaaattataaaatttcctaaataatttatccataactcccatccggccgttcttggatttaggttccttcgattagaaaaacacaaatttttgccattctgttttcattaatttattatganattaagcgccaagcccagtgttagataaacacattcataacgccaattctgttctttttttttgcggtaatcaaaaatagcgaattgatcccgaca

SEQ ID NO: 9537 - DNA, 1156 bp, Heterodera glycines
  unsure (1)..(1156): unsure at all n locations
ttttagaacaataaattctctgaagttttgactnnggcttttcaatgttttaagcccaccgtgaggcgggacagttccaaaaatttgtaccacattttactgtggaaagtccaagtaccttatttggacaattaattgtcaacgaacaaagtcgcctctggtcctcttatggagcagaaaaggggaaatatcagatggggtgcgcgtcccttcctaaaaatttctcttttcgtctaaccatcccccctttttgtgcactatttcattttcaaaattgggaacatttttttgtttgtttttttgaaactaaaatgtaaaaaatttaataaaattatttctgattttatataatgcttctgtttcgaatcttttgactctaagaaattaaactgtaatttttagaacaaataattctctgaagtttttaactatgtttttaagtcccaccgtgaggcgggacagttccaaaatttgtaccacattttactgtggaaagtccaagtaccttatttggacaattaattgtcaacgaacaaagtcgcctctggcctcttatggagcagaaaaggggaaatatcagatggggtgcgcgtcccttcctaaaaatttctcttttcgtctaaccatcccccctttttgtgcactatttcgttttaaaaattgggaacatttttttgtttgtttttttgaaactaaaatgtaaaaaattttaaaaaattatttctgattttaaataatgcttctgtttcgaatcttttgactctaagaaattaaactgcaatttttagaacaaataattctctgaagttttgaacttggcttttcaatgtttttaagcccaccgtgaggcgggacagttccaaaatttgtaccacattttactgtggaaagtccaagtaccttatttggacaattaattgtcaacgaacaaagtcgcctctggcctcttatggagcagaaaaggggaaatatcagatggggtgcgcgtcccttcctaaaaatttctcttttcgtctaaccatcccccctttttgtgcactatttcgttttaaaaattgggaacatttttttgtttgtttttttgaaactaaaatgtaaaaaatttaaaaaattatttctgattttatatatgcttctgtttcgaatcttttgactc

SEQ ID NO: 9538 - DNA, 2445 bp, Heterodera glycines
  unsure (1)..(2445): unsure at all n locations
ccaagtcccttattggaccaattaattgtcaacgaacacagtcgcctttggcctcttatggagcagaaaaggggaaatatcagatggggtgcgcgtcccttcctaaaaatttctcttttcgtctaaccatcccccctttttgtgcactatttcgttttaaaaattgggaacatttttttgtttgtttttttgaaactaaaatgtaaaaaatttaataaaattatttctgattttatataatgcttctgtttcgaatcttttgactctaagaaattaaactgtaaaatttagaacaattaattctctgaagttttgaacttggcttttcaatgtttttaagcccaccgtgaggcgggacagttccaaaatttgtaccacattttactgtggaaagtccaagtaccttaattggacaattaattgtcaacgaacacagtcgcctttggcctcttatggagcagaaaaggggaaatatcagatggggtgcggtcccttcctaaaaatttctcttttcgtctaaccatcccccctttttgtgcactatttcgttttaaaaattgggaacatttttttgtttgtttttttgaaactaaaatgtaaaaaatttaataaaattatttctgattttaaataatgcttctgtttcgaatcttttgactctaagaaattaaactgtaaaatttagaacaattaattctctgaagtttttaacttggctttaccatgtttttaagccccaccgtgaggcgggacagttccaaaatttgcaccacattttactgtggaaagtccaagtaccttaattggacaactacgtgtcaatgagcacagtcgccgttggccagttgtgaaacagaaaaatgggaatatcagatggggtgcgtcccatcctaaaaattcctcttttcgtctaaccatcccccctttttgtgcactatttcgtttcaacattgggaacatttttttgttgtcttttgaaataaattgtgaaaaaatataataaaattatttctgattttaattatgcttctgtttcgaatgcttttaagccccgccgtgaggcggctcctttttgtgcactattttcgtttttaaaattggatccggattttttggctttttcaaataaattgtgaaaaattcaaaacaaaaaacttttattgcgctacaaatgcttttaagccccgccgtgaggcggctcctttttgtgcactattttcgtttttaaaattggatccggattttttggcttttttaaataaattgtgaaaaattcaaaacaaaaaacttttattgcgctacaaatgcttttaagccccgccgtgaggcgggacagttccaaaatttgcaccacattttactgtggaaagtccaagtaccttaattggacaactacgtgtcaatgagcacagtcgccgttggccagttgtgaaacagaaaaatgggaatatcagatggggtgcgtcccatcctaaaaattcctcttttcgtctaaccatccctccctttttgtgcactatttcgttttaaaaattgggaacatttttttgtttgtttttttgaaactaaaatgtaaaaatttaatagaattatttttgattttaaataatgcttctgtttcgaatcttttgactctaagaaattaaactataaaatttagaacaattaattctctgaagtttttaacttggctttaccatgcttttaagccccgccgtgaggcgggacagttccaaaatttgcaccacattttactgtggaaagtccaagtaccttaattggacaactacgtgtcaatgagcacagtcgccgttggccagttgtgaaacagaaaaatgggaatatcagatggggtgcgtcccatcctaaaaattcctcttttcgtctaaccatcactccctttttgtgcactatttcgtttgaacattgtatcaattttttgttgtcttttgaaataaattgtgaaaaaatatacgaaaattattttcgcttttaattatgatgtacaatgcttttaagccccgccgtgaggcggctcctttttgtgcactattttcgtttttaaaattggatccggattttttggcttttttaaataaattgtgaaaaattcaaaacaaaaaacttttattgcgctacaaatgcttttaagccccgccgtgaggcggctcctttttgtgcactattttcgtttttaaaattggatccggattttttggcttttttaaataaattgtgaaaaattcaaaacaaaaaacttttattgcgctacaaatgcttttaagccccgccgtgaggcgggacagttccaaaatttgcaccacattttactgtggaaagtccaagtaccttaattggacaactacgtgtcaatgagcacagtcgcctctgacctcttatggagcagaaaagggtgaatatcagatgnggtgcgtcccatcctaa

SEQ ID NO: 9539 - DNA, 3947 bp, Heterodera glycines
  unsure (1)..(3947): unsure at all n locations
ttgcatgggcctggcaggtctcaaaancacctcgtagactaggggggataattaggagactgcgtggattaatagagactgggctataattagagcatatacggtaaatgtgataccatcgatcagaaaatttctcgagactcgaaaaaatggatgtccaaaagtgaaatggcgtctcaaaattgatactctcggtctattatccgaagcttcagactgttaaaaatgtcattttttctcaattcatttatcaaccgccaattcaggaaatctttgaattgattgaaaatgcaacattttgaacgtaatcgaattttctggcaacttagaaaagtgcgggaacatttggccgtcggtgccgcgaaccattgggcaaaagtggtcgaagccttcacgcgcgtgccaagtgccgtttccggtacctttggcggtggtcctccgccatttaaagtgcgaaaaatgccaccattggtggcattgttggtgcttaatttatccaattcggccccattttgggtcaatgtgtcgaggaaaagcaaactgaggaaaagcagtggaaaaagtatcaaattagtcatttaattaatttgtgcacaattttaaaaggtttttgtgatcacattaagtgaatatgtaatgctctaataatgcactttttaatgaaaattctcttttttatgtgtttgaccatttttaatacctttttaattgggcattattggcagaaggaaaattttgcgagattaatattttggtaaacagataatctcgaggattattatataaaaaattcaaataattaacaaaaaaaaatttaaaaaaagaaatttatataaaattcgaacataaaaaaattcaaagggtgttgcataaatcttcaaattttaattcattttaataagaacattttcaccaaatgcatgtttttcatgctttttcacatgaataaaaccgcctaaatatttatttatgcttttttaatgaaaattttagccgttttccaatgataatcacatagtttttttttggcatttttggcaatatcatatgaataaaatataaaaaaggaaagtgaatgtaaacgtgtgctgtaatatcaataatcaataaaattgtaaattaaaaaaaatttattcattatttgccattttataaaattaatttaataaaaagtaataaaaatataatgtaaaattattttttacaatttttagatgaacattttttcacgcttcagtttaataattttctttttcctttatgttatttttgttttcattgaagtgaatgaatgcgctcccggctttttggatgagattttagcaaaatttagcccaaataaaaaaaattggaaaaaaaagtttatgaacaaaaatttggtcgaacaatgcaaaggacaatcggtcgaaacaatgacacacattttcaattacaaatcgctgaagaacagacgcgaaaataatgttcacgataaagttgatggatttatggcgggggctaacggaaaagtatggcaaatttggagaattaatttaattagaaataataaatgctttttcaaatagattttcatcggttacattggcgaccgtgagaaatgtgtcgcaattaaactgatcaaaaatgatgtgaaaaagaatatatttgaaaattcatatttagtgatgaataaaatacagaaaaaattgccgtcgcgggaaaggcaacacataattgagctaattgattagtaagtggcaaattagaggcagaaaaagcaataaagattgaaattaaaatggaatttaattattttcataggaatgaattattttctgttaaagtgcattaacattcacaatttcttcctatttatacgtccgacataaatttgaaagaaaaataggcaaatttttaaattaattattaaaatataaatttttaccattaaaatttttacatttctttaagcggaatagcaattgtcagagtgtcaaagggtggtcatattagagacgaagacacaacaaaattcttcggatgtttctcagatgacgaggaacaaaatgatgatgagaaaatggaatttgaatttggcgcactgataacggaacttggcacggaaacattcggcgaaaaaatttacaaggacagaacggactttgaaagtaatcagcggagcctggataatgtgataaggcaaattgttttgccgttgaaggaactgcacaaaggcacgtaaaaaattcaaaaagacaattaattaaacaattaaattgacggaaagaaactacttttctgaaagatttgttgtagtgccttagatttggctttgctgttgaccgaccttaaagctcaattaattaagagtcattttctaaatttatttttttcaattagcactgtaaaatttaaacattcttctcaaatcctaatttgtttctccagttgccatgcatcttgactataagccggacaatttggtttatgttgaattggaaaatggaggcaaaattctcaaagtgattgacttcgatggcacttatttgctgcccgatgcaaaagaccgtaagggaaagttggcaattgtcagcgatcgtttgaaaattttgaccggcaccgaaaggtataatgcgcccgaattttacgcggaattattcgccaaaaaggtcaaaagttgtattccaattatctatccatttaagaaattgcaataatttagctttcaacaaaaacggacatttgggcagttgggataatgctttacgaaatattatttttgcagaaaaaatatacaatttatgaagaaatgggaagtgacacgcaggtcagttttatacatacatatgtataaaataaaaacaatgggctttgattaaattatataataaaaagagaccgacttttgaggcatattcatttttttctgcgcattagttccggtagattaagcataaaaaaacccattttctacttggtttgaagcttctacgttgacttttcttatgcctttttcgggatttcgtgccttttcatgccttttttcaattttttggtgcctattatagtgcctttaatgcgatttttggtgcctttttagtcggtctctaataataataatacgtaatttaattttttcggaaatgaatttcatcaaaaaacgatttttaaggtaaaggtgaaaaaaacagtttcaaatgggaataatctgcagcaataaatattcagattagtgatggtcggaaaccgaaacgggatccgggaatttatccaaaaagaaaatttgcaaaataaaaaaaaattaataaggataagaaaatctaaaattttaaattcactcaatattcatcactatttaatcacactagaatatgtttttgtaaattacatacaattcccattcttttatcataatttttccgtcatgacgtatcaaaatcgtctgtagaacacaaaaggtaactcgcttggtgggactcgaaacagagagtgtgacctaaaacccgcgccccgggattggtataggaattcaaaattacggtttagactagccaatttttaggtgaaaaaacattaaccatttcaaaagtcgaaagagtaattattgtatttgcagagctttaaaaatttgttgtatcatctcaatgaaattcatcgtggttttacagtgtcaaaagatctcattaaatacaatcaccatccaatcacttattccgctgaatggctctcaaaatttaatgtgaaaattctattttggatgttccaagcatggacagattttccaagggttggcctactgattacggtaattatctaattatatttaaaataaaaaataataattattgagttttgactagagaccggaactcgcgcggacttttacgggcttcccggtcccgctcccgtaaattattcatttaaattaatgagtcttgtggtattatgcgtcctaactgcaaaaatta

SEQ ID NO: 9540 - DNA, 2299 bp, Heterodera glycines
  unsure (1)..(2299): unsure at all n locations
ctatctcaaataattagcatttttacgctgaagaatttgctgagtgtcgtgccaacgaaacgaatgagtgccaaaggaattatggactttttggacggcaactgttgtccagtggaattatacgaagaaaagttagaaattgagaacatttttaacgatttgtcagtgaaagaattgaacaaaaacattgatcagagagtagaaatggacacaacggaatttgaggaaaagcagaaattgttggcgatgaaaagaatgatgaaaaaagcgcgagtaaagcgattggaaattgccaatgtgctgaaactgatcagaacgcattgcgacacagagacaacgggggactgactgattagcacagaagcgatagctaacaaataagcacaacaaactcttatcatcccatctgaactccgtaatcatcattagaaggatagcatttttaggacccaaaaaatgagaggtgtatttttctctgcactctcaattttttgattcatctctcgtttttcggaagatgtgtaaaagattttccaaaaaatatttttgagcttgcttttgaaaatctagtgtaaaagccatccatgtcaacaaaatttttattaaaactttcaaataaaataaaatattttttgattttaagttttgtaccaaaataccggtattaatggtaagattcataaatttatcaaaaacttcctagtgaccgttcattcagagttaaaatctctgagcggtattctaattcaaaaaacatttactctggggtgcctgccacaaggtaagtgtcttaggccctttgctttttcttatttttattaatgatctcccgaataatttgcctaacaaataagcatgttggtattaagatgtgagcatgaaaatgataaaaatagagataatttatcttccacgcttaagccaataaataaattgtcataaaataatggcctaaaaatatcaataggaaaaacaatggtcctttacctgggtgaaaataacacaaaatttttttttttcttgatggcgaaccattgccagaaacaaaaaagtgtaagggatttgggcattttaatcggtcaaaagctttccttttctaaccatattaataaaattttaaaaaattcatatttttcttgttttcagcttctccgagcgttaaactcggaagcttgaaacattaatttcggcatataaaagctatatcagaccacagtagaatacgcaacagaaatttggaatccattaaaaaaagaaaatgtccgcaaaattaaagcagttcaaaaatttttaacaagaaaagtcttcaaaaattgtgggcttgttagaggagtgatttgtttcattgatatttattgtttgttcaatttgacacttattttgtgatttgacacttattttgtgatttttgactaccatttatgttttttttattattcgctggcattttatgttgccattaaatcatgttcagtaccgtcttttttggttagccgacttttgcgccgcagacatttgcgccacgccatttgcgccgcgacacttgcgccgctcagcaaaaaatactcttgcgccgctgacatttgcgccgtgccatttgcgccacgacacttgcgccgcctaacaaaaacgacatttgcgccgcgacatttgcgccgtacagcaaaaaaagacatttgcactctgattaaaataaatttatttgctttatagaataagaattgataaatattcattattaatacctttttcgaagcctttatgtcaattccatattgaagtgcacgtaatgattgatcaaatcttgattattttggttttcattgggaccatatgcgataacaagccttcgtattgcctgatcattaagcggcgaattttaagcgaaaaaaataggtaaataaataagggcataaaaattgcgaaataatgcgaaaaatggtaaaataggagcgaaaatttgaaaatcaggtgcgttttttcaatgaaattaaattaaaatcgatgaaaataacatattgagcaaattaattacaaaggaattgaatttaattcttttttcgaagcaaaaaaataattggggtttctacagaaaattctgtttttttcggttttttgttagtttgtatattcttaatcattttttcatatctttgatgaacctattcaatgttaagattttaatggttaaaaaattgaatnccaatctttgtgaaaggtaattttttcgaattttcaattagttattttccccggggtagaatatagttttagtaaaacttattgatattagtgaaat

SEQ ID NO: 9541 - DNA, 1296 bp, Heterodera glycines
  unsure (1)..(1296): unsure at all n locations
atcagcagggcttggatttatatgagtccacaattgttggcatataataatgtaagagattatcagagaaattgtgattattgaatagtgcaatttattgtatttcaaaaaagatgctctcccaactctccaaatggcttatatgtaattagaaagcattaatcagtaaaaggctaatcaacttataaagccgttaaattcctttttattttttcccctatccttaccctattttgagatatacagtatgcctattctcactaatcttacaaaaattcaatgcattatttatattattttattgcattttaatttgttatttgcatgccccaattaaaatgcaatgcgtatatggcaataaattcaattataattttatttagaattaattttaaacatggaaaatatccttgatcgtgttggcgagaatattttggagcgcatccaaaacaaacagtttgaaagagatgtactgtaaattcaaaaaaaatatatataactttaaatttaatattttattccttcattaggtagagggattcatcccggtgtcgggtgagacaccgtccccatcatttgatctgctcagagaccattggctgcaggcaataaaaattaattaaattataaaaataataataaataatatattgttaatattatagagagatggtctctatgaagatgcaaagtttccagtggagtcaattcaattgtacttcactgcagggccagtggcgatccgatggctgaggcctggtgaaattgttgctcatccacagttcataaaccaggagcccattgctggggatgttcggcaaggaagcattgggaattgctgggcgctgtccgcggcatcggtgttggcgcagtatgggcccctgttttacagggtggtgcccccggatcaggggttcgggcataattacgccggtaaatttaaaataattaaatttaaatattcagtcagaatttaaaaaaaaattgttttgaaacgattccttttttcaatgacatacaattttggtagggatcaactgcgacttgggtcaacttcatctgacaatgagccaatttcgtctcgccaactccgttttggtatataatgggctaactccgtctcagacaaaaattcaaattannatttattagttttttttattataaaacgccattttttggcaataatattttaaaattaagtgataattntatccgactaccacaaaaatgttcaatttcccttgnnanntactgtagtttttgngactaataaattanaagacgaataatttt

SEQ ID NO: 9542 - DNA, 2545 bp, Heterodera glycines
aaggtttacacaaaaattcttcgttttttacaatatccccataagaaattttgaattttaatctatattccctgaaaatttgaatagttttatacaaaccatataagcaataaaaattggtcattttttgaataactgttaacaaaggacacacaatttttcaatatttttcccggcggtgtatatcggcaccgcctgatccccccccccccccaacatttccctattttgtcaacaacgacaaatcggtaaaaaacagcatataatttttaatttatataaaaatgaatggtttaataagcaaatttaaatttgaatgcagattttatttaataattagccatttgttggcgcaaaataacaatattattattgtgtttttttattttaatttacaaatatttgcttttttttctcttttttcaaattaaaaaagttcaatataattcagaaatctttttgtgtagaattaaaataatatattaaaatttgcttttttattgagctatataatttaaataaatttattttttcaataaagttattatttctaattaatatctatacagggaatttataaaaaattgttatttagcttgtattattttttcgtaaggatagttaatttttattaacaatgatcgattggtcgaaaaatggttgaattaagtgtgcttaagagtcgcaaataatcactctcgggggtgcttgcgcgttttataaaaaccgccacctagtcgcgttttataaatccgccagtcgcgttttataaatccgccacctaacaattcgcgttttataaaaccgccagtcgcgttttataaatccgccaaaatggaaaggcgcgttttataaatccgccagtcgcgttttataaatccgccaaaatgggtttgcgcgttttataaatttgtcaatatgcaaataaccaacaaaaatactaaatttattttttttaatactaaatagatcgataaaaatatttttatgtgacaatatgtgccagtcagactgcaataatatttgccaatattacagctgaataaaaacaaaaatatttgttagtattgcaattaaattctataaaagcattaaattttaaattaatacccatttcattttattttttattttataaatgaaagctaaattttatttattagcttatatattactagtatgctgctgctcaaaactttttcatggaattagttttgaggaattaacatcaaacaatcacgccaaacccttaattgatcaatatcttcgaaaggaaataaagactaaaggagaattattggaaaaactggctgaaatcggagtcgacctaagcttgagaagcttggaaagatatatttcaaaaataaaaaatagaaaatcaacagaaggaaacaaagtagatatggaaaatgccgaagtatcgcaatgtttttcaaaatttgataacaaatttctttttatcattgggcatgaatccgaatatcgaaaattcaataaaactaacgagagagaaggcgtaatttatttgtactgtatgtgttgcaaaaaattgaaaaaacccaattctgacaggttagttttaattttaattataatttttatatagttatgtgtatttaagtttaatagctagtgcaatattacgcgatggcttattagacagaactcatcaaataattcatgataaacaatgtaaaggagtaccgcttgagcaactagctgctgaacaaatagataggagccaaagacgagatcttgtgcaatgttctataaaccctaaatctttgtggcgagaagtatttctctttattaaaaccagaactttttttgttaaggggtctgatcgggctagagaacacgatgttgctgaggatattgaaattgaagatatttctggaatttcatttaactaccctaattggcaatctgtaagaagctcttactaccgtagaagaagaaatcacctaggggattgttctgatccctttaatgtcccagaaaggcttcaactaaataaacggggttcaataaaattgcttcttaaaaagaaaatttccgaagaagacatgtaagcattagttgggtaaatttattaaataaaaactttaaggtggttgcgatttagagataaagaattaggtgtaatgctttttatttcacattctcaaataaaagctgtcagtcactgtaaagttttaggtaatagtacctaatgatcataaagaaagattattttttagtttccgacggtacttttgaattggcgcctttgaaattccaacaaatttggacaattcacggattggttagagcttttccgttggcaggtgtattcgcccaatttagaaatttcggttagactaattattttatatgctaaaaattttacattaactattttaagctttcaatagtcaaaagaagtcttcacattcaatatttttatattaccatgatgcgcattttgaactcataaaacaaccacaagtttgcattttactcgattatttatttttactatatttaaattatataaaaattgata

SEQ ID NO: 9543 - DNA, 409 bp, Heterodera glycines
aataatatgaaaattaatatgacaattataacggtaattaatcattcacaatttggtttgggcacggtcataggaacaataaaaacggtttaaaatgtgccattcggtcgacctgctgtcggtgcttgccaaaattgtcaaaagggaaacgaacgacacagaaactcaacggtcaattaattaattaattaggggtggattaacaatatttttggtctctcttttgcttcttcttttttggtttgcttcactttgtgtcacgcggcgccgtaagggtttccggcggagttcagcgacgggtacactgaaaaaggaggcgatcaatcgtccgttttgcatccaaattaccaactctcgcagagagtggtcaattaatcccacccgattttacccccgaacggcgtttgct

SEQ ID NO: 9544 - DNA, 2707 bp, Heterodera glycines
cattgtgtccatgtcgccaccgtttgctgttctccctgtccctcctccgttgctcatcgacggcgtcggcggccattggggcgcaaaatggccaaaggaagtgcggttttggtgctgctgttgttccatgttttgctgaaggatcgaaggcgtcgaataactcccatcggtgccagctaaacgaatgattgaaaatatttaaaaatatatttaaaaaataataaaattcaaaagcctcacaaaacggagtctgcgagtaaatgccaaatccgcccgtcgtttgctgttgtgcggagttctgttgccaaaaagtggcgccccctgcgccattgttttgtgtgtacggagtgttcgctcccccgccgtaagtgttggtccccccaaatgcctgcggcgcgccgaagggattgttaataattggctgggcaatcggaagttggggggcgaacggcggtgggtgagaagcagcggcgccggggaggaaaggattggagagggcgggggacggagcgacgaacggcggcgcattttgcgaaggcaaaggaactgaaaaataaaggaaaataaagtgaaagaaaaaggaagggaaggagcaatggaaaagtcgcaatattttttaagtgtaataaaaaaaattgtttgctcgttaaaatattgttgtaattgtcgattgaaaataaaatggagtgcatgaaaaagttttgtattataatatgggtcagtgtttttgataagcattattaaacaattaatcaaaattattttgaatattaaaatgattaatacttgtctcgttcatttaatttaaaaaatgtaaaaaataactgccccatggcgggctcgaaccgccgacttctgcatatcccatcacttataagtacagcgctctaaccgactgagctaatggggcactcccgctgcctttttaaaattcttttagttgatataaaaaagatttttgtttgctttaacaaaatgcgcattttgttaaatgtaaacaaaaatcaactgaaattgccttgttgggatggtcggttgttcagctcggcgacaatggcgaagggattggtcggctcaatttgaccgacggcgacagaattcccatcttttggcggagtgtcgaaacagataaggtcggaagcgagggcgaacggattggtggagggcggggggatggacgacggggagggcacggaagaagtcggcactgaaagggcggagaaacatttggagaaagacaaaagacgtattttagggaaaaattaaataataacattgccaataatttgtggttcttatttgtttagggtttggaatatatattattattcattaagtttcaaaaaaatatggccagaacaactcaaaaacctggatttttgaaattttttggtcttggtctttttatatatgaacaaaaccattaccaagaatgcttgattttgttgagaaaaaagtattgtccgaaaattcattggaaattaaatgaatttttgtaaaaaaaatatttcaaataacagtttttgtcccttatgaatttaaagtttccacttgccccctttcccccattttcccacctcctccccccggctgttgttggatttggcgtcggcgttgctcctcaaattggcgcagtctctccttctcctcctccaaatagcgctgctttgccatttcgtctacgctgctgttcgattgaaataactgttcctgacgggccgaattgatttgctgggagaccatctgaaaattaaacccataaaattgaattttattcaaattttgtgtgaacttgttggacggactgtgccgactgtccgctcggcgcgccccggccgccctccaattggaacagatgcgcttccaacgcctccaaaagggaggctggcgcccgcgtcaaatcgggcacttcgccacggtcaatgccaacggactcggcaacggtcaaaaaggcggacacgcggtcgaggcgagactaacaaaataagggagtcaaaattgaattttatttaattcaaatacactcgtcataaaaaaatacccaaaattcaattcaatgagtataaactcaccaaaaatgctttgtattggtccaacgcctcgcggcactgttttttgttcatgtcgaagaatttctctaataaattgatcattccgtcgttgtaacaggcgaacaaacggatcaaatcgcggaaaagcaaaatgaaagagcaattgatgacgccgttgttcaactcggaactgctgacctgaaaaggcatcgaaattaaaagaaaaaaagggggagcggagaaggaatgcctgaaagtcgagcagagagtcaatttgggactgaagaattggcattgttttcagcaactgaaagatggcacaaagattagtagccaattgaaatatgataaataggtcgataaaaaaaaaaccaattttccttattttttaaaaacaatttaaaaaggaaaaaagttaaacaaattaatatcattcaaaatgtattatcggattctttttcaagtatttttttgtatttttgttacttttaatggagttggacttacaaaccaaaaaaatcgtatccatttttgggactttatccccccccctcccaaaaaagtgcccttcccgtgtcccatttgtctgcagtatttggccattccctaagaaacaagtgtgaatttgcttaggcctcactttgtccgtgtgcaaa

SEQ ID NO: 9545 - DNA, 1110 bp, Heterodera glycines
agggtgagtgagtgctcggctccccccccccccgcccctttgggcgaaatgacgacgacaaacggaggccgaaatctcggaaagaaagggaaagaaaagaggaggggaaggaaggaatgttttgatggatgggaggataaaataggcggaaaagagaagaaaaagcaaaatggagttgggggaatgggtgcctaatttcgaattcaaatgataggccaattggtttttgaactgaatgaatgggctgaaatggaagccattcactgggaataattgggggagggggacgaacggcggagcaaaaccaaaataaaatggaagggacggacgaaattggggagggaggcaaaatgggggaaaaggggaataaaggggggggggacacgtgtccactccgaccatccatcacttttggaaagtcgacacactgctgaatttgttaataatgaacgaagaaaaggggacaatgcaaacggagaaaagcaaagaaaacacaaatattatgggaaatttgcggtgaatttattggggaatgattcatcaaaagcatttccaatcgcatcggatgacaaagttttgtttattttgccaatgtttttcccttcgctttgtgccgcgtttatttgccaattaaatatttcggccaatcaaataattgttcttcgttgggattggcgccgggatttgcctattttcagttgctcaatttttccttggacgttcaaatggctttggcattggcacagccgatgagacaaatgccatcaaaagtgggtcgggcgggggaaaactccccctttttcttccattttcaatagtccgtccgtccctcttcccccacccatctttgccatttgcgattttccgtcccgccacttaaaagtgaaaggaattgaaaaatggggaaaagaaagggaatggtggggagaatggggggggcagaggagggccaaggcaatgccatcgaaaggttttgtgccgttgcgttcgctccgtcggcggagcgaaatgacggaaacgaatacgaaaaagaataatgtatatggcaaaaagataagccaaaagggtgagagatagagaaaaaaagtgaaaatgaaagagataaaaagg

SEQ ID NO: 9546 - DNA, 3656 bp, Heterodera glycines
tttaaggcgtcacttacattgggtcgttccactcgcccccccccgtactcgcgttttgctcttgatgactccaattcttccgtttttcattttgttttgttgagaaattcgtccgttccgccggttcaaaaccaacaagattttttgttatgccttggcaaactttacgagttagtgtcacgtggaaaatgtacgtttgtcgatttggatgttctgcgggatggcgaagaagcggacgaaggactgccggaggaaattcgctcattggacggatacccaaactttggaatgcgactgatcaaaatgcgtgggaacaaattgttgtccaatgattatatggcagaagaggaacggaaattgcaatatccaattgctcgggttggttaaaacggaggagggagcggtattgacccatagccaaaaaaagaaaatttaaagttttgttccatgcagtttaatcatttataagtttttcaaattttaaatggccaaataattgggcttggggtcgcagatcacgaatccggcatctctatctcattttcacagattgagaacattcgacgaacagaagttggagcagtgcctgaagctgatccaaaggacatccaggcttgcagtttgccatgctctttctgcgaaggctatggtggaaaatgcccgaacactgacaatctgtgggtgtgcgacgattgttgcgaagcattgacttttgtcaaaatcgaaaaagtaattaatgatgattgataatatcaggaaaaaatctaatacctatttaaggcacaaattacgcattttttttgcgcttgtggaaaaacgccggtggacggattttcgtttcgctgttccgatgtggaaaaacatggaactgaattcaagcattttggttctgaagcatcactggaaaaggaattggatcggttgaacaacaaaggcatgctgacctttttgctgctcggtgagacgggtgttggcaaatcgacgctgatcaacgcactcatcgcttacctgaaacatgcgactttgaaagaagcgcttgaggtgaccgagtttattaaatgttgtgtttgtaattggcattaccgtatttgctctaattatcccccaatctccaattatcccccagtctaggaggggtttgaaaaataatccccagtctccatttatcccccagggggataaatagaattttcagaaaattatatgccgtcaatttttttcaaaaaacaaacaaaatcgacagtaaaagtactacaaatgccaaaatagtggcaaagatagtggcgaaaagtccataatgacataattttcagccaaaaattgagcaaatttttttttattcactgggtgctgttgcaaatgaggttacatttccttctaatattttagaaaatattgacattttttacatccaaaattcttgacaaaaaaaatgagggatgaatagcttgcaaaaatttgaaaaaattagttaagattgaaaaaagttataaccaaaaaagttggaaagccgacttccaaaatgttttttatagtggcaagcccaaaatagtgatttaaaaatgccaaaatgacgacgaaaacccaaaatttttcatatgtttggggtgtaatttttaaaaatttccaaaaaattgaactttaggggtgtatttttcgcttttttgcattttcttgtgaaaatttgccaaaaatggccaaaatatggactaaaaacgccaaaatgtcgaaatattgatttatccccgaaaacccccaaaatatggatttatatggactaaaaaccttccaccaaatcgaaaaattttaacgcagaaatgttatttttaagcccctttcttcatagcatatgcgcagaaaaaatatgttaatccatataatttgcaaccctaattatagatacctagttaaaaaactagaaaaaacagaatttcttttaaaaaatgcaataaaaaatgatttttctttgactcgatgacattttttggcgacatggtcaaaaaatttcaaaaattttacacaaaataattctgtcgaaaaataatccccccttctccatttatcccccaatctctaattatcccccccccctttctgaagaggttgaaaaataatcccccatgggggataattagagcaaatacggtaactgaggaaagagatgaagaccttaaacaataaaaaaagataattagtgctaattgcgtcattaacagattaaatttgtcggattaattaagccaccatcgttctgatgctgctgttgactcgttgagggtcggctgtccaaataagtgatgaatttctgcagagcaccgattggagaacattcggtcgtcggcagagaatttaccaaaatcataaaaatggataaatattttaattgccattttaaaattaattaaaaatactatactatttatttatttgtgtaattttattaaaatattcaccattctgagacgaactctgcttcttaattgaattcgcaaacagagcgtcaattgaagaacggctcattccaactgaaatttaaaaattgttaaattattaaaaatatttatttgattatttttaattctataaatgtgattataagttgcaaatgtttcaaactttgctgctgatcagagacaaatttccgtatagatttgagaggagaggaaaagtttagtgccgacgtcggcacttctgaaacgattagaaaaattataaaaaaccatatatttatttaagttgatttgatacttaaatgtttaaagatttacttattttgaatgaattgacccaatggatttgcaagattagcgaaaagaatcgaactgttttggggttgtgacggaataaattcaagaagattggatgaattaaaagcagaaaagagagagggtgtttatgtgtaaatgaatgagtggagaacgaatggtacggtaaaagcagagggagggccaacaacagcagatgggcaaaagtgggaaaagaatgaaaaagttgagatgaatcggccgggatgaaaaggaattaattggaaaagggggaacaaatgaaaaggtgggggggggggcaaagaagacagacaaattccaaaattcagaaaaaagacaaaagtcagagagagaaagagagaggggggaggaggaaggagagagagaaagagaggaggaagaagaaagaggcagagagagaggaagagagagggagaggaggaagaagagagagaaaaaagagagtgtgtgcggagagagggagagagagagaggaagaagaagagagagaaaaaagagagtgtgtgcggagagagggagagagagagaggaggaagaagagagagaaaaaagagagtgtgtgcggagagagggagagagagagaggaggaagaagagagagaaaaaagagagtgtgtgcgtgtgtgtgaaacccaacaaaagaactggcgaaaacatgagaaaaaaactgcataagtccgaactgttgggagggaaggcataaaagcatggcttaaacagtactttcggagttactgtaattctaggatttatttgtcccgtacgcttttcaccgtacttggctgtctttgcttcttcgtcttcatcttcttctgctgtgcattgtattgtctgagccagtccgtttcgagttcgctcaacggcaccgaa

SEQ ID NO: 9547 - DNA, 3097 bp, Heterodera glycines
gggaaagtgctgtttatcttttatatgaagcccactattttgatgaggccagatagtttgatgggcattaggttgtagctgtcgtgaaaaatggtgagtgggccatgctcgttttccctgattttcagctcgtagaggcgatttccttgtttgatgatgtccgggttgtgaatcccttgcgacaaaacttccttgatgatcatcgtcatgtcgtagcggcccccaaagtgtgcaaacgcgactgttggaaactttttgttgtggtcgaaaagaagccactggacgaattcgcacagcggttgttgagtgacgactttttggtcgactgttgtctccgtgtagtcaaagggtgaaaaggtgattgagcggtgaggaccgcaaatttggcacttttttccctgaagtgatttgttccagtagccgttgataatgcagtcggtgcagatgatggtagccgctgcaaagttgacctcgtgttcgaaacggttctccaccttcttgtcctgtgtcgcctcaaagtcgtatgcgatgatcctgtatgacttaattctttgttgtttaaggggttggatgaagcatttcgtgcaggggttcatcccgtcttcgtcgtcttcttttatatgaaattgtttgcaaagtttacaaaactgttccccacatttatgcccaacactcccatgaacctttatgttataaattaccccacaatcttcgcagcgttgaaatttggtgcacaaatccttgtggaggtggcgcccataacagctgttgttgtaaaaggtgtgttacagtgctcacattttttgctgtatccttgctggggatcgcagggatagtcaacgcccacctcacggcacccgtgacagagtgaagagcattttgaagagtgttcaaatttgtgactgtaggcagattcacaggagatgcaatagtaacgtttgttgaaaaattttgaaagagttttgatgccgtcaaagtggttgttgttgtggtagagaagaatgggaaactggtagtcggtgatatcggatttggtgattgggcgcatctggtaatcattaaaaataaatattttgtactcaccgggatacttgacgttccacaacccttgcacttgatgtatataaacttctgcgtcgtactctgtctccgttgtcgggatacccgcctcgcggagtagttgtagcgccttttgtcgtaaaaccgttgtttggttgttgttaatccaccgccagttatcacgcgtgataattcctcgtttatacaaagagtagtagcgcatcagttccagcgcgtaaaaaagacagtagttgtcgttgttgttgactttgaaaatgtgcgattgtgaggagacaggtggtcgcccttttccctttgttgtccgttgtcgcggtagtccattggtgtttaggacagtgacggtaattataaagggagcgccatataagttgacgtgtttcgatttgctctgctccactttacaaaactggttgaaaacggcgtccacgacatttgcggtaattggtgtaatgggcagtatgatgtcaccctggtctaaaagttcagaagaaattatgacacctaccttatttgcagcgccaagtgtgttttgtccatctaaaattgcttcctcaatcgaatggtgcacacatgaacggagctcagcagcggggtcagcacatttgtcaatttcctcaatgacgaacttggattttgagcgcaccagttgatattttttactttttgaagtgaggttatcaattttacgaatgcatttatttggttgggattttttggggaaggaggaggaagaattttgagagagggaaaaacgtttcattttatttgaataataatatatgaatgaaaaatttatgatttataggtgatataagataatatgaaagaatattttgaattagaaaaatgtaaattttatagttgtaatagaaaattattgaaaatatttttttttttataagttgaatattggtaaaatattggatgaaagggtaatgtagttgcaaatttgttagtttaaatattttttgacggagcgcgcaagcaatgaatgtgggtagaattttcgcgaatgaatgggagaagttgacttttgctggtaatagccggctatttataccctcacaagtgggcggagcttgaccttcactcaagcatgtggtcatttggcaggttggcaactaaattgttcatgccatggcatatgcgctcaaatggcccctgcgtgcggtcaaatggcacgcgcgagcgctcaaatggcctggcatcccttccctcccaaagggcacgacagctgatgtccgtccctccaatacgatttgactttaataattatttaattaattaattttatattttttcatttatttttaaatttttatctattattttaaatttatttaggtattaattttttaactattattattttaacaaaatttaattttttaattaatttattattattattatttatatttttgtgtggtattagagagagcaagagaaaagagagagagagtgagagagaagagagaatgagagagagagagaaagaaaaaagagagagagtgagagagagagagagataagagagagaaagaaaaaagagagagagtgagagagagataagagagagagtgagagagagaaagaaaaaagagagagagagagaaaagagagagataagagagagagtgagagagagaaagaaaaaagagagagagagagaaaagagagatataagagagagagaaagaaaaaagaaagagagtgagagagagagagataagagagagagcgagagagagaaagaaaagaaagatagtgagagagcagagtgagataagagagaatgagagagagagaaagaaaaaagaaagagagtgagagagagagagataagagagagagtgagagagagaaagaaaagagagagagtgagagagatagagaatgaatcttagctttttattcaattatttctaaattataaaaaatttttttttttgaatttatttatttaatttatttataatttattatttaatttattttttattttattttatttttt

SEQ ID NO: 9548 - DNA, 1299 bp, Heterodera glycines
gaagtgaggttatcattttacgaatgccattatttggtggggattttttggggaaggaggaggaagaattttgagagagggaaaaacgttttcattgtatttgaataataatatatgaatgaaaaatttatgatttataggtgatataagataatatgaaagaatattttgaattagaaaaatgtaaattttatagttgtaatagaaaattattgaaaatattttttttttttataagttgaatatggtaaaatattggatgaaagggtaatgtagttgtaaatttgttagtttaaatattttttgacgtagcgcgcaagcaatgaatgtgggtagaattttcgcgaatgaatgggagaagttgacttttgctggtaatagccggctatttataccctcacaagtgggcggagcttgaccttcactcaagcatgtggtcatttggcaggttgccaactaaattgttcatgctatgccacactacactaaaatgagtcgtcgtctgactaacattttatgccatccacggtcagtcattagcggttaaatgaccaccagcgggcgctcagatagcccctgcgggcgcatagatgacacgtgcgagcgctcaaatggcccctgcgtgctctcaaatgacccggcgtcgcttccctcccgaagctgacgcccacccctccccttttaaacatcagcgaagccccataaaaacattccaataggcatccgccaaaactaaaccaatttctcaaattcaaaaataacgaaaaattaaagttttggcgccaaattcaaaattttgaccccggattgactactcaaggactgaaacggtcggactcaataggtagcgccctctcagctttttttttatttgactattataatttgtgtttattattattattattatttttttttataatttatcaatttcttaaatttttttcatttatttttaaatttttatctattattttaaatttatttattaattttttaactattattattttaacaatttaattttaattaaattaaattttttaatttatttattattattattattatttatatctttgtgtggtattagagagagcaagagaaaagagagagagtgagagagaatgagagagagagagaaagaaaaaagagagagtgagagagagagagagagagagaaaaaagagagagagtgagagagagataagagagagtgagagagagaaagaaaagaaagagagtgagagagagagagaagagagaatgagagagagagaaagaaaaaagagagagagt

SEQ ID NO: 9549 - DNA, 3247 bp, Heterodera glycines
  unsure (1)..(3247): unsure at all n locations
tcaggccaatattgcgcagggtgagtacaaatatttggtgtcgattgggagatcaaatcttctgaaaaaccccgcccnngctcagaactcgctagggatacgcgagcaaaccaacnaaaanaattaggaataagggagaaaaaaatccctgggtttcctgcctattaataaatccccgatcaatttcaaataaaatatctgatttagaacatatagcacaaaagtatgatccatcaatattcatcatcaatgagacctggttaaaccccagaaatacaattgaaaatgaactatctataaatggtagatatagagtaatgcttgcgaaccgaaatgagaaaaagggcggtggatcagcaattctaactaaaacaaatattccttatcagacactattctcagggacaaaattccaaagcgaaattttacacattaaattactttttaaaaaaccaatccaaatcataaatatatatcgtccaccgaattgtacagttcagaatactaaaaagctactcaaatttatttcggaccagagtaattctgaaaatatcatatattgtggggattttaacatcccaaatattttatgggatgaaaataaggtaattcaaagaaatgaccctgtgtcaaatttattgattgagtttattgaccaaaaacaattgaaacagcatgtcaaacaaccaacaagagaaaaagctattttagatttagtaattactagtgaatcagaaataattaatgatttaacagtacttgaaaatttttcaacttccgatcacaaaatggtcggattcaaaataaagggaaaatttagtcgtaataattgttgtgtcgtgcgattggcacaacaaaatagtaaagacaatatttattcaaaatagtaaaagtggagaacgaagtgatgagtcagaggaattaatcaataactggtgaaggagcaattgccattgttgctgtgtgtgttgacaaaaatgaatgaataaggaaaagaccatgagtgaacgaagtccactcattaaatggacaataattgggtgatacagtataacaataaatgatcatcatttggcgtgaatttaaatatataataaattcactacacaacacctccccccttaagtgaaaaggttaaaaatttgattttgttttggggtaatgtgtgtggtaatttatcagtgatcgtaactctgtccagtgtgcgtcggactaagaaaacgaacacgtttcctcgtttgttcggaacgacgcaaaggaagtggttgttggttttgcccttgttcttcttgttgcgctgcccgttgttgtggctgcgtgtttgtctgttgatcgtccgtcgtttcatttccagttccatgctcctccctcgcaaagatgatgtcatcggcgaccggacatgtttcgtcacctctctgtgccattgttgttcggatttggttggcatgacgcgtgacaattcgattgccaagctgaggggaacggatttcgtaaataagccctttatttgaaacaatgcgcccaaaaagccaaagtgttttgccatttcggtaattgagaaattggacttgctctccaattttaaactgtaccggctttacattgtgctttttgtcaaattgcaatttcattttggacgtgtgttcgtgatgttgttgctttggaatggtttcgggcctcatgagtgacaattttgtgcgcaattttcggcctaaaaacaattcagctggtgagcgttggcctaaaacagcaattggtgttgagcgatatgagagaagtgatttgctaagccaatttcggtcaccactgcattttttgagttggcgtttgaagtagtcaacgtagcgttcagctgctccgttcgactgaggatgatatggcgggctgaaaatgtgtttaatgccattatttttgcaaaattccttaaaaacggatgacgaaaattggggtccattgtcagacacaagcgtttttggaacaccataacgatcgaacaaccattgtagctgtgaaataactgaatgagacgaagtattgtttaactggaaaatttctggccattttgaataagtgtcaattacaaccaggtaagttctaccattactgcatggtccggcaagatcaatgtgaacacgttcgaaaacggatgttgttgatggccatggttggagaggatgttttgtgggttgtttggcggcttcttggcatggaacacagcttttgacaagtgattcaatgtcggcgtccattgacggccagtagaccaattctcgggctaagctcttcattcgaacaatgccaggatgagcgaggtgaagtgccttcaaaattcgatcgcgcagtgcctgtggaatgatcgtacgtccgttgaaaacgagacaatctgagattatggacagattgtttcggacagtaaaatatggttttatttcgggattaaggcctttgtttggccaccgtcccattgtacactctaaaacttctctgatcagcgggtcactgagctgtgcctcggcaatttcctttgcggtgagtggcaattgttccgtttgcgtgttgaatacatgtgccacatctgcttccgtgtcggccaacaattttgcaatgacgacgtcttcgtctttagagcatgatcgttggtcgctgatcagtcggctcaaagcatcggcttgtcctgtgcagtccgttctgacaaactcaatcgagaagtcgtagttgagcagaatcagtgcccaacgctgcaatcgtgaagctgaaaatatggggatgccactctttgagccaaaaattcccaacaatggtcggtgatcagtacggagaataaattttcgtccaaaaataaattgatgaaatttttggatggcgaaaattagcccaagtccctctttctcaatttgggaataggcctgttccgttttggtgagagttcgtgctgcgtgttggaaaactttctcttttccgtcgttgaaccggtgggaaattgtcgctccgattcctttgttgctcgcgtcggcggtgacgatgattgtgagatcggggttgaagtgtgtaagaactaagtctgacagcaacacagactttgcttcatcaaatgatttctgatgttcccgtgaccattcccatttagctctttttgagcaatgagtctaatggtgcacgaatttcgtgcaaatttttgatgtatttcccataaataattgatggcacccaaaaatgaccggagagatgagacatatcgtggtggagg

SEQ ID NO: 9550 - DNA, 2244 bp, Heterodera glycines
cttatactgttaacatttttttttgttattttatgcttatatttgttgaattgaaaatttttattcattgacaaatatgataatccacataaaaatgatgaaaacacaaaaattcctcacatctagcgcaccgaataaggaattgctgatcgcagcacattttttggcatgtttccggcccttttgaatcaaaaagatatttaacaggatgaacaaaatttttaaaatcatcatctgttgtgttcaaatacccccctttgtgccatgcataacggagaaactggacaaattttggtgaagagatttgtcgatgaaccaaactttggagtttaacaatttcatctctggtatgcaaattgaccggcagatcatcgagtataacgcgatcagaaaatcgcctcacaatttgcttccatgttcttaattttattttaatttctttattttctgagcaaaagaccgaaaaagatataaatcggctggctgtactagcccagtacatcccggtggaattgtttgaatgcgaatgtcatccaccaccatccgctcggaagtgctctctttttctccaatcacacttttccaagttggccacgaatcaaggatcaaaacggtttttttgccagaaattattggcaataaaacatcagagacaaattttttggcaatttctttggtcattatatgagatcgtcccgcaacagacaaaatattttcagcctttaaattttaaaataattcatttcttaaaaaattcttgcctggaaaatgcctttttttggaaaaactccgcttttttctccaataacaatcaacattggactatacaaaagtccatcagcagaaaatattgggcagattgtgtaggaatgagtagttgatccaacactctgaacatatccttcaactttttttgtgccggatatttccagcgtatgtgttgaatgaagttctaattcgaaccctgattggtctgtattaaggaccaaatcagggtgttcttttccaatgagtgttttggtatcagaaacaaattctgccgaatcagtgtatattttttcttggtcttttgcccattttttgccaacaaatttggtaatctaaaaattatactaaaaaaccaacaaaaaaatttgttgtacctttcgtgttacaatgtgcttccgccgtttaaatccttttagccaataaattccagctttaaatccagaaactttatttcctgattggttatttaattgtaatgcccatcgacgaaggtcagaatttttgatcggcaaattcattttccgtttttcgataaaaaactcaaaaagcagatgatccaaatttttataagccgatattttgtctttcatgttgatttcaaagctaaaaagtttttttatataattatttattcaattttactttcgaagtttctttaaatcagattcttttttgatccaacgaaagttttttgacattgccgttagtgatctatatcctttttgagcacttcgataaaaaataagggccttctttttgtcttcaagtgtgatatgaggagacatcactttttttggtgatggcacataatttgaagatgacgatgattctgattaaatttactatatttaaatacagtaatttaaatcacttgttggtgattcctcttcactttcaaattgactttcgccttctatttcaaattcatcatccgattcgctcccttcctttccaccaatttcagcaaactcatcatagaccaaatcttcagaaatttcaacttcaatgcgttctctgttacatttttctatgacattgatcagatcgtacgacaattgctcttcgatttcattaatttttgttaattccgattatttgaagtgattttgcagaatataaataatattagcggggtttacaaaagacattttaaaaagaaaacattaaatattttaaaaattgaaattaaaaagtttaaaaaggttttataaaagcaaagcataaaataacaaaaaaaaatgttaacagtataagggaattgaaccagcaaagaaaaaagaaaacctatagcacaaccaatgcggcaacaagggagttgaaggtcgctcttctctattgcatttattgggataaaaaaagtttggcacgccatatctcggcactcatgctcatttggcaaaaattatcaaaattttacaatagaacctaggggtgatctacccacccacaaaatttcatttggaaatcccacggtca

SEQ ID NO: 9551 - DNA, 2746 bp, Heterodera glycines
  unsure (1)..(2746): unsure at all n locations
tttttcagaaagtgctctaaagcgcaccaaattttatctttacttaattttagcactctgatgctttagtatcaaaaacgaagatggagaaaaaattttttaaaaaatttttccttatattttggttatatcgttttgcttttggtggggtgcttggaacagtggaatcatgcgcacccgtccgatctggcaagttaagcaacgattgctgactagccaaaaggttcggtgccgtgatgaaacgaaccagcactgcttaccccgcggcacccggcacggtcccccgaaggaatggatttaattaaattctctccttcggggatttttttccattaggtcgtccgttagcgttcaattgctctagtcaatttttaaaaatttttgttgaaatatttgtcgtgctctgaagggcgtggggggggggggcnggaattttgccgaacattcggctctccaattttcgtcttaaatttaaatataatttcaaatgattatttgaatttcaccttcttttggagcggtacaacaaagaaaaaggctcaaacatttgacggcacttcccataatcgtaaatatttgaacggatattttccatggaagtccccctaagcacgtcacagtttcgcttttgcgctcactccaaatgatttctcgcgcaaattgtgacactttttcaatgtccataaaaagtgtccctttcgatttgctctgatcagcggaaattgctctgtccatttctgcttgccccacaatgacatcaatggccaaagtcactttgtcctcatttttgtcgtaaaagccgtttctcggatccatcaattgcttaattttggatatatcatagtgagcccttgaaaaaatggcgcaaattatatatcaatcgattcatctcgagaagcaaagcccgaaaacaaaggtatccagtcgcggaaatgccaaaaacggaacctgaaaactcgaaaattgagcaaatttggcacttacaactttttttctaaatgatcgaaccaagacaaatttggtatcaatcgaaaaccttgacgagctaaatctaaaaatcagtggatgacgtcctgccgtcagagaatgagagaaatttttgaacctggttcaaaaaacgaaaatggctgattcgatgataccaatttgtcataattcgatcatttattttaaaaaaaagttggaagtgccaaatttgctcaattttagagttttaaaccggttcaaaacaggttttttggcatttccgcaactggagacctatgtatgttttcgtgtttacaaattaactccccgagacgaatcgattggtagcttttttgaatttatttggccgtttctccaattctgccattattggcctttcttaaattttccaggggaaatgaaaaataatgacaaaattacttaaagtcgatgaactttgatatcgttcagaagattagaatattttcattagaataccgtacttactgaattaatacccccgggggttctatttttcagccccctcgaaaggggggttctaattcagtaagtacggtatatataatcagccctcacccaaaaagcaatgaaagtggggaatccccagctgtttgatttgctgtcaaacacattgtcaatgcgtttccctgtgcaattctccgcccctttgttttgcgcgacaattcgaaaggttgccgaacaattgcaactccaattcgaatcttaatgccaatagttgaaaagagcggtaccggtgccgatttcgaagtggaaaaaagaaaagtgcttgaaaattcccggcggcggcgcctatcggcattttttggtttgaaaaagcaaaaaagaagaaaaaagcaattcgattcatggcatgactcatttcataaaatttgtcgtcgaccccccccccccccttttagccaatgattagtaaacatagtttactttcattattattcattatatagttctttgaaattcaccttctgttggcgctgtgcaccaaaggaaaatgcccagccatttcccaacaaaattttcatcgttttccgtcgtcgcatttatttttgcaagtatttcaaatggaagccctcggatgtgcacagttttgctgtatcggcagctccccataactttgcccgcaaattccgacattttttcaatttccagctgaagtgtcccttctgttcggtccgaaattcttccctgcctcggaaatttcaatgggtaaagctcggaaaccatgtgcaaattcggatgacaatgaaactgataaatgccgatcacttcttccactgttaacacaccggacggaactgaaaaataaataaattggaaacggaattaattaaattattttaattaatttaatgggaatatattttcgaacatttaaagtcttaaattccttgtagactttagtttcttacggggggggcgaaggccccaccacgaggccgcgaagaggccgagtgagtaccttcggtgcaggtaaattattaattttaaaaattttttaattgctttttaaatatgccaaaaaatgtaggcttaacttttttagtgaaaattcgatcactcatattttttgctaattgagcagaagcgtaccaaactttgcagggatactccccggtaaaggactaacttacactgaaatgagcgccgagctagctggctcaaaaaaattttcgaaaatctgagtctttcgtttttaagggagttttgcataattaattcataaatattttttcagaaa

SEQ ID NO: 9552 - DNA, 2552 bp, Heterodera glycines
  unsure (1)..(2552): unsure at all n locations
gcaaaaaagaagaaanaagcaattcgattcatggcatgactcatttcataaaatttgtcgtcgaccccccccccccccttagccaatgattagtaaacatagtttactttcattattattcattatatagttctttgaaattcaccttctgttggcgctgtgcaccaaaggaaaatgcccagccatttcccaacaaaattttcatcgttttccgtcgtcgcatttatttttgcaagtatttcaaatggaagccctcggatgtgcacagttttgctgtatcggcagctccccataactttgcccgcaaattccgacattttttcaatttccagctgaagtgtcccttctgttcggtccgaaattcttccctgcctcggaaatttcaatgggtaaagctcggaaaccatgtgcaaattcggatgacaatgaaactgataaatgccgatcacttcttccactgttaacacaccggacggaactgaaaaataaataaattggaaacggaattaattaaattattttaattaatttaatgggaatatattttcgaacatttaaagtcttaaattccttgtagactttagtttcttaccaatatttctcgaaaattcttcttttgacacgagcggaaagcgaattttgaacagtgctgggccgagcttggcacgacggttttcagaggagcactcaacggcattttgacggcatttctcgtcagcccaacggatagccaaaaaatatcaacgtaattttcttagataaattaatatcatactgcgttccaaattgaaatttctccactgatttgcaattcgtcacgactcaaaatttcacacaacgttttttggtcaatttgcaaaaatgccaccgaattgagcaaagtgtccgcattctcatcaatataaaacaaacaatgataggcaaagttcttaactcaaaaaactaaataattaatatttcgatattttcgcatggtacaaaaatcgccataatccgacctccttaaaattccgaaactcgcaatacccaatactgaatttttaaatttctatatttcaaaataattgatgcataatttttgccttttctgaatttgttcaatataaaaattttataaacaatttaatctattgaaagagtgatgcttttgagtgctctgtcatcccacctctaattcaaagagctgagcctgggcataggcaaagaaaacattgtgcagttttgaaattggaatttgcaaagatgggacaaccaggccaacgatgttgtactttttggctaattaatgaataattaaattgttagattaatttcacaaaaacaatttgaccagcgtaaagcactgccattgcgttgtctccgtccaattggctcaaatcgtcggcataaatgaagctgagcatcactttgaacgctgctgcctcaacatcgggcacttccacaacacaattagcgcaggctaataaattaattgaccaattaatttattcatcaaatttttaccattttctacgttttgattctgtgagtcaaaacggaacattgcctcgaatacttcggaagcatgcttcaaaattactttatgggctgcaactctcttaaaaaggtttttttaaaaattaaataaaaataaaaattaattaataaatacttttattttcaaacttgcctccttttcctctccttcccccaccaaaaagtgcacatccgcgtcctctccagtgctcaacatccgcttcatccgatcaaccacagacaaagacattgtaatgataaagcaattgccaaactcgtaattttatcaattcaaatgccaaaatcggtaaaaagaaaattttgttttcagagcgtaagtcaatttaaagaaaaaaaaagatgtttaacattttaatttttaaacgataatttacattttattattagcttaagttattatgtattatttaaaaatgaacattactcattgtataattgtaaaaaaagatttgcaatgtaaaggattttctgctgctgatgagcttcactttcttatgcgggagggcacaaaataacaaaataattgcggcaaaattatgacccgaaaaacgatgaggagaacaaagcaaattcatttgaatttgttgatttgtacatatgcatggataaggacttttagatggaaaaagataaatctcatcccttttcgaatataatggtttaatttttcattcttagaatgaaattttttaaaataaatggtcatttatgggttttttgactcccatgaaaatttaattgttttttgaaaggtgatttaggcgctgatcatgaattattcatttatttttatgttaacgcattctataataatgttcatcctaccatataaattgaccatagcgaattttgaatttttccgttttttcaaaattagtattaatctttggtgcaaatttattaacaaaatcgccaaaatgtttccccggtggcgccaccatcggatccctaaaactcctctgctttcttacacaattgtctcaaaatcccaaaatttggtcttttgaataattcca

SEQ ID NO: 9553 - DNA, 3625 bp, Heterodera glycines
  unsure (1)..(3625): unsure at all n locations
acatgtcgggggtcgagtcggggaataggtccaaaaaacgtctcgggtcgggtcgtggggctcggagtcggggctgaaccctagtatgtaccgtcgtcataaacgggcggcaacaaatgtctgagcggactgaacgaactgccgtagtgggggaagcgcagattgttgcaccaaccgttcggagttctgttggcacaaattgttaaagtgttatttggagtcaaattggcaaatttagggaaaattttttataggcttacaactagggctggtcgggaccgggaattttgacaaaaaccgggaccgggactgaccagaaaagtcgggatcgggaccgggaccaagtttttcgaccgggaccgagaccgggaccgcgagaaaagccgggaccgggaccaaccgggaattttcccaagagaaaattttttgaaaaaattttgaaaatttgagtgcactttgttacgaaaatttcctaaattcaaaaatgtgcccagaagattttaaaattttcttttgggggaggaattcgaagaattttctattattctctgtttcatttcgggggggggggggatctggaatcttggaattttctgggtcccaaaattctggattttttaataaattaaaatttcttaaattttttgcttttaatcgctgtttttgtggcgctgttttccaaaaaaaacttttgggaacattggtgagggggcggcagggtccggcggcgcttatcggcaccgccggaaaatttttgaaattttgagtgaaatatgttaagagaatttgtcaaaaaatgaccaatatttggcacttcaaataagtaaatcagatgttttcccttttttgcataagggctaacagatctgcaaatttctgcaaaatttcaatcattctgacaactacgaactgaataagaaaagccgctttttcaaacttagggaattcctggtctatattttttgacagccctagtacctacctattctaattaatattttaattcaactttgacttttcattcaagaatgtcaaacattgcctttataagaattcaaaaagaatgcaaagaaatcattttatgtaaagaggtaattaaatagaataatccaaaaaagaaccttttttacagttacaagaaaatggtgtaacaattgaacctgtaaatgagacgctttttgaaatcattggaaagatacgaggtccaccaggttggaaaattggactttttagttaattgtagaattatttcagatagcccatacgaaaacggaatatttattttggtacaacttaaatctttttttttaaatttattttttggtaatactttggtttgcccccccccccctattttcaaaaaattattttttgttcgcgatcagcgaccccggaatgtctctgaaacattttatttttatcttttgaataaatcaaataattgaatggcgtgaaacaaagtattaccattttatatccttttgttattctatttttaaggacgttaaaattccacaagaatatcctttccaacctccgaaggtttgatcgaataatatacaaaggcaagagagtattttttacttataggttaaatttactactcatatttggcatccaaacattagttcgcagactggtgctatatgtttggatattctcaaggaccaatggttttgtgtgtttatattcacattattcaataaaatacgatttagggcggcatctatgactctccgaacaggtgaaattaatttaatataaaataatagggagtttatagcttctggactggttgttctctttagtgcttctcagtgtgcaatcgttgttactttcaccggagccaaaagatccacaggatgcaattgttgcgaaacaatgcttaagtgaccctgcattattcagagtcagttgttaccaacctttgaataatgacttggtttgtttatctatttaagtccactgcaaaatattgggcacaacattatgcaaacgctccgggggaaatagacagaaataaggcaaaatgtgtgtccacattacaggagatgggagcaagtaaggtgaacaagcaaaatcaattcaaagcagcactcgttttaatcttcatcttcattttaggacgccagtatatccgctttaagctgctataattggaaccttgcaaaagctaccgaatttctctttacataatttattgtttaataacatcattttgaataaatgacgccttacaatgtttttggtgtaacgggagtttttcattcgctattttttatcagttttataacaatacacctaattaggttttaagcataaaaatgtacaccggagatgctgcaatttcggggtcatctgcacaacaggcaaaaacgggcaccgaatcgagcacgagcaagccaaaggcgtgctgcgtctgcaaggagacaaaaggggtaaacggggagttgggtataattacacactcaaaattcatcattcgggaattgtagacctcttcccttcccacattccgagctaaactcggaaaatcataaattaaataccattagatagagcagagtcgacttgcatgctatttttaattttagcggtgtctggcgcctatttcaaatccacttgcctgcaaacacttaaaattttagggtttttgtgacggttgatcatgaatatggcatccatttcgcccaattctgaatccttgacccaaacttgcattttttaatattctatttttaagcatttaattattaacctcctacagctttaatcgcacatttcttttttgaattgatgtaaaattatttgttctagttgggtcgggggttcagaactagccgaaatgaatgtcaaattcctgaccaacggtcccaaaaactcaaaataaacacaagacgaccttgatctatccaatggtatattaacttatatggggtttcaaaagttacacctcggaatattcccttttaagcctattgtacgaattttttgcaccaattttctatgtactaattttcgaccatttttattcggaactaaatatggaattggttaagtaaggtgttacctaagtccattattcagaagcgggacgaatgtattattctgaacggtgaagagaattgtggtcaactgatcgaagcacacaaaaaatgcatgagagaatatggatttgaagtgtgatgagagaatatggatttgaagtgtgatagctgatatacgtttcttgttttaatgttttagtattattgtagtaatctagtataaatggttgactagttatgtattttgtgccatcatggaagtttgccatcccctccctctttctgacaataatctaatattattaaacttttcaataagttgaacaggagacaattctttattcgttggaaatacaaaaaacggggtaaaatgcgcaatttgcgtcaaaatatcattgaacacttcactagtcaacccgttcaaagagtgtagtcaaatgctaccgttatgttgcgtgtttttagtcgatgaactttgaggatgggtcttcttattaagatttgtgtgttttctncccttccttttatttaaaggttaaaggattataatattcgttttgttactgaataattggatg

SEQ ID NO: 9554 - DNA, 1939 bp, Heterodera glycines
gttaatttatgtcaaaaataagcaaaattttgcttttcaggttgatttttcgctaaaatgagtaaattttaagctgtatcgtgtttttttctcctaaaatgctttttaataccacatttagccatttttgaagattttactttatgtttaacaaatttgaagaaattttgagaaattacaccctcaattggaaaattttatgtgcatatttttcactttttatgtgcatatttcacgatttttggtgcatattttatgcgcatattttgcgattttatgtgcatatttttgccaaccctaaagattaggggcgacatgaagtttgggcactgggaagtttgggcaccgggaagtttgggcaccagaggggggatttcaaaaaaataaaacaaaataaataaataaaatgttatataaatcattaaaatttagtaaattttagcaacccttttttcttaaaatttatatgttcttgaaaatcaaaaaatttatgtatgggaacctggcaatcttattatttaatcaattcttacggttgtttaaacgtataattaaacgtgtgctagtttctgtttggacttatacctgaataccggcttagttgggcccgaaataacaagaacccgtctaattttgtttaaactcataaactttaagtcttgaacatactgagccttgtaatgttataagttataaataatacatatgtatggcattgatattgaattaattgtaatgagtttagcaaaataagcatgcttaatcgaatgaatattcgttaaagaactttctatttcctaacttgattaaattttctatgcttttaattagatggttgcaattcatagacaattaaaaaatatttttattttttaactctttaagttggtgcacaaacttcccggtgcccaaatttctggtgcccaaacttcccggtgcccaaactttccccgccccccttttgttggattggtcaaaaataagtgacatattcataatcagcgacccccgaaaacccctcaaaagagtccccctaagggtttttagtaaaattacattatttttcgtcccacctaaactataaaagttccaattactgtatttaaggaattaattctgttcattttcaggaagttaaaaagaactccattgaactgagtctattcgaatacgaccgacgctttgaacagaaatttccgcaatttttcatcaattatgactaccgtaaaccattggatgtgccttccaatttgcatcacaatttcgattttttgatagctgatcctccatttctatccgacgaatgttttattaaaattgcccaaacaattcgcctgctgtctaaaaaagagaccaaattgataatcaacacgggcgctgtaatggaaggactgctccaacggattttggatgtgagaaggactgaatttagacccgtacacaagaacaatttggccaatgaatttctgtccttttcgaattaccctttatccattttgtaacttattcttactttcttttttgtaatttaatgaaattaatttaaattctgtgtttttattttgacattgttttttaccatatatgtatttaattttttcaagacaatttatattcataatttaagcaacaaaaaaaggcatttttgacgctgtgattccgatggcatacggcactgttcagcaacagttgtgggccgagttgctctgttgttcaaactgcggaaatgtatgagttttaaaataaatattttaatgttatattatggtatgctgcaggaaaatttttttttttaacaaaaaaatggagtttaaaaaaaactacttttgttgggttgattagtctttgcatgtgcgtgttttgtgattaattctttgcccctcttccatttcgttattgccaacccttttttcttaaagattactccattgaacatttg

SEQ ID NO: 9555 - DNA, 3804 bp, Heterodera glycines
  unsure (1)..(3804): unsure at all n locations
acaacgtaaaatcgagaaaattgttaagcaattcagtttatatttgttttattatgaaaggaaagaaagacttatatagcgcaaatttatagttttcttaaatcaagtattaaaaagctcgaaaataaaaacaaataaaaaggacagataatatagaatcaattgcaaataatcaaaagatctaactaactaagtaaccaactaataattattttttcaaatttaattattttaagataacgaaataaaacaaaaataaaattcagaaagatagatttttaaaatataagaaaataacctcaacgaaaattttcaattaataaattaaagagttttttcgagcgttaaaaatattaaaataaatgattttttatattgcaagtttaaaagtacataataaatatcataaaaaggttggttgttaaaaatataaataaatcattaataaatattcaaaaagtcttaaaaaaactatttatgtttttccctctttcactccggtttatttgaataaatattttgacgttagaatacaaaattttttaattattaaaaataacgataaatttatcaatttaaagaataaaaaatataattttatttaattgattcttggtagttgtgtgtggacgcgcagaagccgatgcgtttttggatgaagaagggcatcaatattttccttgatcaatttggaggggagcatgcagattgaaattattgcaatataaataaaaataaaaaaagttcattaaattttaataaaaaagaaaaataataaaatttatacaaatgaaaaatgaaattataatataaaaagtttaaaataatatttggttgttcgaatggctgaaaaattatataggcaaaaacgggacattgttcaagtcagattcaccgtgcactctacctcaattgaatatcatttaaataataatttaaagattactattactgtaggcaacaaaaaataataatggcacttacaaaatcccttacctaagaaaacaaaaatttattttaaaattttcaaacattatataaatataagtataaaatatttaaggttggacaatttgaatgtgctcatatataatcaatagaacccgtacaggaccgggatcccgccgggattttgccggtcccggtccccgtcccatattttttagacaaaccaccaagaccggtagtccctttaaaacgggagtcccggtcccgagatcgggagtcccggtcacgagatcgggagtcccggtcccgagatcccgtcccggttcattttccaagtcccggtctcggtcacggccatttgggccggaaaaacggtctaaattttaccagtgtaacagccccaaatttgataaataggtgaaacgtttctaatttaaattttcaagatagaactttagattttttaatttggggcaatttcaactgttaaaaataccctgaattcaatatgaaaataaataacatttgcataactttcttttaccaaaaaatatttccaaatttatgaaaaaatcaacaaatttcacaataaatttcattaaaactcaaaaattttccgcagcgtcgcctagtacaaaaactaaatttttttctaaaaaagttagctcaaaatagtaaaatttggccatttttggtgtaaattttttttgaaaaatgtgctaaaaacacttgtacctaaattacaattgaaaataaagcaataataagcacaaatggtaaaatattcatcaattaataaaaataatgcatttggtcatctcttaaataacactcaagattattagcaagaatatttcatcatgttaaatattgaaggccgaatccatgcggattttgtaaaaaaaatttatgagaaattttaatattgcagacaattatcatttttacattgtatttgtcggctatttcgttattttaattatataaggaaataatgaaaaacctttaattatttaaaataattattattgaattgtaaatcttccatatttttgacttgaatataattgcattgatttattaaaataaaaatagctcaaataaatataaaatatattattttaaacaattaaatagtgattttatctggcatanntttgcagcaaaagtttaattnntaatatttcaactattatattagtgtagctattctcaagcttacgaatttataaatattttttaatttaaaataaatgtattattatttctgttaattaatatgcgcaatcctaatatggagaaatttgtaatgttaaaatgtgctggcgaagattccgcaattatttttttttgagaacgagaattattattaactgctataattttattcaataaataagttgaaaatttgtcttaataaaataaaataaatgcaagcaatgaaaaataaataagcatgaactgttgatattaattttattttttgcctctaaaaatacatacgctatctattttcaactaatttgattaataataattcatgaaaataatttgataagtattttgtatttgaaacttatgagttaaataaattaatttaaaaaattaaaaagttatttataatgagagactcaatagcgaacacgctcagcttggtcgcatctcgcaaaatggcgagtgcacgaattttggtagaaatactcttaaaactacatctaacatctattttatctggctaatttgaacatagaaaaattattaagcaataaagtgaagaaaaaaatacaattgaatacaggattatatatgaatatcaaatattttcaaaaaaaactattaattttcattcttttaatatttattatttttccaaaccaaaaattaatttgacaaataaaatatgtttgtatgttaattgttattaaaatattagctttatttaaaatatttgaaattgattaataaacaaaaatttatatgcttctttccaaaagaagttattgggtccggattatagatcaatagggcatatttgtcaaataacttaaacaatttatttattacaaatatttgctttatttaaaaatccttaatatccacagaaataatatgtctactgtagtttttccatcactaattgatatttaactaattgaatgtttcacaacattaattaaattttcttaatttacaataaagtcatgtatttttgacaaagcttcgaccgcgacatcttgaaagtacttaaagaaattggttaaagaaacgccttttgaaaaatttatttaaataattgttaagttagaaaatcgttgtctataatcaatatagtttattcaattaaagtaaatttatgaattcacgatttttttacttaaatcccatccttagtaattaaagtgtagtgatattattgaaagaaattcaatctgaaaatataaaataaaatttaaatctccaatacaaatactagataaagaaatcaaagattaaatttaaccctagtactcaaagacaattaaggcaaattaattaattatgtatgcattgttgattggccgacatttgcggcgctgacatttgcggcgctgacacttgcggcgcagacatttgcggcgcccagtcaaagcgacacttgcggcgcagacacttgcggcgaggacatttgcggcgccgacacttgcggcgcgacacttgcggcgccgacacttgcggcgcccagtcaaaaggacacttgcggtgccgacacttgcggcgcccagtcaaaaggaaatttgcggtggcacaaaatttcaacgaccccaaaaaaattttcacaatttatttaccattaaaaacatttataatgactctctc

SEQ ID NO: 9556 - DNA, 2729 bp, Heterodera glycines
ctccccctccccataccgataagatcaattgctccatggtcaggttatgtaaaatttgagctaatgcataaaaaataaaattaatttgaccgtttcagttaatattgaatgaaaaatcccaaatctaataaaaaaaatatattttatacataatttcttaatccaatgaataaaatctaatggtaaactctaaactgggaaggagattaaattttatgaaccgagaaattgttcgcatatatttcaaaaacaaatcaaattcaaaacataatttcataaaatattaaattaatatttcattaaaataaaataaaataaatttatgaaaataaagcattaaaaccccataaaacgagcatgcattagattcactttgatcgtataaaaattcataatgtgataattaaataatgacctcatttgacttttaaagttttaattgatttggcatattgttttttttgtgtgtctttcattttcatttgatgttttttttcactcttcgcccggacttaaatttgtgatgcggattgtgtgtggtaattttaatggtgcttttaattgttgtgttgtttaaatttaattgatttggattgctgtggctttaagtgatttaaaaagtcttccttctcattcttctccttcgccccgttttggaattcggcaaagagcaaaaaagaccccgacagtaaagggcaatttatttacgacgataataatttttaagtaaactttgtttttaagacatttttgatcaaatatctgaaaaatgcgaattaattttcaaattttgtacaattgcctaatttaattaatatttttttaaataaaatttaagtaaatacatttggctgatgcgacattgcggcgattaaacttgcggcgttacattttcggcgcagaattaaacggcgtctaaccaaatatatttttattttatccattcctccgtttaattatgtatgaactggacaaaatgttaagccattggtggtaaataaagaaagacaaaacaactttttcttaagaaaaaaattgttttatcggagatcaacatttaaattgttatttatttatttatttagcattttgctaacaacgtataaaacaacttgtttttaaaatttccgtcaatttttgaaaatttattttagcgggtaataattttatggagagagatgacgcaaaatgagagagtgcagaactttcagtccaagtcatacaaaacatttttgatcaaggaggatagagaaaataattttaatagagagtgcaatgggaagaagtttagttcccaatcttcgctgattcctttggtaatagacggagaattatcattatgtttctattgtctcgatgtctttgaatctcttccaataacactctctattaaaatgtttgttctctgtctttcttcatcaaaaatgcttatgtctgaccagtactgaattttttagctctctcattttgcgttatctcttctcaagtgatatttcccgctgaaataaatttttaaaaattgaccgaaattttaaaaatttagttgttttatactttgtcggtaaaatgcacattgttaataattaaataacaacgtgaaggttgttcgcccgaagaacccgctgaaaatgtttgaaagaatgaattaattcagcggttcattttgcttttgaaaagaatttcttactagaaaaagggaaacaaaggatgtgctgttaataaaatagactcaaatgtcccgccgaaaatgccggccaatcatatattttgttaaaatcgtgaaggataaaaatagattatagatgattcagcaatataacttaaaattataaaatataattctaattctttaataaaaataagaaagcttcattaatcaataacgaaataaaactaaaatttggaaaatacaaaatttcattaatcgatgaacaaaataaaactttgtattggaaaaattgaaaatcaagaatttcagcaaatgaagatatattttctgaataagttgtaaagcatgaaggtttcattttataaaaactcacctaaaactaagctttaacgaatgaagttcagatgcaaataaatgaaatgaaatgcaaatttctatacaatttttaaataaatctatttcaaaaatttgcttcctagagacatactaaataaaattcatttttttataatgaattttaaagctttaaaagactcaaagtttaatagtttaaaaaatgcaattaattataaaacatttaccaaataaatgtaagaaatttaagcaataatatataaaaaaatacgcattaaacattatgaatcgtaattaaatttgcttgagtaaaaaaatctttcttcttcaactgatatagcagattatttatatacttgctaaaaattttgtcttgtaagacgcaatcagtaaatataaaaattatacaaataaaaacaattattatttaaaaatgaataatgactaaaaaatctaatgaaattatcaattatctagcaggtatgtatgtataaaacaaatgacaagtaataagcatttaattttttgggggaaaaattttttttttttttttgggggggggctatattataggaaatatgatatccttataaaaagaataaatagagtgattattcaattgaacaataaaaaataataattgaaataataatgaacacaataggaaatttgctgaattctcacgacgtgcaaaaatattaataac

SEQ ID NO: 9557 - DNA, 5498 bp, Heterodera glycines
ctcatgcgttcattttcggcacagcttcttaggcactgttgctgctgtacatttgttgtcccccgcggcggcgccattttcgtccaccaccgccaccgccgtggcaccgtcctcctcctccgcctcctctggactgagcgccgtcgttgaggagcagcaacggcaggctatgccaatgccgtcgccgaaggtggaagacaatgagcagcagcgagcagtctcggccagcgacgcgacgaacccggcgactggagcagaagtcaccggtgctgaggtgccatcgtcggcgccgttatcctcgcaaaagcagtcatcgccggcggcggcgattacttcggcacatgtgccacgccaaactttgctgtatttgcccccgaatgccaatcaatggatcccggtcgtgtgaatgggaagaaaatgctggtcagagaacgaagaggatggacggaagaagaagcatcatcgagagttggagagagtttgccgtcgagaaaattggccgagttttttttgtgtcgaattggagaaacccatacacaaagagtcgatccctcccctcccgtcccccaggggattatccattatttttaattattttttttatcattttaaatttgtttcaaagatatataatatataaatacacatgtgttttgtctgcattaccacatcattttcatgcttttctctgatgctgttccccctttttcttatcactcaccagccaaacatttcccgccctaaaagaggtgctttgaaaattattttgttaattacccaatcattatcaattaactaattgtctcttcgcaacgacatctgctgtttgcttatgtgttagcacttatacacacattaattcattcattcatttgccgattgttccctccccctcatttctgatcaatcgataatcttatcaaatcaatcaatggtaggaaattaaaaagtgatcaaaatgataacagtcaatagacaaaatactttttttttgtctctccttgttccattagttgcctatgctgtgctccgaatttatttgttaaaatgatacattatcgaagctgtttagaattgtgcctaaaatatttttttcttcccatttttggtgtcgtaaacgtcaatcgtttagccctaattgtttttttttataattatttttgtttcaattacggtatttaccatttaatcttttttctctttttgtttcttctatcaaagccttctttttctccagttacaaaaaatcggacagtgtgagaagaaaatatgaaattgataattttaaaaatttaaaatttgtggactttataattttttggaaattcgaactttaagtctgccccctcccccccccccctaaaaaaatagaaaaactttgaaacctaaaagaaagcatctaaaagcccttcaaatgagggaatcaaaaaaattcatggccatcaaaaagttattttgaaaaccgtaatgaattgaaaggtcaaaaaattaaggaaaccattattcatctgggaccatcgaaaattgcggaaaccggaaacaccgaggtttatggcaaaaccgcaggaatttcttcgattctcttcctcgacagtccgatttatttacccatctcttcgccccttccccctttctgttcccaaaaaatgtgttagccatctcttttttccaaaaacgagtaccacaagcaccacacacacacacaacaacaaacatatgcatacatataaaataataatgaatatatccatccatccatcaattttgataaagccaagtcaaacgcgaaaaaataatggggaaatgggcaaaaaaaaacaacaaaaaaatccattacggcgggtcaatttcatttttatcaattgatgaaagacaaatgatgatgatgatgatgatgatgattacgatgaagttaatgaggctacaccatagcagcagggcacagtagcaaaaattgaaaatacttttgaaaaaaagttaccgtaaaactgagaatttttcggaagacacggaaaagtgtaaaaagggtcggatggttaactcttggaaaattttttaatgtaaaaaaaggggaccaagattgaaaataaaatttaaaaatcaaaaaattactgaaaaacccaatcattgtttttctaagctaatgatcggttcattaattctttcctctgcttaatgggtcattagcatcatcattagtcctattccctttccccaattaatttttaaattaattttcttcctcttttatttgtctcccaataacatttttatgtaccggggaaagaataaaacagaaccaaacaacacaaaacatgcttttgttcattcatccataaatgtgtaaccaccacacaatttcttctgctacataaaataactgtttaattttttcaccatttcatttgctcgtataataaacatttttttcttttcgattttgcattttttaaaattattttgattaaacaattaggaaagccaattaataaaagagtgggctgcctgatcacaaattgcttaaattagtttcaaaatacataaaagtgacaattttgtgcaaaaactgaaattataagaaagtttttacgccgtacacctcatataccgagatcccggtatttccaaaatttcgtgtccaatgttactcattcaaatggctttattgcagttttcaggaccaccaattttggccataacttttttgaaacctaatgaattttcttgaaattttgcagaataatagaggactcttaagactatcgaataataccacgaatatttattttggatgtttctagaaaaagttatggtgcattaaagttttacaattatttatagtcgtaatagagccggtcaaactgcctaaatttttgggtctctagtaccgtggaagaatgctgttcccccttttcttatcactcaccagccaaacattttccgccataaaagaggtgctttgaaaaaaaattttattaccacaatcatcatcattaacaaattgtctcttcgcaacgaccaattaatcaatgataggaaatgcaaaaagtgatcaaaatgataacagcgaatatacaaaacatttctttgtctctccttgttccacactgccttttgcccgaggcaacgagttgtctgtgattgatcactttgcattttgtttaaggcaaaaacacgagcacttattattttttccctaaaaaacgatcggattggctgatattattattcattgcctgaggcaattatcaataatatacggatcaattaataaccgagagaaaacgataggaaaattcggaaatttttcatatgccagagttggaggcggagcggaagggcatgctgaatctgaccaacgggacggtatccgcaccgggcacggacaagcagctgtcgctggaggaggcggtcctgcgcaaggatagaatacaccgaaaaggtgagaaatagcttttagtttattctaagggtacaaaaaagcattaaagtcaattcggatacaatgctttctagctcggttgttgtttgtttgttttacggtaatatacccggacgggaattcccggtcctccgaggtcccggttcccggatattgaaaatttagttcccgtcccggaaaaacaagcactggtaagaatgggggtctgagtgaaaattaatatattctttaaaagtaacgctgccaattgtgcaaatggcctagtggctgatctttttgattttctagttctttcccatggttcaatccctctacgtaaataaaatattttgaattttctttttgtatattcgtgggtttcctatcgataaaatatgattcctcatattttttttattgacacatattttatcattttttaaagaaatccgccaaattgagcctagtaatctcaaaaaaccagtttttttgttgaaaatctgttaacaaatcacaaatcaaattttcaaaatttctcgccggaccccttctttcacaaaagttttttgaaaaagcgcgccgaaaaaaagtgatgtaaaaagcaaaataatattcgatcatttagtccaaaaaatgattattgtttgaaataattgaagaaattttatttgaaaattttcattaatttatttatctttaacttttggatttcataaaataaataacaaaataaaaatttatttttgtgttattttcacttgaataaaatttgaattttcttaattttttgattcttttaaattctaaaaaattcccggttggtcctggttcccggacaaaaaccgaggtcccggtcccggcttctcaagttccggcaagtcccggtcccggtttttcttgcggtcccggcttctcaagttccggcaagtcccggtcccggttttgcccaaaattcccggtcccgctctactctaatattcatttataactttttctttttttatgataagacaaaatctgtcaatacataatagcctttgcaaatgtgctttgtcgatacggagattcaattaaactaaaagatgagtgagggcgcatctaagagatcgttaataaattggctgattttttaaaaactttattctttcattatatctacgaaaaattaaaaacaaatatgtattagtatttttgacctcatttgtattttttttaattttaggctttttcctgctagtttgggcatgccttctctgctacctcctcagttatttgcccggtgcatctgctgaacaaggcactgttgaagccctccacacgcgctgggagccggaagcaattggccccatcactttctctgacatcaactacgattatgaagactacggccaaacaacagaggagccaccaaccacgactcccccgccgccgtccacaacaagtccgcctcccacagaaccggaaccgccctctgcgaccacgccaaatccaacagtgccaacaccgacgtggtgccctgttgccatcactggtttggcagcgctggtcgtccttctgtgcctctgtttgtgttgctgtccgtcagtgccacaatcggttgcaaattggtgccgccgttttgttcatcgcttctgtacatgtgccggcgaaggtgaaaaattttaatgaactaaaaactatcaaaagctacggcacaagtgccacgccaaactttttccgcctcggtctcggatcccggtagagtgaattgaaaaaatgcacaatttttaaagcaaataaacaacgaaagatgaatattttcgcggtaataatttagatggtgccacacatttttgaaaaaattcaaaaaattttaaaaatcaataaaaacaagtcttatggtgtttcggaggttccgggttcgggattcgaaatcggtcgaaatggatgttatattcgtgatcagcgacctccgaaaccccataagacttgtttttattaatttaaaaaatttttgaattgtcaaaaatgtgtggtaccatctaaactattaccaagatatagtttaattttatttatttatcactaatttgttgca

SEQ ID NO: 9558 - DNA, 1729 bp, Heterodera glycines
  unsure (1)..(1729): unsure at all n locations
aatacataataagcttttgcaaatgtgctttgtcgatacggagattcaattaaatctaaaagatggagtgagggcgcatctatgagatcgttaataaattgggctgatttttttaaaaactttatttctttcattatatcgacgaaaaattaaaaacaaatatgtcactagtatttttgacctcatttgtatttttttttaattttaggctttttcctgctagtttgggcatgccttctctgctacctcctcagttatttgcccggtgcatctgctgaacaaggcactgttgaagccctccacacgcgctgggagccggaagcaattggccccatcactttctctgacatcaactacgattatgaagactacggccaaacaacagaggagccaccaaccacgccacacatttttgaaaaaattcaaaaaattttaaaaatcaataaaaacaagtcttatggtgtttcggaggttccgggttcgggattcgaaatcggtcgaaatggatgttatattcgtgatcagcgacctccgaaaccccataagacttgtttttattaatttaaaaaatttttgaattgtcaaaaatgtgtggtaccatctaaactattaccaaaatatagtttaattttatttatttgccaccaatttgttgcaattaatatatgcttcggtaaaaatttgtaggtctcccaaggacgactgcccaaaaaaaacaacgttcactctttctattttaacggtgacaacacttttctttgaaatcgatgaaaaaaattaaccgtttcatggtcaaatcgaaatttagaagacagggatgttgtctgcagtacgtgcgaaacacccggacacactgctgtgaattgcgaccagctgaacccggacgtgtgaatgggaaaaaataccgatcnaaatgatgagtagggcgaggatttctagttttttaactattttttctgcggcattattttgatgagaaatgcacgaaaaaccacatttttagctcggaaattcttagttttaacgccactattcatcactagaaaaaattattttgtaagttggccactaaaatccgcgtcgaagaggtgtgccaccaatttcggcatctgctgcggttgtcgcctcatcaaagcgagtgccaaaacgagttatggctcagcgcatcgcaagaggaaaactaaatccggcttgcccattaataatgaataatttttttttaattttgccgaaatttggccgcggaggctcgagaccgagataaaaataaacgagaccttttctcgaagcctaagcattgagcaagctatacgagtcaagtacacccttcccggaattgttttcggcattggcactcacccgtttccgtgccttgctattaattaacacatcaaattttatcaattaacgtttaattgcttctcatcaataatcaaaaatatggggactggatggggggatttacagggaattagtccaaaattggactaaaattcccttaaattttacaaagattgcggcaatggctgccgagaagagcagcacaacaaggaggagcaccaggagaagaagaaagtgaagctgaccaaggacatggaggaggcggcggagaacggaggacggcaatgaagctgctgtctgtgattttgaaaaaaaaaaaatcaaattttgaataattgtgaatcagcctcgggggtggtctcattttttgcggcattcagcgtactgt

SEQ ID NO: 9559 - DNA, 1270 bp, Heterodera glycines
  unsure (1)..(1270): unsure at all n locations
tacattgttccctcgtcccaagcacaaagttccgatgcttacggctgtccgttcggataagcgatggtcacgtcgagaacgtatttaatgggagggcgagtgtctgtcaaaggaacagtcccttcgactagccaaaggagagaaagaagagacaacctttgacgtatttcttttctcgaattgctcccactgtgtcctttatcagtttaattttgctggaggtggaggcagaacaggcgaggccattctgttcttcgtcttgccggggaccaatctctatgcaatgcaattaattgatgataaaataaaaggaggggaatgtccgaaatgctttcctccattttgctcatttcgcattaaaaccaatcacaatttttacttttgtcatcattcccttttattttaccttcaagcacagcttttatcgcaccttaaattaaaatgagtcattttcacagaataattttgtaattaatctgctgctcacccattcgcggcaaagtgcaatgctccaagtggggaaagttgttctccttggcatatctgaaaacaaaaagttcacagtgaaaattgagtaaaagcacttttggctggtttcttttcttttgtagtagaagccgccctccgggaaaagaatgacccaacgtcggtctctgtcccaaaacacctgaaagtatcgtataattatgcccagtgtttacatgactgacaatgagtgcccaccttttggaggtgtcccttcagtctgatcagttctttgtctcgcgtcgctttgccctgctgaatgaaataatcgccatgcattcgtccgataatcccaaaaggtgtccaacgaaacatcacatccatcaaccaaatcgtctgaatattgcgccccatttgaactttcagctgacccaattacctttcgagtggccacgccttttgtttgaaggacagtgaacaaagtgggcacatcggcggtgctctgatggttcacaatgacaaggacgcgatctttttcaccgtacttcctgatgtcttcgccatattcgtagactaatgggaacgaacgttccaatatcgcaacaattgaaggattaccgtcataatcggcagtgtatccccaataagcgatgaacgcttgcaaccacatgtacaattttccctcgtaaaaccaataaaatcgtggccatactaaaatgggcaattagcaaaattgttgttctttattatgaatganagtttacgaggcttagcccanagaacgggaaacataaagccaaaatac

SEQ ID NO: 9560 - DNA, 1374 bp, Heterodera glycines
attttcccttcaaaatgagcataaaatggttttatttgctctagtattcaccaagttataagctaaaaaaatttcataaaatcaagggtaaaatatagtgtgtaccttttactgtttgtatttgttcttttggcgttctgtatttattattattttatttatttgctttaaaaaattgaaatttatacacaaacacaaggaggacttgaacctgagacccctttttgttgactaactcacagaccactaagacgaaaaatccagcataattgtacttggagcccaaatttgaatcgaattatactgtacgatttaataaagtaaaagcgaagttaaggaatcctttatgacaaattggaatattaattagtgaaaattgcaaataaattatcaatttttctcataaacgtcgtccctggtattctcttataatttaaacattggaacccatccaattttccgggaacaaatatctgcaaaggattctttcgatgatccttaataaaaatagaaggcggagaaccaccagtgcgaaattgaacaaaaattctcctaaattttaaatgagaatattcatttcactgctttcgcttcactttgttccattttgattgcatgtgtaaaaagtcggtgcaaaattcccggtcgaatcgaaggcattgctattggcgtgaaacaattgccaaccgtaggcacgcgacaaaccttgggaggaattgagcagaaaatgagcggcctaaaggcaaaaaatgtgacaatacagcaggggaaaataccattaaaagcaacgcattttcaaccatttccatgtcgcgacggcactcaatctgttgcgcctccttagtgaccaaagtgatggacgagtcgctgattcggatgagagtggtgaaccttgaaaataccgtaaactgcgatcaacccgagacaatgaaaacgaaaaaacagactttccgaggttttcatatccccggttcacaaaggttaaagcaatcatcgagaaaacaggtgtgactcggatccatttccagttaaactgcaaaagatataaatgatatattcaaaaccattcgcactaaaacctgtgggtcgttgaatttgatcatgtgattctccaaaaattcaactgtcctgcttataagtacgtaatgggaagcacattggataaatttgcgaattaacaaatcggacgattgaacgtcggagggcgacgatgggccgacagctcgcgcattaatctgttagcaaaaacattaaaaactaaaaactcagattttgatttggcacttcttccgccgaaagtgcggttggtcccctcatgtccaattcttccgaatgagaaacgagcggaagagtgacaaagtgttggactctctt

SEQ ID NO: 9561 - DNA, 1612 bp, Heterodera glycines
  unsure (1)..(1612): unsure at all n locations
acgaaccccaaaagggtggaaacgagcctccactttcagcaacaaagaatcgaacatcgaaaggacaatcgaattctccgttgtcagcgtaatgaggtcgtgttgcgaaacggactcggacaccaacttaaaagcggaattcctttcccagtcaatcgaatggaatgcgtaatactcgtgccaaaatttctctgcaaatcaaagaattttgagcccatggcaaagccttgcgccagtgcacgtgtttaacgtcctcttcactagtcgatggtctgttggtcactttaaagaacgattcggccgtcttttcatcgtctcaaattattgaaaatgaattttagaaggaataaaacatttaaaaaagttacctttttcgatatataccaacaaatcggtgcgacacattaaatacaaatttcatagaattgaaagaaaaatactgaaatgaaataccttagattctgaggcagtcgcagctcaatgaacgaccgattgttatgctttatggtactttcacgtctgtttgatgctgatttttgtgtaacatcgaaaatttcattgggtgcaaattttgggacaactgagaaaaatgtcaacaaaaatattttgtttaaaaatggtattatgaattaagggctaacaatgagtgacctaatgaccaaaaaaactttgggaattcgtcgctctttgccctactctctcatccctttgcaataattacatgttttgtagccgaggtctccaaaaatgttcggtcccacttttctgatacgccaattctcgcgcaattccctcagttcattgaagaagtcgtttttgtcagtttcggacgatgctccgcgccgtgcatttgccatccgttcgatttcccgtgccgtttcgtttagcactcttcgtcgagtgtgcagttggaatgccttggacacggccacttgttcggcctccgtccgctcgtcttggaccaaagcggtgaccatcggactcaaataatcagtgcgggcgattcgcatgcaatccatcagaatgtccacttcctgcagcgaattgctaaaatctttacaatcagccattttttggagaaattagaattgggttgactcactgcaaatgtttggccaccattgcccatggtccagcaatgggctcaatgaatcctttggtcgtctgagccaatccgatcggacttccttcgagttggctgtcatccgagtcactttcttccgttaaagtgtccgcatttgtcttttccccaattattttgctccattcgatgttttgtgcatttttcctcagatggtctttaaatgcgagcggtcttaaagaaaacaaagaaaatggggagaaattctcacaaactttctgacgactaactttatgtatttctcgactccgtcatatccaacctcctgtatttcccattcattcaaaggttcaacacaaatttgaactccacttccattcgcatttgtttgtcctccgtacattgcaacttanaaaaattaaatttaaaaaattaaaaacaaatttaaaattaaaaaaaattcagaaattgaaatttaaaatctttgatttcaaaaatctataagttccattgtttagggacctgatctga

SEQ ID NO: 9562 - DNA, 1799 bp, Heterodera glycines
agattcatagagctaaatctggcaatcgcatttattactacccataatgattgagtggtcattacggtggcaaattgcataaaagatttgatcacctgctgaaataatcacagtcataaattccaacacactaattgcctaattaatccacttcccatccatgcttcattctcatcggctgttagcatataataatttaggccaagtacctgggtgaaggagtgtggggtccttcccaaataaatgtaattaggcggtgcattatcgcaattaggagtaggtggcggagggtgaattgtcaccaccatttcgaccgaccaacgatccgtccctgctccgccctcgaaacactaattgcccaatcattcccagttgaacaaatacataatgggtgcatgtgaaaaatgctgcagcatttgctgctccgcgatggcccaacccggccgagccaagtggcacttcaattaattggattgtcatgaataccaacgcagggcagaacagaggagtcactgactcatcccatcgtcacggacaattggcgaagaatggacaattaacaattattaattgtttattaattgtccgaatgaggggcaccaccggttgagtattttcacaccgcaaattcatatgcaaattaacaccgcgaatcagcgcataagcaaaggacaacaaaacacacattcatcacattaattgctcatttaaccttctctcttaagcaactcaatttaacaaatcaaaatttttgatttgatgacctcttctgttgttccattactaattagtttggttaattagcgcaaatgatgctgaacaatctgctccaatttgtgcttccgtctccctccaaccgtgacttttcggcatcatcggtgccttttccaccattcccccaaagtgccgttgtcccatcagtccaccacaatgtgccaattgtccccccttctcgattggccatcgtcgccccgacgagtgccgtcttttcccccatttcttccccaaatgggttcacattttccccaaaatcatcctcaacttcaaattcctatgaccattcttctttcatcgaagacagttttttggaggaagaaaatgtcaatttaaaaataaaaaattatttgattggggaaattacactttttaaaaaatttttagaatttgagagacggaagcacaaaaagcaaattgggtgaagaaaagcaacgaaaaattggaacggtcgtcgctccacccgaatttgtggtgagaagtttgttgaacaaaagcaaaaaataaattagataaatggtaaaagattcaagaaaataaatggcatttcaaatgtaaataattgggttcggtctttcgctcccaaacggcgcagaaaactgaaaactaatttagcacagaaacttcacttccatggcgcaaaatggaaaagacattattgcctttgggctgccaacccaacacaaaaacaacaatttggacgacattgaaaatgacaattgcaataatcatgataatgattatgatcatgatcatcttcaacatcggcaacaccagcggagtcgaccgttccaaatttcgacgacggaagaagcgaattggcacatcggaggagaagcggaggtgccggccgcttcatttgttcatttattattccattacaattatttttattattcattttttatttattttccataatatttgcacaaatgcttaaaataaattttcagccaaatgattccctccccgcgtttggtcccttcgcttccgttgcgccgcaaaatgctcaaatttccgtcatt

SEQ ID NO: 9563 - DNA, 2596 bp, Heterodera glycines
  unsure (1)..(2596): unsure at all n locations
caaatgatcagtcggagagggcaaataatttgttnnaattagtcaataaattntgaaaatgnactattnntnacgttttntaatgtttactcaaaagcatatgcttaggaataaaaataaatgttggcttcagtttgtatttgtttagtacaaaaaatgattgtttctcaagtttaatcaatcattcccccggggggggggggggcttttggctgtaagcaaagcgccattaaagcaacaaattgcccgtataaatgccaacggatcatttttcaacatcctgaaatgccatttctatttttaattgcataacaaacgggggaaaggggcacagaattttgaagatttggtggttatttgagaaacctaaatgctcaacttattaagcattttcatatttctttgtgcagaaattcggtgatgtgcggcctttcgttgttttattcaatgcttgttaccatattcggtatcattttatttttgtgtttattgtatcccgagataaaagcccatacattttaatgttttagctttggttttggagctgtcccatttaatggtgacaaataacagtcggcgaaatttgggcttcaatgacatggtaattaacgtaatttattttttttaattgaattttcattttgctcagatgttcggcatttacatgtacggctgttccatcctttttctgctttactgctattgtgcgcttcttctcaatccacgatggaaacgcaaaattggaaaattactaagaaaaaagtatttccataaaatgcataaatttaatttataaaatttatttttttgccgtttttagtgccgaatcttccgcaaacattgtgaaccaatgcaattccgagcagttccaggaattgcgcaaggttccttccacttgtgtgcctttgtctgttttgtgtttgatttttgcttttcccaggttagccacgacgggccaagtgccggcagtcttttcctgcgcctcggctgcgtcgttttcggcgtaattggcactgtgtattacggtatcgcaatcgcttagagttgtaccattttgtgtgattttggcactctctttttcagcttttaatgtttttctgtgtgccagcgatggcacatgcccacattatgtcattgttttggacattatggccattgcgtttgtctttgtgcaaatgcattttgtgttctgcaattggaaggcatttttaatttttcaattataataaataaatcatatttattaaacgtaaaaaatacagtaaccctaccattgtttagttggccataagcgattaccaagtgatttgccgttttggcactgcgcatttaatcgcgaccaacctttggacttggatccgttacattctcattgaagaatcgctgatgggagacgaaattcggtgggcaaaatgccaaactgaaaaaaaacatagaaaaaaacaaatcagacaagtgtttgcccgtcatgccacctttccgcagccaatcacaacagcacaatcgcaactgatcgaactgtcccaaacggcggacggagaaggcggcggagagtttgtcaattgggacgcaccgtcggttgaaaatgccgaacatttgaacggggcaaatttggacatttccatcggtggcaccggccttttgcttggtgccggactgaccgtcaaacgatcggtgcgaaaatgccacggggccgagtgcgttttgggtaattatcgctgaatttgaattgctaaatgagggataaagccgaaaaaaagaaaatgggtaatttttaatgacagcaagcttcaacgaagtgatgtacacaagcattgtggagtattcgctgatcggagctgcggtgatgttcattgtgtggaaaaacatcggacaacgccaaaaaaagtcggagcaaaaggaaaacaaaacaacgaccgcaaaagggtaataaaataattgaaaaacagcaattatttattaattaattaatgtttaattgctttttgagttatgtgagtcgaaagcaccgaattcgaatggactgctcaaaggtaaagccaaagaatgggccaaaagccgaattgaatttctattttaaccccaaaattcagagcacaacaggtgggacgatgatgggaatggcagaatgccaacgaatgaggattaactcaaaaacaaccaaggactcttcttcggattggcatttttaaccaccactttcacctcaatatccattttctccnattacacaatcatnnnacanaacacacanncnatnatnntnttcnnctcnaccnacatcatccatntannnnnaantnctttacattananctcnntattttnaaaaancctncctnnattccatttnnacctnnatntcctnnaccanaatccannaaaaatccanacctnnatccanttccannccgaactctactttacatantaaaactnaattaaacctnttccttttcantatatcntcncnccanttnnctncgnttcnttcttcncttttccttcttttcaaggcnctnctttccttcccccccctcttacnaatcccttagaagaggtaatgccattgaaaatttcattttaaatttaaatg

SEQ ID NO: 9564 - DNA, 1192 bp, Heterodera glycines
ggcactcctttggcactttgttcagacagccaacatgcctggccacgaggcactcttggcagaacattcctgttcaacatatgagattgttttaaaagttttaaattcggggattttcttggttttacgaatactttttcctgaaaggtgcaagaaagcaaatttaattttggtcagttgtttaaattgtttccggacaagaattttggatttgtctctcattgaagaggaaaaatactaaaaaaaatcatataaaagagtaaaaatatttttaaaaaaggcattaacatttgtcaagaacgaaaattcgcaagaaaatattaacatttttgaaaaaaatcagacgagaaggaaggatagggtccaatcatcggcacctatccccgtctaaaagcaacctctggtccagaaatgaacaacaaatttgtccaattgatagattagtaattcctgatcagtcaaaagtcttgattcttgagccggttcccaatagccagaacatctgaaccctaatcacccaacaactacaccaacaataaacaccttgtcgatcggcaccgatcagcaccgatgtgcacaccacacatttggtgggtgcccgtagactggcattcacaaaatggtgtccctcgccgttgaacgcgctgttcagcgattggatgcttttcgggttggcggacgatggaagcgggcggaaaatggacgaagcggttgtcggcgcgggcggagtgccgtacgaagtgtaaaagcgggcattctcgtagaattgtggatggaacggaaactgttgttgttgctggtgatggtgttgtggtggtggtggaggacttgcaaccgatgtggcggtgaagctttgattcctgcttggaggtggggacccataatttaatgagtttaaataattttgccaataattataggaaaaaaccacccaaaaattcattcgcatgccagacgtattcattcccctcgcccagcaaggttccccattcttttaaacataagtttttttaggataaaatcatatttttgtataaaaagcatactgtgttttggaacaatttatttattttcaattgataagaattcagttaatttaatacagaaaaaaagagtgacgagaatagaggtgggggggggggggaggtgaaaaatttactgaaaatttttcattttttgggtttcggggggg

SEQ ID NO: 9565 - DNA, 2734 bp, Heterodera glycines
gcgacgacgttttgtcctgctccgggtgaaagcaccggcaaaaacaaaaccaaaaagagacgaattgaagagtgtagaccaataaaacaaagaattgaagagtgtaggccaataaaacaatgacttgggctcacaatcagggccagattggaacaaaatcaagcaaaaataactcaaatttcgaggcttaaaaatttgaaaatccaattttattaaattttgttccattccatttcataacagatgatagataatgaacataagaaaagaagtgaaatagagaataactatcatcattatataaaaaacaaaagtatattcatataaaaaaaatgcgacaaaaaagaaatcaaaacaaaataaaataaaaatcagtgatacgcagcatctgctggtgatgaaagcattgggctcaataaatgcaacacatgctgccggaggcaaaaaatgtccaaccctctaaagcagagaaaaagttttggttatttaaatatattaaactaaaaaaagaagtcacgacagaaattgtgaatgcattaaaatttgattataaaaaacaacaaaatccgtaggcaggtgaaggtggttttataaattccggattctgtagcgaaaatttcaaaaatcctgatttttttttcatttatagtaaaagttttaaatttcatatacatttggctgtaaataatatatatatatatatatatatatatattggtaaatttctaagaattttttaatagtgaaattaaataaatccaaagaaaaacaccataaatttcctgaaacttttgctctggaataatccttaaaatacatagaaacgaatgtgtccactctttgctaattgggcggtctaatcgacaataacaaagtgaaaaatgtgaatgacttattgttagaatgagaaaacgctgaaatgacaaatgctggctttttttatgtgaataaataaatttatgaaaattataagttttgattttggtattataactaaaacaaataaaatattggaaaagcaaaaaagaaacaacaagttttttacacgatagaatgagatatttaagaaaattacaatgatgaaatatacagtatatttatataaatgagcatacggcggaaatatattataaaaaagtgcgattaatacagaaattcttaacgctgcttatacatagaatacccaataacgcacataacaccaaaaaattcagccaaaaatcccccaaatcccattctcacattcattcactcacatttgtgccggcgaccgtgaatggtacagcagcagcgagctgtcgtactcgtccagcgatgatgacgcattgttgtatgtggtgactgccggcgagcgaagagaagcagccgcgagtgccgccgtcgttggcgttgaagtgatggccggaggagaagcaattgccgccgccaccgatgacggcatcgccgaattggaggaggaggaaaagctccggttgaacaggttggcgttgaagcggtgctggtgctgagccatctccagcagaccgggcacaacaatgccgccacccgccgtcgcggatgacgaaccgctgaccggggcgccgccgccggcgtcaaaaagtgtcgctgccggtccatctgctacacgctgcggtgcccagttacgcatggcccaatgctgttgtcttaaacgagacggtacagtgcgtttaagaagtgcagtgatcaaccgaatttaaaacagtatagtaatatcaaggaaagagcactgtaacccatcggacatgtatccaaccaatacattagccttgaattatacatacatcatcttaatattgttagacaacttcacgcttggaactttgtcaaactcgctcaaaaaatgatcttttcgagcaacaagaaaaataaatttaaaaaaaatgagttatggtaccaaatctttttttcaaaagatagcagaaaaacgtgctggggaaaatttatttcagaaaaaaaaaacaacacaataatctccatcagtcaaggagatctgaacaacccatgacaaattgctaaatttttaatggaaagaaaattattaattcactcaactctaactttgcctaagtcaattcgatttgcattggcatttatgtctgatcacttttgtcttgttgtgtcaaaaaaaagctaaagttgtagaaaatccaccatatgcaataacaacagaaaaaagggaggattctcgaacattcccaatattcccaatcagcagcaagcggactgcacctcaacagcgacgcgttctcctggttcatgcgttccatttcctcctgctgttggcgcagcttgcgcctgcactcgtccaactcgcgctccagccggtccttctgctcgcgcgcctcgcgcagctcgtcttgcgcctggcgcttggcgcgcatttccgcgtccagctgctgctgggcctcgaaccgcccgtacttggcctgcttgttcatccgtcgggagccccaggtgcgcaacggactggaagaacaagaaagatgaattcggtgaactgttgcactaataccggtaacttcagggaccaaattaataatggttttccggggtcccgatccgggtgaattttccaaaaattttcggggcaagagtacgaatgcaaataaaacgctgactggggtccggtctgggcttgtttttatgaaaatttcaaagaagttaaggttaatttcaagtgatttttgaaagttttaaaaatcgtgactctaga

SEQ ID NO: 9566 - DNA, 630 bp, Heterodera glycines
cccccccccccctgggaccgtccctgctccaaagttgttgctgctgttattacagtagctggttaccgtatctgtatcacacgactgactgacctgtcgctgactggcgtgttagcgtaactgtttgccgctgcctcgccgcccctaccgttgccgccgctggccaactgttgctggtactgtagcagtggcggtgttgacgttgttgtcgcggacagttgttgctgctgctgccgcttgaaacactccaactcgccggccaaccgcgtggtcaagtcctgcaacagttcctggcgctctttgccgtcgctgacgaactgcacaatctcctagaaaaaatgacacaattagcatcaaattatgccattaaaagatttaatggagggtgagggggggggggggggtaaaaaaatttcagttaaaaatttttcaaaaaaaaatcttagaaaaaattttcatacgaaaatttcaagaaaaaaattgtagaaacatttgcctgaatttgggcgctcatccgctgctggcactgcaactcctggcccagccggttgttctccgcccgcagctgctcattctccgctcgcacatccaagcgctcggactccatcgccttcacccggctgctgcaca

SEQ ID NO: 9567 - DNA, 1317 bp, Heterodera glycines
  unsure (1)..(1317): unsure at all n locations
aaacnttttaacacaaaaaaaattaatagaatcaattaactgtttttcgtgtcttcttttaatattgtatgaattaaaaagtatataatgtaaatatataaatcagaaaaatagttaaattaaaaattaatttaattaaaaaataacttatttataatatattaatatcttattattccaacaaagctcacgagcctgctcaattggataaaaaagtgaaatatgaagaaaatattcagtaaaaaatatttattaaaaggaaaggctgtttttgcttttcaacaccatggattagtagagatcggaccgatcgattttttttcggtttttttcggtatttttcggtttcggtttttgaccgaaaaaccgaccgagaaatttttgactttttcggtttttttcggtttcggtttttttcggtttttataccgaaaccgaccgaccgaaataatcaaaaaaccgaaacaaccgaccgacttttatgaaaaaccgaaaaaaaaccaaatcaaattggaacgatataatctgttaataataattaatttattgcttttttgtgctctttttcattcaaggtataaataaatattcaaaaattgcaatattttaataatttgttttgcaactattaaatacttatgaaaacgtttaattttggtgggagaaaaagaatattttaaaaaatctataaatgctatataattacgccacaattgatgtgtgccaaatactaagacaattatttggtaaattattcttcattatgcttgaagaatgaaaaaatttttcacaaaataaaatttgcatctttaaatgacgatgacgatgacgataataaaataataaaatagaatagagtcattccgccaaaaccatacaaaacggtatattttacaacacgaaaaaaatacccaattataatacaacggtaaagcagttttgatcatgagaaatttcgttggagataagagaagaatccttaaagccaagatataaattaagaataaaaaatatcaaccattttaaaacaataattttacattttaaacacacttcaaaaaaataattttaaactggagaagtcagataaaagtcgaacacagcaggacaagacatttagaaatttaaattttatatacgaaaattaaaagtataattttatatcttataatttaaaataaaatttataaaatcacaacaatttcctcattagttaattcaaataaaaaaaaatttatgcttggttacaatgttttaacgattaaactaaactatttcaacgaaacacgcaatctcattagtaattgatcacactct

SEQ ID NO: 9568 - DNA, 1861 bp, Heterodera glycines
  unsure (1)..(1861): unsure at all n locations
aattttcaatttcatttcttaggggtgcattttcccgatttnattccatttttaatgtaattttccttaaaaacgccaaaaaaggcaccaaaacggcaaaatgccaaaaagccatttaaggcacaaaatcccgaaaaaggcaaaaaaaggcataatgtgtctcgagactccccttttatatgtatgaaatgtacccccctacctttcggttgccatgccctcgcgctccaccacctccatctcggttggcattggcattttttttgcccttttttgctccatcttctttgccatagttactgttgctggtgttattgttggcatttccgctgccgttgttactgttgctggtgttattgttggcattttcttcgccgttgttactgttgctggtgttattgttggcactttctttgctgatgttactgttgttgttgttattgttgttagacattttttttggtattttaaaagttctgtctaaatttttaaaaattgtgtcaagtaggtccatatctataattaaattaagtaaataagttcgcgctataatcagggcttcgatttgttcttatttctaagaaatgttctgatttggagggtccaaatcttagaaaatgaaaatgttcttatttctaagaaatgttctgattttgggttattgttcttattttgttcttatttcttaaaattattcaaaaattttgaaattttatggcgaaatgtcactatgtatcaagaaaaaatttaagatttgtgtcaaaagttggtaatttttgacaaaaatctgttaacaatcgctttaaaaatcgcaaaattttcccggcggcgcctttcggcaccgccggacccccctgtccatcccccaaaattttttgaaatgtgcggcaaaaaaagcgttgttaaacgcaaggaaaagccgtctcttgcttttaattgcaatttggcctttttttggtgaaaaactattaacaaatcagaacaaaattacaaaaaatttttcgacggcgcctatcggcaccgccggaccctccctcttgcccaatacccaaaagtttttttggaaaaatgcgccgcaaacaaaattgtttaaaatgggattttttgatcccgaatgctctgaaatgtacgatttgcttatttcctccccaaaattgttaaaatcgataatgggaggcgaaaaatataatatttaatacatttttggccgaataaattgtaaaaataactgatttgaagccattttgcaaaatgttcttattttggaccctaaaattttatttttttgccttgatgttcttattttgaaaaattttcgatcgaagccctggtttaaagtaaagttatgaccaaaaatgttcaaaaaaacttaattttttgagtttctcagttcataactcttttgaaacaacgaatttttttgaaattttgcaggataataaaaaacacttaagactatcgagaagtacgaaggtttaaaaatttggtttattttggacgaagttgtgaataaattttggtcaaaatttttccatttgatgaatttttgactaaagcacattttgattatttttgactaacgtcccagcacctattctcacatgggtctattttggtaagttatctgtaaaaaataatgattattaaatattaaatttcattagaacttaatttcaatatatggctttctttattggcaagtcgctcttaaaaatagaattaaaaaattatttatttatacctaacttaaaagtatttcaatgttttttaaagataatccataaaaacatttattctctttattcaaataagcaagttaattattataaatttcattttttcaatatttggtaaatgtaaa

SEQ ID NO: 9569 - DNA, 1375 bp, Heterodera glycines
ttttgatttactttttatataaaaagtgctcttttagggtactcttttttttacttagcgattttatgccacttttttttttgctcaagaaaatagtcacaatttttttttttcaattttttttttttgcaaaaacattttgttgctctatcgccatattttcacaaaaacttcttttttttagttttccattattttttttgattgctttcaaaatttcagttgcgtttgcatggatgtttggatggacattctccccttatttgaccgtcctcagctcggcctctaatttggcattgctttcgtccagtttcaatgcacttgtggacaaacatttcaacggcaaaggcgaatttcggcaagttttttagggttattgaatgttttttaaggattttgtgccaaaaactggcctccattttcaaaatggctctaaaaataaaaaaatttccaaatttggccagtttttttaaatttattttttgtaaataaattgtttttttgttgtttttaagcattttttgcccaaaaactggcctccattttcaaaatggctctaaaaataaaaaaatttccaaatttggccagtttttttaaatgtattttttgtaaataaattgtttttttgttgtttttaagcattttttgcccaaaaactggcctccattttcaaaatggctctaaaaataaaaaaatttccaaatttggccagtttttttaaatgtattttttgtaaataaattgtttttttgttgtttttaaggattttgtgccaaaaactggcctccattttcaaaatggctctaaaaataaaaaaatttccaaatttggccagtttttttaaatgtattttttgtaaataaattgtttttttgttgtttttaaggattttgtgccaaaaactggcctccattttcaaaatggctctaaaaataaaaaaatttccaaatttggccagtttttttaaatgtattttttgtaaataaattgtttttttgttgtttttaagcattttttgcccaaaaacggcctctaattttcaaaatggctctgaaaaaattttttccccaaattccgagtatttttattaaagtgtccggtttttaggatttttggtactttatttattgattttttcaaaaaattgtattttttggatttttaaatgttataaattattttgtgaccctgctgagtagtgtggtttgcatgttttttaattcacttaacaattcaagttatacccaaacattttttaatataaaagtttatttttaatatgttatttttaattaaaaaagtttttcattagcataagctctttctatataagcaaactcataattatcttttcataatttcgaacacttttttt

SEQ ID NO: 9570 - DNA, 808 bp, Heterodera glycines
  unsure (1)..(808): unsure at all n locations
ctttgcagattttttgaggcgaaaaaccgcaaaatcgatagactaaacctcgggacgaaaaataacaaaaatttgggccctttcacttgaaaatatccttgtattcaaaatgtccttaaaatttaaataaattgcataaaaaatccaattttttttccggtggcggaacctctttctatttttttaaacttaaatataagcaataaaacacagtaaatttcactatttaagcaatataattcataaataaacatttttgttgcatttgctaaaaatttttgtgtccgtgaattaaaaagaaatttcgcgctatatccttggaaatcagtccttgggaaaagggtttggacaatcctaaccctgtttttgttcaaactatcaaacagtgacaaattttgattgtttttcaccgctgcatatattattcacaagtaatttcgaccacccaaaaaacaatctgacagaatttcatactttcgactttgaatgatcaggggagttacagtttctccattcttaagaaagtaaagagtcaagtacgagcttaatgacacggcactctcggaattgcccactcatttcacagactttgcactttgagggcattgcctcccaggcttttcgtattcatttctctgcttttgctccaaccaatgtccgctcgcaattgtcaattgccaaggtttttcccgtctgacaagcgctgaaagctgtggcaaatggacgacggagggaacacacgaaaagagaggagaagccgagggggggggggaggacggaccaaccgcccccggggnggggggggggg

SEQ ID NO: 9571 - DNA, 5999 bp, Heterodera glycines
  unsure (1)..(5999): unsure at all n locations
ctcatgctgcttggattcttgaccaaaatgtggaactaccgttccttcatgatgagtccttcttgaaaattgatcagaatttgttgtgttacattttggagcgtgatcagctgaggatcgatatggaaattaaaatttggcgagccgtaattatttaatcatttctttacttttttattttaaatgttcaatgattttaggcacttcgttgggccgatgaaaaatgccgtcaaaatggcattgactgttcggcgcaaaatcagcgtgcgatgctcggcccggcactgttcaaaattcgttttgcgctaatccctcacgaagaatttgtgagaaaaattggtaaataaataatatttcaaagcatctgaatagtttttgtctttgtggctgccataatgcaattctatcatttaaataaggaatataaaaaggtataattttatatttcaatcacttgattgaaaataaaaacacctgttttctttttccccgttattactttaaggacatttgatttttggcaattatcctcatttataattttttggagtaggcggagtcaaaaggatttttttgaaaatgaggatttgtgttttttcaatcccatgagtttacattaattagcccatcagaatagagagagtttccacaaaatgattacaataaacgagtgacaaatttgctattttttatcattatccatacttattttggcttggcactttattttgaattcagttccttccggtctgttgtcccaggaagagttggacgacgtttttctgtgcaattatcagctttccgtgccgaatttgccgcccgaaagggcggcgcgcaaatttctattccccgcccagcaacggtttctgtccgcgccgattgaccacaaaatgcgcatttcgacagcgtgcaaaatagcaggacaaattatgatgaaaatcaaaaacttttccgggtttgccagtgaaaagggcgggggcgagcagttcagcaaagcggtgtatgtgaagggattgccgtggcgtattttggcactttcacaagcgggcaaagggacgaagaaaagcctgggcttttttctgcactgtgatggaggcaaaggtgggggcattttagatctttgatgctttcattttgattttttgaattttgggtgggcaatggcgattctcatcgagcaaatcgaaacttaaaacgaaactgcataaaattatcaaaacgaaactcggaacccaaaaaggcctgaaattctcgaaactttcgaacgctcgaacccatttttattattatttttttttaattttggaattaatttattttgattcctttttattccattaaaaaatatcaaaaatttgatttttaatatcggatttaaattagggtaggagccagaaagaaggggcgggggaggagggggcgaatcgcgctcaaaccggggaacggggatgaaatatttttatcttataaaagaaatattttattataaattttactcctatttatattttcatttactaattaattgtgatgcgccattttatttttatttttttgcattaaaaattttcaaataaaaatcttttcattgaattaagctgtcgattggagctgtaagtgttcagcttcgcttcgaattctttctcgatcgcaaaatgaagaacgcgagaatttcactcggagattcgataagcaaatttttaatccaatttcgaacatctggggcttcaattcgttcatcactttcaaggcaattagttataaaacaattacaaatggtaaaaattaattaaggaattgatggacacgcgaaacggactgtacaataagaaaaatacagtaaccctgggcattcaatttactgtggaaggcgaagacggaggtgaacaacaagcgatggaagccgactgaagaagcatttcgaaacacaaagcttgaagccggacactatcagtaccaaaataaattccaaaattttcgtcagcaatttgctaacaatttgctcttcttttttaaaattggacattcattggtgatgcttcaccacatccgtgccgaaggaaagaaaaataaatatttattgaatttaaaagatttttctcgaatgcaaaatttagaggttttaagtagagtagagcgggaccgggaattttgggcaaaaccgggaccgggacttgccgggacctgagaagccgggaccgggacctcgatttttcttcgggaccgggaaccgggaccaaccgggaaattttaaaaattcaaaaaattcaaattttaatttatttcaagtgaaaataatacaaaattaaattttatttctttttatttaataaaatccaaaagttaaagctaaattaaattaaagaaaattttcaaatcaaatttcttcaattatttcaagcaattaatcatttggaccaaatggtcgaatattatttgaaatttagatttacttatcacatcacttttttcggcgcgctttttccagaaaacttttggggaaaaaggtggtccggcggtaccgataggcgccgccgggggaaattttgaaaatttgagtgagacaattgtcagtgtccttttaaggaatatattaatatattttttaaatttttcccttttaactctaattttcatctctaatttttgactcagataaagcattaagcacaaaaatccgctttaagtatgaaaaaattttgggtctagaagccgcaaacaaagtcatattcgtttttcattcttcttagatggcctaaagttaggcaaaaaaatgaagtacatatatctaaagccggtccctaataattacctatcagtcattttcaaattgtcttaattactattcaattacctcttacggtttttcgacgattaaggtgttttataaggtgaaaaatgcgaaattttccacagtatttcccaacaaattacagaatattcaaaaatttcccggagacgcctttcgattcaggtatttatttttacggaacttttgcgtttttgagcgccacttcaaagactcacgttttcatcatttttcaccgttattggctttatcatcggcttcgctgtcgatgcggtggacaatttggaaatgttgttgcattttgtgccgttgcactctttgcaattccacttcaaaggcttttcacagaatttgtccattgtgccgttgccgcactttccgtccgcttcagcacaatcatttaacacaaacatgtcgttgcaatttccttgcatttttaaagttaattaattctaattattaatgcgtgtgccgacgacctttcgccaaaaaaggcaaaatccgacgttttcatttgacccgcaaatttgcggtgaaaattgaaataaaaaaccctagaaaattacgtacgtactctgattctgtgcggttatttttttaacactgtaaaaacaattcattaatcattcaaatcactttaatgagttgggatcggagtcaaaaaaacgaaagcaaaaagtgttcagtgaaaggtgccgaaaggcattttcctcaattctataaaattaagacaatcattcccaattgtttgccctctttttgtttgcccaattttcaccgtcttggcaagtgaatgtttggcacttctctcccttgcaattaattgtgcttcgcttcttgtaattggtgaacagctccttgaactccttgggcaccttgtaatcattcgaagggagaagggtgccgtagcatttcgtggctggggacaaacatttcgttaccaattatcaaattaattaattggcatattagcgttaacattgttgctctttttccttccttatttttgttaccagttgacaatttgagttggtccttgttgcataaagaggtggtacagtgcgtacaattccccacaacttgcacttttgtcaatgattcgttgcaaaatttttccaattgattgtcgaggcattttttctcccaattatcgcacccattgatcacgaaaagatcgcctccatactctaagtcaaattattgcttttttccatgttaaggaagccgaaaatttttcaaaaatttcgagagaatagaaatcggtttttgaattagcttttttaaagatttttctcaaaaaaagaataccactttgaaccatctgtttttgatgctctatcggtttttgcaaattagagaaattccgattctttgagaaaaatttttggcgtaagcggccagggcaattaccgtgtcatttttactttttctaatttcttactgtctgagcaacggtatgtctggcagctgcccacgcatctatgcgcttcctgagcttcgccgatatcccattgtttgagtatatctgtcatttctttgggcggattgaaattgggatggtaaatttgggcatgcatgcattcatctacgaataaaaaaataatgaaaaacaatgccaaaatgcgcgagtgatccaatattaggaattaattaattatctatgaaagagctgggaagccttgaaggaaaataagggggaggggcggctctgagggttacaccctgaaatctcgccgggaccaaatctcgccgcagaaatttaaaaaaatatataaaatttagaaattttttaaggaaaaaaacatagaaaattttttataagaaaatttcaagaaaaaaaaattgttgagtttttttgaaaatttaaaaaaaacagtaatttattacaaaagttcaaaaaaaatcgctgtaaatttttaaaatatttttctttctgaaattttcttataaaaaattttcggcgctatatggaaagtggccctttttgaaaattttttaaaaggggggacccttttgttttgcaaaatttttttgtgatagtcataaaaatttattctctggggtttttggggtccccgatcacgaacccttcaattattttgatcaattccgatttcctaatctaaatttgaacaaaaaatcataatttgaaaaaattcaaaatttcgatttttattcgagttcgggttagggattagaaattagtcaaaatacatgtcagattcgtgattagcgacctttaaaaccccggataacaaattatcatggttttttatcacaaaaaaattttgcaaaacaaaagggtcccccctttttaaaaaattttcaaaaagggncacttttncatataggccgccaatattttttaaggttttttcttgagaaatttctgtttgaaattttttttgaaatttcggcggcgagattttgtcccgtccccgctttgagccggcatctctggctttccatgctctatcagctgatgaaggctgccctagcagttcatgtttggggacaaacatttcgttaccaattatcaaattaattaattggcataattagcgttaacattgttgctctttttccttccttacctttgctaccaattgacaatttcagttggtccttgttgcaatcagagccaaaacaatggttacaatccgaccggacgtactcttttgtgaatttttcgtcgcaaaatctgtcaaaatgagcatggaaggcgtggcacttcattctccctcccggaaagcccactaagtccggtgagtcgtcatcgcacccattgatcatgaaaaggtcgtctccatacgctagtcaaattaattaccataaaatgtgcaattacaaaccatattatagagccctaattgttttttcacgttaagaaagttgaaagattttcaaaattttcaagctagcccagggatgcgatctgttctgatttatcagaaatgttctgatttggagggtccaaatctgataaaataaaaatgttctgatttgtcagaaatgttctgattttggggtagcgaccaaaatttgttctgatttcttaaatctcataatttttgaaattttatggtataatgtcactattttatcaagaaaataagctttttggcaaaatttaaacaattttttggacaaaatctgttgacgaatctcattaaaatcacatttttttccc

SEQ ID NO: 9572 - DNA, 2481 bp, Heterodera glycines
attgtgcagttttgcgcctttcccaacccccggcttttcaggtgcccccaactccctcggcttaatccaatcggacataaaacgtacagccattattttagccaattattctcttcttttttttgcatacttctcttatcccattattcgtccaactgatccaatcacagcatgccttttttccatatctatttaaacattcatagaattttcccgttatttacatttgtcggatcacatttttgatattttgcggcatacataatgaaagaaataaaaaaaatataataattttattttgaaaaatggaaaatttatttcaatgctaattgatttaaattttatggacttcaaaattatttgttatttttattcggatcatttttgtaaacatatcagtgattggtgacaaatttgatattttaatttgatcctaaatttaataattattataatttgcgcaaatttaagacttaattgatttttttatattccatttaattttggacataatttaattttaataatttttaaatttcatagatgaaattgctttcataaagtccccgaattccaaggcgcaaattcacttgcaactttctttggcacggcccgtagtttttcaacatattttcttggcattttacttcgactgaggggcacctccattttctgctaatctcatattttgtgtcattctcaacaaaatgccgacggcaacttccaccggcatcaaattgccaagccaaagggcaaaaacatcattaacaaaacaatcatcttccccgtcatcggcacacattctgcttctgatactgcttcatccccttcttttgttcgccatgccggcgcatgctgccgtccatccgcctctccaacttcgcgcattcgtcggacgccctttcacagtgactatcgccgaagggcatgccgttgacgctgaaatgttgccaaaatggtaaagaaaaaagaatattatttattaaattgttgtggcgatcacttataaagaattttgaagaaaaaagtaaacccaaagtcaaattatcccatagaaatttaaaaaattcaaaatctttaaatttgcatatgaataaagaaataaattattaaaaaaaataacgccaattatgaatccgtaaaacttgtagaccttaaactcgtattggtcgaaaaaacatacgggtctctaaaaactgcatttatgtcctcgatatttaattaaaaataattcaaaaggcatatataacttatcttttattggtcctctcctaaattaacttttattatttaaaaattaaatttaaaaatatttatcaataatttgtaattaataataatctccccaccccaccaccgcaacaggtgcggcttcaacacaaccgcccgcccacaaatctattgcattccccagttgcgtgatctcggcttccacatcattgctatccatggtatagacatttacatgcaaattaaccatttaaaaatattttaaataatttttaaataaaattttactattcccgaaaacaaattttgataagatggccacgtggaagtcactgtcatggaagaggaaatggaccattgtccggaggacacattgtggctcgaaataatggatgttcgcaatctgagcacggtgtcacttgaggaacaattgtgagaattagggattttccccgaccatgttcgggaatttgtgaaccttgtctatctattacactccaaatgggatcagaatgtctttaaatgagttaatttttttgacttttttgtgaaaattttctcagcgacaaggggttgctccccaaattgttaaaactttctccaaccattctcgttaaatttgttagtgaatctactccccaatccacgatttttctctctcccgcccggaggctcgaggaggaaccctagtgagaatggattggattatttattcaacgatgaattgaggctagtcgcagccaagactcttgatcttacggaaccgtccaaaaatcacttttaaaattttgagaaccattttacttaaaatttcctctaagtacccatttttatacctccatcattaacacggatagaagcaatttcttctgattttcgagccaaacttatttaacaacactttttttcttgagcatgaaattttctaaatcatcacttctgcatttagccaatcggttcacatactgatcaacacaatgcgcaaggatgccgaggtgcgcatgagcgatttgcgcgtgttcccgcgcaattatctgcgccgctaccgtaccgtgaaggaagtgaaattgatcaaccaaatggatcagctggaaggtgatgataatgatgatgaggatgagaatggagaatcgaaaaatgggctgaaacggtcggcggatgaacgcatggtgcacgtgttgaacatcagttgcggcgatctgactgatcaggccagcgatgtgatcgacacggccattgaggaacgcttca

SEQ ID NO: 9573 - DNA, 2581 bp, Heterodera glycines
tgaattagggcaactaatgatttatggataatcgggctaatctggtatcttcaatcaaagacattgcaagggttcttagtcggtcagcttcatctctcttatatcgatatctaaaaattttaaaaaattagcaactttttgaaaatcactgagccaaggataaattttacgttgatcagaatttgtaaataccatctgagaagtcttgaaattcccattgaatcgcatttaggagaggagaggttagctagaattatttttacgggattacaaattgaccctaaaaattgtggccgagaaaacacaaaaaatccgggattaaaaaattcgacaaatttaaatgagaaaaactctcaaacaaatttccaactgaaaaaattaataaaattaatttaaaacttataattggtttctataagaattttcaaaccaaccccgaaaaatgcaaactttcccaggttgtccaaggcgttttgcacaagaatcggctgccggttgcggtggaaagcacaacagcgagcagtacaacaagacgaactacccggcgagtgcacaacaaccagcgaccggtggtgctgaacccgttgaagacgttccattgccaacgccggctgttgtgccgactgaccgtcgacgacaacacgttcatggacccggaggatgggccaacctcacggctcgccctttcggcacatgccattggcaaccacagcaactttttggtgccattgcaaggcgacaaccggatggagggtgtgccgttggagaacggcgagtacagcttccggctgcaagcccgggaccggatgggccaggtgggcatcggctttttgaataccgtttttatatacgagagttggaaaatgacgagaattttatttgtttttcattgccccgatgtgaaatgttgctttcataaagagttaattaattgcgattttttttttgaatttattagttaaataataattagtaaattttaaattaaatttaacccataaaaagttttgaacttcttttttttgataattcttaatttatacatttcatatatatttaatggcacttttcctatgccgcaccccccccccccaaaatgtcattatcccgacaaacgaaaaaacttttctaaatctttgagttttttattttgacatagattttgattagcacctcaaacagccccggaaattgttttggtttgtcggggtcatgacatttttaggggcgggggcataacggaaaaatacaaatttaataaacagaaataaaaatttaatttttttcaattaaattcattgtcttgcaacaacaccgtattcttggagtcatacaagaaagcacaaattagtacaattctgtacaatttttttactatgtaatagcttaatttgagaaaacaattttgtgtcgctaaattttaattttaaattttattaaaataaatattcaggcaaattcggtgccattccaagtgattgtcaaggagcacagctcacgtgaaaagccaacccacagctattcattgctgatggatgtgccgttagaacgctttttggaccagccgcagtttatgcgcgactttgtgtaccgccttggctcgtctgttcatcgaatttcggatgccgaagcggccgcagaaggtggtgaccgaatggcacgaattgccagcgaaattcaggtgggtttaagaaaataaataaaattactgtaccgattcatactcgattcatactgtaacgatttatttaatgtaagttgcatgaaagatggatatgtgagtttttcccaaactcggttttcaaatttttaactgattttggcccaaagtactggactataggagtctattatagtgattctcaaacgaattttttaatttgattaggttattttagagaagaaattttaaaagattttgagattatagaatttaataaagaaataaaccgctcaaaaaacaacgataaaaaaaatctcggaaaatatttttcactttgaaaactagcccaggggtactgtactttatgagtgtaaaacaagacgaaaaaagtactaaattaatttaggtaggttatttgtgagaaaaattttataagatgcgagaccgagaatttatggtgccgggtcgttgttactcaaaaacatcaaaataaaaaatgttgacagaaaaattgttcttaacttagcccaaaatgaatcaaattttataatcttgatattattcgatagtttaaatgttttctattatcctgcaaaattttaacaaaaaaaaaactcattagcagggattccatttttatgtaaatacatattttttctggattctccatagcctaattagtaggaaaaacactttcttttttgtgtttgcgaacaaaagttgggacttatatttacatatttttacatatttcggcgtttttctacatattacatatgtacacatattttcatacatattttggactttttcgcatttcttcgtacatattttgcaatttttgagaattttttaaggaatttttattaaatgccccccccaaaatccaaaatcccccaatttcttcgtacatatttt

SEQ ID NO: 9574 - DNA, 1831 bp, Heterodera glycines
tttgagttttcgtcgtcattttgagattttcaataaatattttcgtcatttttttgcgaacatttctttttttttaatgagaattttttcgaaattgggcaaacttgtaggtgtttttgatacgacgaacaacaataaaaaatatgcatttttaagttttaaaccccattttttggatgtttattgaactttttaggtttatttaagcaaatattaaatatgcacaccttttttgggatttttggggggttacaacatatattttggcattttttatccatattttggaccatatttggccatttttggcctttttagtccatattttggtccatatttggccatttttggcctttttagtccatatttcgggcttttttagtccatatttaatgtccatatttcgcgttttttagtccatataatttacaaccctagttattattacctgagaaactcaaaatagcaagttttcttgacattttgccataactttctttaaacttaatgaaacttttgaaattttccatgattataaaaaactcacatcgtgctactgataaaatttggttgcttttgatcaaagttacaaaaaaatttttattttgatggttttttgagtaacatcatagcacagaatttattacgataataaaggcagaaaattctcgagtcatgaacagagactctcgagcatatttcttaatcatttcaaattttatgttttggcaaaatgttttaggttgaggaactgttggacaatggtggtcatcaaacaatgctgaaatggtccaatgcgacattgagtcgcaaaatttgtgatgatcgtcagatcaatgccacccgtgatcggatgatgcatgccagcacggagcgggtacggcacgactttctcaaggccatgggcagcaagttccacgtgcgcaaggtcggttttaataaacatgaaacaaaaattcaaatgagtttgactgttgcccacttgcgcgttcataatgacatcattttaaattttatgtgctacttaattaaacaattatgtaattgacacttacttaatgacctctgtttggacactaatcaattttggaagagcaaaatggtggacttgagatcaggattccagagcagaactatttagaccaaatttttaaatgatcaatgttgatcgtcaaatttaaaatcctttatcacaatactgattgatgatgctgggtcgttactaaaaaagtaatgggcgttactcaaaaaacatcaaatggaaaattttggtgaaaataattataactttgttcaaaaataatcaaattttattctttgatatcattcgatagcccaaaatgttatctattagactttaaaatttttctgttgactttcaaagaagttggactcaaaaaccagcattattggccataaccaatttttaaagttaatgtaatttttttgaaatattgtaggctaatagaaaacacttagagcaatcgaatggtatcgaaaattcagacccttggcttcggtggggggggctgaagtgaaaaattcgatttttaggggtgtatttttcttttttcagtcgatttttaggggcgtatttttcgttttttgaaagcccgaattagggggtgtattttacaaaattgttagccgtttttcgccaaaaattactattttttgccattttggtctccatttttcaaaaatatggtaaaatggaggtccggcggtgccaataggcgccgccgggaaaattttgagtattttaatgcaattttgttaagaaaatagcttaagacttcaaaaaaatttactgaaaatttttacttttttg

SEQ ID NO: 9575 - DNA, 1158 bp, Heterodera glycines
atggtcagattttttcgccaaatcctctgttccgctcttttgtgaaacaattcgaaaagtggcagaacatttgtaactccaatttttagctgaataaataaaaaaagttattaaatttaacatttatgtgtgtcgtccaccttcttttggagcggtgaacaaaaggtaaaatcccagccatttttcattgcttttttcatcaatttttatttctgccgacattttccacgaacgtccccttatgaacacttcgatttcactgtttcgcctgctccccacttcctctttcgtaaattcagaaaatttctcaatttctatcgccagggtccctctttttcccctgattctgttccaatcggaaattcgtccatgccatggaaattccaacggtttaaggccgggcacatcacggagattggggctgcaatggaactgataaacggagagaaattcatcggttgtcaaaacgccagaaggaactgcaaaaataatatatgaaactaatcggactcgctcagttgggccccagcggggtttttgctataatttttttctttgccaaacaaatccaacaaacttggtatcattcttttttgaaccttagcgaaatctttcaaaatttttcaggctaatataggacacttagggctatcgaatgataccaagattgttggatttggttggcgaagaaaaaagttatagccaaaaccccgcttggcccaaacgtgccggggcccaactgagataaaccggaaaactaattttattagcttaaaaattcaattgataccgatgcttttggtaaaaaattccgtcgagatgagaggaaagcgaattttgaacagtgccgggccaagcgcagaacgaccattctcagcggaacattcgacggcattttgacggcacttttcgtcggcccaacggagtgcctgaaaaaataattttttaataaaaattagcattttaatagaatataatcgttaattagtacagcattccaaatgatgagttcgtcggcgattttcaattggtcacgcccgaaaatttcgcacaacaaattttgatcaatttgtaaaaattcctctgattcaaataaagtttcggcattttggtcaatgtaatccaagcagcgacgagagaattccttaaaataaaata

SEQ ID NO: 9576 - DNA, 1841 bp, Heterodera glycines
ttttcacccgcgcaaagcactgccattgcgttgtctccgttcaattcgctcaaatcgtccgcgtaaatgaagctgagcatcactttaaacgctgttggttcaacgtcgggcacttccacgggattgtcgacagaggctaaaaacattgaaaaatcaaaaaaattttaaacacaacgcatttttcctttacccttttccggttttccatttttggagtcaaaacggaacattgcctcaaaaacgtcggaagcggacaccaaaatgagtttatgggccgacaaaagcttaaaaaatcaaaaataaaacttagaaatatataaaaattgaaataaaaactcgcctcctttccgtcccccaccaaaaagtacgcatccgcaagtttagccgtgcccaacaaatgcttcatccgatccgccaaaatgcccgattttgacgacgccatgtaaaaattgtaaaagaaaaattaattttttactgaaaaacaagaaaattttaaatgagacaaattgccatttttgattaaagaaaaaggttctgccacgaatcgaataaaatctcaaaaaatttctcgggtcgcgcttacggcgccgctgggccctaccccttgaatttgctagaaataattcattaaatcataaaagttcaatgccatcaatggccggtgaaatataattgaaggttgcgtcttttagaaaattcagtggacaattaatgtaatcgattaattcattgtccagcatcactatgggtcaactccactgtgcagagaaaagcctagtactatctcgtcgttttctttttctttgtaatttctctcactttggcgtactatctctccggttttaatcatgtaaaaaaacaacattcacttcgctctatagaacttttttttcgccttacagattttctttaaattttccaaatcgatagacaaaaaaattttgcatcgaatgttctataaggatttaatgaatttctatcctattttaaagttaagggatgatgaaaattttgcatttcttttcctctaataaaaataaaatgtttgtctttaatttagaaaaataaaataatcagaacaaaaatgtcgcaacttggatgtcggaagtggtgaatttcttttcaaatttccgaaattttttcggtgcaaaaattttttaatgttctcttgaattgtttaatttgcaaaattggtcatttcacttcacttttgctctataattaaaatttttggaattttaatggaatatgataaagtaaattttttggaaagtagttgatttcgactgtaatttttaaattacttttctatatattaattagagaccgataaaaaaatttcaggagcgggatcgggagttaaaattttccgggacaggagtcccgaacgggaatcccgtaaaaatcccgctcccgttaagatcccgtccatttttaacgggagtcccgggattttattttcgactccctttattaattttaaaactttttttgcggcgtatttttgaaaaaaaaacttttttgcaaatttcagccattttttaaaaagaaaattaaggattttaagggtccggcggtgccgataggcgccgccgaaattttttaaaattttggctatatatttaactgattcgcaataaaaaattatgaattttatcaaaaaactcaattcataccagtgcatctttagtcccgttttttgggtaaaattcccggagcgggagtcccgaacgggaatcccgtaaaaaaatggaattccattggaatattttgtgtcaattatgattagggaacggatttctaagtttttgcttattttttctgcggctttaattcgacga

SEQ ID NO: 9577 - DNA, 1691 bp, Heterodera glycines
attttcgacgaaaattttcgaaaaatttttactagggaaatggcctaaatacgtgaatagggaactggccatagggaaacggtcatagggaaacggcccatagggaaatggtcatagggaaatgagtcgatcccttgtcaaacacttgattataaatattttttagagggtcacaaattatctatgcaaaaccaatgataccaagcacaagggcgtagcagccagacccttggcttcggagggggatgaagtcaaaaactcgatttttagaggtgtatttttcttttttcagtcgatttttaggggtgtatttttcgttttttctttaaatccctggggtgtattacaaaaattttagttttcgccaaaaaattactattttttgcaattttggtctccaaatttttacttttttgggtttcggggcgggctttagcccctcagcctcccctccccctgcctacgcccttgaccaagcattagccaaatatcggttaatgccgaattactttttgattagtataccacacctcattttaagtgatgtaccactttttaatctcgcatttgagagctttacattttcttccattatctatttaagcatcgttttcaatattatggcaacttccgaagcacccaattatgcattgtatgaacatgcagtgggttacacactattcaagatcaaggaatatgaagacattggtcaaatacaaccagaggttttcatagatgactaagggttgtacatttgttttaaaatttataggtgcaaagtgcgatgacagatgctcagcgttttcaaacgattgtccaagttcatgcatttgacccattcagaaacactgaggcggcgcttgaaaatgcgaataacattgcggaaggttttgttttttattttcttgtttgattattgtttttagggattatccacgttgatttgctgaactttttggaggctaatctaccgaaaaaaaagaaaaaggttctgcttggagttggtgatcagcgtttgtcagcttctctagtagaggcattaccaggtacattttatttttgcgaccaatgaaagattatagcaatcatcgaagcacgaacccattcgctctttcatggaatcataatttaagcgaaaaccatttaatttttcctcattttttatgtattcgtgttgctttcaatggcgtcgtgcaggaattgcttcggggcattcggatgcattttcgcgtgttggccaaggatttgccacatgcacaactcggaaaggcacaactttcattgggccatagctattcgagatccaaggttaattcaataattggtaacggatggataatatgaagttctacgatttaaggtgaaatttgacgtccatcgtgtcgataacatggtgatacagtcaattgcactgcttgaccagctggacaaagacatcaacttgttcggcatgcgcatcaaggcttgtccattccatcgcgaatttattcccgtattgtttgaatttaggaatggtacgcttaccactttccagagttgattaaaatagtgccggaattatacaaatacgtgtgttgtgcaaccgcaattatgaatcgagaaaaaatggatgaagcggggaaacgaaagtcaaaggtactaccgagaaaatttgacaaagtttaaacacaacatcactctgtacactaatt

SEQ ID NO: 9578 - DNA, 886 bp, Heterodera glycines
  unsure (1)..(886): unsure at all n locations
cgctccttaccaaattcattatatgtccattaattgatatttctataattnaaggatcgcatggattcgtgtgctccgtctttgtcttcattaattggagaacaggtacaataccaatttccgtgttaagaaacaaatcgctttgttttgggtcggtgctcgactgatctctcacgcgggaagtctcacaaaccttgccaaatatcccgcgtcgacaatccaaattttgggcgcagaaaaagcactcttccgagcactgaagacgaaatgtctgattctcaaatatcatatttttgaaattccgattttcagcaaatacgccgaaatatggtcttttgttccattcgactttcattggacgcgctcaggccaaacacaaaggtcgtatcagtcgtttcttggccaataaatgcagcttggcctctcgcatcgactgtttctctgatgttcctgtgccctctttcggcgaagcattgcgtcagcaggtaagcatatccgaaaataaccaaacatgaggaaggtcaacgagaaacactaagggtcgggtttcgataaacgaatataaaacaaccataggtttatattgaaaccataaaaaaatatatgattaaaaaggggaagcaaattaagattgttcaaagctgcttttttctaacaatgaatgagttatttatttgacctatgtaataaatgtttaaatcttaagatgtcaattcctgtttaggtggaagagcgtttagtttattacgaaaaaggagtcattccgaagaagaatcttgatgtaatgcatggagctgttgaggaggcgacagtcgaagttgaaaaggtgtcttaattaaaaaataggttgaaaatcaagaatttttggttttatagtcattccggc

SEQ ID NO: 9579 - DNA, 2827 bp, Heterodera glycines
gtttttagaaaattattttcaggggtaattcgaggcgccttttatgaatccggccccttctttaggctcaatttcgaaccctgattcgaacacacgagaaaaaattttggaaatttttttcaaaaaatgggggctacaatcggtactattaccaaggaattgatcgaaatgtataataatatgaagaaaaacataagggattcagatatgtataaaaacggaaaaagacattggctgcattcaacaagcaatatttgtaaaaaaatgagaattttaaattttcaaaacttgttcgaatccgggttcgggttcgaaattgagcctgtgataaaggccagattcgtactaattgtaaactttattatcaatagggctgccaaaaatatgcacataaaatcgtaaaatatgcaccaaaaatcgtgaaatatgcatataaaaagtgaaaaatatgcacataaaattttccaaattgagggtgtaatttctcaaaatttcttcaaatttgttaaacataaaaatcttcaaaaatggctaaatgtggtattaaaaatcattttaggagaaaaaaaaacatgataaagcaaaaatttactcattttttgcgaaaaatcaaccaaaaagcgaaattttgctttttttgcttatttttgacataaattaaccatttttttgagaaaatttatttattcaacatttttcgtgaaaattttgctaaaaaaatttttttttttggaaaattttccggtttttgaggtcaaaaaggccaatttgtctgttgggggccgatctattagaggttttttggaaaaacgccaaaatatgcacataaatcgcgaaatatgcacaaatatgcacatggaaagtcatcctagaagcttcaaatcaagctaaaaacatgtttttcgtgcgcttcaggcttcccgcaatccaggaaaaaaatatgcatgtgcatatttttggcagccctaattatcaatatgtatgtgtgtttgtttttgttttttcctactgaccctttgcatttcaatttgttggagcgattgcattgggcgggggttgtaaacgaactgaacgaattggcgggcattggcggcaatgaaaagggtgaggaacagcaaaaaaaaaggtggcggagagaatggaagacgaagcatcggagggagggaaaggacggagaaaccgacctaaaggggaaaatgccaaggaaaaatgccgaaaagtgacgaaaggattttgggaccatcagggaaatttgagcaatttattctggttatgcatgtaaattaagagatttggcgacggaaggtcatttgggggtaaatgcgaagcaaaggaaaaagggcggatgggcgagacggagcaaaaggcggagggaaagggggggagggactggttttggtgttggtatttggtacatccgacggtttggcgccgtcgcaacttatgggatgatgacgaacgctcaatgcaaaacgatgacaataaataagtgaacaacggagcaattgcagaggatgagaaaggcgaaagaaagcgggaaaaagggacaacggaagcggaaacaaacggagaagcggaaaacgaacaacaaccaaaggatggataagccaattgcgttacttctgaacaattaattaaggaaagaaagtcctctcccatttgatactctaagcaatcggaatttcgagaaacaaataaaaatattgcggtgagaggtcgccgaatcctttttcattagttgagggatgttatacttacaattaaggttatagaaaaaatcggcagattgggctttatagaagagtaaattgggacaagtgtcgcctctccatcctttcagctttttgttgtgcaatccttcacttaaattttcgcttgaagagagaggtcattgagtttcgatttggtgaatccagaaaatgtgagaccagaacaatatttattttttgttcaaaaacaatttcctgtaaaacaacttatatgaatgaatatttgcaaaacaacagtaaagtcgcttaaactctcacttccttctatggcgttattcttttcgggtcgcgcggaaaaagactggccaaacgcacgttgggcaacccaaggaaaagcatcgtcacgcgttccaaacctggtttcaaaatatgtagtaaaattacggagaaaagatgcggcgggaagggggggggggtggaatttcgacgaaatttttattatgattttgatttaaaatgttgagaggattaacaaatttgtacactgaatgttggatcgtcaacaccaatgagaaatgactaacagaaaagagggagaaaagggcgttggcttaagaaaatagcttataataaaggagagacgagcagacgatgaatgagagaaaaatagtggtaaaaatggtctactgctgcattggcagagtcagagaggggtcacaaagagttcgcacagcatcgaatatttccttcattttgggcgtcattcttccccactgcacttctttcttcggtgtattacccacagttgaggtacttggagtgtcctgcccataatatctgtggcatggaataattttggaactgcgctgactaacggcggtgcttaaagtgcgctaaaaaatgatcaaatgattatcaattttatttttcttattccaaaatgaattcaaaacgaaaaatttaatcataattcatgtgggaaaaaatgcatttaaaaaaaaaaaaaattcttgatttgcttctgaatttttattttaaaaaaaaattattttttcaaaaattttgccaaataaaaaggggaaaaattccccaaaatttttttaggattttgttttaaa

SEQ ID NO: 9580 - DNA, 912 bp, Heterodera glycines
caattaggcaatacctctcatgaacatgtcgtaactattggaatatttggtgtcatttgggtcgggcattgtatagaaagggcggacagccaatgggtatttgtccagaacatagaaatccttcaaatttttttcatttccctcaacactcattccgtcactcaccgtttgatatttctcacgcaccaatctgcccaaaagcttttcatttggcgtactcaagtcttcttcatctccctgctcaacaccagctttctttaacatggccaccgcttcggggtatctttatgaaagtaatgaaaaatagaatgtgagggaatttgcagaatttaagtcaatttaaatgcactaatttataataatgtaggagccgtagaacatgatgagcacatccactattattattttacccgtagaaagcggcaatagaatagtctttgtcggaaaagtttatgtaaacgaattttcaagggcaaacgagtaggggaacaagcaaatggttctacgaaaaaatgatgccaagaagattagacttaaaagacccattggagaaaaacaaaaccccataaatataaaaacgacggaatgggagaataaatgtgaaagtgtatttaaaataactcactgcaaaacgagtggactttgtgtaaagagaaacggctcggctgggtattgccgacggactgcttcaatttcagcaatgtaattgccttgcaaatatttgaacaggtcaatgaacatctcagcaatagtttgaagaaccttcaaagcacggtaaaagaattagacgatctaattatggtgtaatggcctacttcgtggtaatggaaattgaaagccatctcaagatcaaggccaataaaatggctgggaggacttaaaaccccaatatgaaatgatacattacattag

SEQ ID NO: 9581 - DNA, 1137 bp, Heterodera glycines
ataaaatggcacctcctccacccccgccaaaaagcaaatcgtcaattgaggtaaatttggtataatgctgattttttgcctgaataatgctaatttttttacaggaggatcaaactcagcagcacgagttggcggcatcgcccgaatgggcacaaaatgatgtgccaacaataaaatgaatttttggcattttgtttcctttttgttacttttaggtggagcaccccgtagtgaaagtgttcggcttccaaccgaatcgattgggccgggaatggccaccgaacccacaacagcccgaagacacacagctggggttgggagactttgtgttctttttaatcttcatttatccataaaaattattttaggcaggccaacaaacacaaaacgttgggggacattgactggatgacagtaaaatgaataacaaataaatacaaccaaaaaaatcctattaggcctctattagaggaaaaggcaaaaattaattattaattgaacgcttttgaacagagtcctgctgaagcaacgccagtgcgagaacaaattccactcagaggtaataatataagaatgggattttttaagtcaaaacaattttcaaaaattaaacgcctaaaaacatcttccattaaaaaaaggtaaacttaatgctcaatggcctccgccagaaaaagaataccgcgtcgaagtgttgttgccggagggggtcaaacagtgatccgctgctaaaagtgatcggaaaatagcacagatttataaaaaataaaatatggaataaactcgaaactttgatcagagattttgctggccatttgtattgcatttttcccattttttataagtcattcaatggaaatttcattcactaaaccaatttctaatggcaaaaataacattgaaaaacatgtaaaaagtatgtaaaaaaacggagggacttggaaatgtttacgaatcttccgttggttttaccaccgagagaagcgataattaattagtaaatgaaaagcgtaaaattagtaatggacgcctctgctttattaacttttgggctaactcctccgttctttggatgcaattttgaaaatcgcgcaccaagtttcgccccgtcgtccgtcccatttctctttccgtttt

SEQ ID NO: 9582 - DNA, 2518 bp, Heterodera glycines
ttgtccattttaagattattttcgttcgaattttatcattaaatatccataataatatatctcttctcccaatcaacaaaatgtgccgtccttcgttcccttcaatgtttgcttttctgctgctcgttgctgctgccattgctctgatcattttgccttccgcttcttgtgcccctctcgacaatgcccaaggcgtcgttcccgacgctgcccccggcatcggttccgccagtgccgttggcatcgctccgcgacatcggaggcaatggctgtcggccgcccgcggtgccggcggagactccggcagtttttggagtctgttcggcaaaagatgaaaagccgtgaagtttccgtgccaatcgagacaaaaaactggactttcaatgcccagaaacaacgagattgatacaaaatcattctctttttgtatatttaagccaaaaatagctaaaatctctttgcttttcatttaattggaattttaaatttattacaactttttcaaaatttgtgtcatattggcaaatattcagaataaattttacaaaaagtgtttgcattttccattacttacagaaaatgctctagtaaaaaaggaatataattccttttctgttctttcagccataaaatgaaataatattaaacattttcactttatttttcattaagtttatgaatttgaattgtttttggttgatcaaaaagttctttcttttcatctaaattcattatcacttcattccgcagcattagtgagcaaatgcacagtcataatcacttaaagaatattatcattagatttaatgatgtaatttaatgggatttaaaaattaataaatttcgtaccgaaaatggatgaaatagcgaaggcgaagtcggacattatcacagtttcagcagagtccggattaattatttagttcacatttagctaaataatgaaaattttgcataatttagccagtttaagaaatttttttagtataattgtcactaaatacggtgttcttttttgtgccgtcgtatgaaacggcaacagtttcggcactggtaatgacacgggattcggtttcggcacttcgagtggttgtcgtttcagatgactaataagggaaattaagtttaattatgccggcgtaaacctaaattatataatttaaatttaagttttatgcaattctattttaatttcctgataaattccccaacttctatttaaaaatggattctataaaatagggttcggaccccgcgggcgggggtcagagtcgcaggggcggtggcgggggcatgataattccgccccgcggggacgggggcgggggtttgatttgaattagctccaaaaaatctcataaaaaattaatttttatgaatgatgtgttggctcctgaagcactaaccactaaaccacaaatatattggaaattaacagcaaaattttctttatttcataaaaaatttgtcaaagatggttaaaaattcaaaattgtataaatttttgcctttaattccacgaatatgccattcttaggggtgtattttcacccccgcgcccccgcgggggcgaaggtcgcgggggctggggatggcgggagtcagagtcgcgggggcgggggtgaggccaaaaaacctgtcccgcccccggcgggagcgggggtgacgggtacggggtccgaaccctactttaaaggcaaaaatatcgaaaagtctcatttgttattcctccttaaaagcatggcttacgctttgcttttcattgtgtccgttacaaatgttcccgttgcaaaagtcgcgctctgccgtcccattcatcgcttggcattccattagtccaaattctttaagtggcagttcaacagcccacaacgttttcatggtaacacatcctttggtgtggaaaagcgttgaattgttcgtcccaacgcaacgcactgagaagcattgcgcatcttcacaccttaatttgtctaacttctttgactttccctaattagggctaattatgtaattagttccccgccccccaccctcccacaaaatttcttcacctaatttcggaaaatgcttcgtccttttcctcgccatcattcactgttccattcaaacaccacacaatttctttacaaataaaattacatcatttaaaaataaaaatttaatagcaccgtttggaattttgttgttacaataagagttgtgagtggcattacaaaataaacagtcgcccaagggtttgccaccattggttaagcacttctgttccagcaaaacgcactgcttagtgccgtttaaagtgcaaccctttgacacttttgtccaactttttcccgcaatttctgttcaaattaattaattcattcattttttaatttactaatttatttatttaattaattaaggatgaaaaagcaataaaatataaacaaagaagcaattttgaaatgagaggctgatcatttgatatgataatttatcgcactttaccaaataagcagctcgactctgcacaata

SEQ ID NO: 9583 - DNA, 1472 bp, Heterodera glycines
gggctgctaattttatgtaagaaaatttgcgaattatttaaataaaatatgtataaaaaatactaaaatatgtatgaaatatgtacaaaaacccctgaacatgtactaaaatatgtaaattaaaatttttaaatgataattttttgaataaaaattcttcgtaaaaagtgaaacaggcacaaaatgccataaaaatgaccaaaataggcttagaatcacattttagtactttcaatattaatttttggtatctgttttttgaaaaaaaattcgattttttagggatacattttcaaaaaaaaaaaattaatttttcacaaaaatttctataaattctcaaaatatgaaaaaaatgaaaatgtgtacgaaaaaattgcaaaattttggatttttttggggcatctaaaaaattttccttaaaaaatccccaaaaattgcaaaatatgtacaaaaaaatgcgaaaagtccaaaatatgtataaaaatatgtagaaaaactccgaaatatgtaaataaaagtcccaacttttgttcgcaaacacaaaaaagaaagtgtttttcctaatattcaaagcatggagaatccaggaaaaaaatatgtatttaatataaaattaacagccctaaccattaaataataaaaggccatattggtcaattttccaaaaaatatttattaaatataaaataaaataaaaaataataactgaactaaaaaaatcacaatttgtattagaaacaaaatctctgtaaggacggaggttcgaaatgacaaagaccaaatttaaaaaaacaatttgcagaatttgtaataaaagtggataagaattaatattcaatgtgttaaaaatttaaaaatataataataattaagaataatatacgcattagaaggtgattgatctgcagtgccgagcaggtgaggaaaatgagcaaaattggcgactcagttggttaaattcgcatttttggagatcctgggttaaaatccaacaaaataataaataaattttaattttatttattagtaaaataaaaaagtcatcagaagggcgaaaaccacttactctgacgactgttcagataaatatgtcgtagagtaagtgacaaaatatatgggtgatcacaggaattttttccggtcttataattccacaattttgttaccctcacagcaaagggcgtagcctgaccttggcttcgggggggggggggggctgaagtcaaaaattcgatttttaggagtgtatttttcttttttgactcgattttaaaggtctataacaaaaaatgtttcagatctgttcggccataaacaattttatgcgccatgaacagatcaaacagctttcgcctattctcaatttgttggaagttgcgtgtattctaaccgattttggtatggaattggggaagggtatattaaaaaaactcttttggtgaaatatttctgacacttttcgatttttaaaa

SEQ ID NO: 9584 - DNA, 1493 bp, Heterodera glycines
  unsure (1)..(1493): unsure at all n locations
cccaatttnagaaatttcggttagactaattattttatatgctaaaaattttacattaactattttaagctttcaataaatagttaaaagaagtcttcacattcaatatttttatattaccatgatgcgcattttgaactcataaaacaaccacaaaagataaaatagttatttattttatttttaagtaacaatatgtattaaatttatttaattttcccttttgtaaattgcaaagaaatattgtggtacgtattgtggaacttcatttttcgactcttgcataatagcccctgttatatggttttgcaattttaaaaaaggttttatatcgagaagcttatttaaaaaattttaaactgtagttgaccgatgttgctacgaacacgatgtgtgttacataaataaatggcaaaaacgttacgattgtgatattaacttttgcaattgtctttataaaactactgattgctttctaacaaaagtttgccagtgttttatattttttaatatttattatgtttaggatttgttatgcttgtcagttcatatttttggagaaagttttaaagagcaataaaagtttgcattttactcgattatttatttttactatatttaaattatataaaaattgataatcacgcatatgtacaatattttgtttacattggcggttttataaaacgcgactttccattgtggcggatttataaaacgcgacttgcggttttataaaacgcgactttccattttggcggatttataaaacgcgactggcggttttataaaacgcgactttccattttggcggatttataaaacgcgactaggtggcggtttttataaaacgcgacagcacgccctaatatcaagaattaaaaatttggttgctttggagcaaaattataacaaacattttaatgtgaccgaagtcctcccctaattgtaaggggattttttcgtgttattttttaactttttggcgttctgctgggcgaaaaatatcacttttcaacagttttactccattaactgaacaaattgagcatttttaggtgaacaattaataagcttattatacacgatttgtaaataattgtacaatttaaataattaaattttttgtcaataacattctcttttatcatcataaacatcaattaagtggagaaataattcgtcggaattattcaaattagaatcatatattaaataaaaaaaatttttatatcatcatgcaaataactttattctaggggtattattcattattgtctcaatcaaagaaaattcttcaccagcatcacgtctcgaactgtgcatccgcagtctgcagcaggttcctcccttatcagtcgccggaatgggcaaatttggagttaaaaaaagaaagattatcatttccatcacacaagaaaattattttgtatattctggggagtgtacagggaagcgtgaagagccaaagtgtcacaagtatcaatgttcat

SEQ ID NO: 9585 - DNA, 4353 bp, Heterodera glycines
ataattttcagccaaaaattgagcaaaaataatttttattcactgattgcattttttgaaaatttttttaggtcaattcttatgggtgtattttttgatttattgcaattttattaaggaattttccaaaaaatgtcgaaatagtgaaaaaaatagtgacaaaactccaaaatagtgaattttcactattttagtgacgaagcgccaaaatagggatttctagtgaccgataatgacatcagaatcgaaaatttttaatgcagaaatgcgtttttgagctcctttcttcaaaacaattgcgcaaaaaagctaaaaattgcgaccctaataatcattaatgaggcatttgcaaatttcttttaaaggattatgatggaaattggaaagacaaatgttctcgtagacaatctgatgggagatgtaccaccagtcgctgggctccatgcacttttgtagggagtaattgtaaatttttcaacctgttcgacttttctgatccttaaacttgcaaataacatttgaaaaatggatgaaaaaagagatttgtgggatttagtgttgctgatttatggaaaaaaacattggatctatttgttgttgtatgctattaaaatcatacgatatttttatttatgttgataaaaaattgaatgtaaatgttgacaaaatcattaaaatttttgtttttacgtcatttatctttaaaagtccatcttttaagagatatattttccaaaaaaatgtttttacggacatattcatgccaaatgttgacagttattgatcgctacattgaatattttatgaattagtcataatttaatgaaaatttatgcatttattttctccgcaaatatgtaatgtaatttccgtttttttgattaataaattttcgaaattaagaattgcccatccccccgaatgccgagtctgatttttaattataagtataaattttaaatataattttttccctatataaaaaaaattataaatttagaatattattattggttatttattctgatgaatttaatcattttgttatgttttttttcgctttataccgacggcattctcaactaaattatggacaaataatgaaaatgattcgctaattgactcctctaatcgttctgctgctgatgctaatttggacaatgttttgccaccggaaaaaggaaatcattttgtgccattccaatgaagaaaaagcaaattgatcaatttcttgaagaaatttatgacaaatgtggagaagaaaaggtggaaaattcagaaataattaataaaatattaaaaaatggaaaaaaaatgatgaaaatcattgaattctgaaaataaaagatgaacaaagaattgaaattattaatcaatttgttataatgcaaaatgaattggacgaaaatggaaaacgaaaaaaatatgaaaatgagaatgaaattgcgaaaattcaaattttatttcaacaaaattccattttttttactaattattgagatggagtatggccagccccaatacctttgaagtaagggtaacggcgcccaaaagaaaggcgcgccctgggaaaatgaaaaattttggcccggtttgcaagaaaatgaaattttgtaaaatttacccctcaatttggaaaaaattatatccatatttcgcgatttttggtccctattttatggccatatttcgcaattctatatccatataattccaaaccctaataatgatattaaaaacaaaaattttaaaaggaatgtattggtttgtgttggatctgcatttttggcttaattcattttttccattatttatttgtttctcttttctccgtttttggcatttgctatgttgtaatttccctggcccttctgttcctcactcactcataaaagggaccccttcgtccaatccatcgaaaaatattcttctaaacaattttgtgtaattccatctgtttggcccctcccatttgtcattggtatttaagtctttgcttattctcttatccttaggatttcactcacccattcgttgactcaggttccctgcctaaagcgatacaactcacttaacaatttgctttgtttttcttactatttaaaaagcgatcattctttatttaactttgcatttccacttttgatttccattttaataaattgtcttaaaagaagccttgctgaaaagtaaccgggaaaagttcagagtttgggtacggacacaacacattttggtgccacgacccgggacccctaaaagagtattttaaggggcatctcaggctttgtgccgggagaaaaaaagcaaggaaaatttgagctggtcaaagctgtgtgcttccagccgggctgttgtgccgtttaaaaaaaagtgaaaaaggctggtcaaaagtgtgtactttccagtcgagctgggtgcttaacacgagaaaaaaagaagaagaattgaatttgaaaatggaaagtgaaatcaacatttcacctaacaacgtatcggactttgatcccgttcatttcactcccgaagaaaatacttggtcgaatgcgagcatttgaactggcagtttgtcgccaatttcgaacaatcgagaatgtattttcacaaatctcgagtcaaattcagattcagaacaccgctgactgagtaagagaattggaaggttcgataaaggaactcgagaactttacagaaatggacacatttgagaccaaagaaaagtttattgaagtggaggaagaaattggaaaggtaagtaatcatatggaacgttatgagacgttcacaaaggttcgatttgggaaaattgttggaaaactgaaggaggaggttcggaaaattaccgaaaatttggatgttctaaaaggccgagtacatttgttggaatttgaacaagataatccagaaagacttggtgaatggtatgaggacaatcccaagaacataatcgattgcctgatgacaaaggggcaacggaaggggaagacaatatccaaattggggacgaaagttgcgaaattatggttgcagctccatttttagggggaatcacccccctcgagggttatgatggaaacccaagtgtatcattctcacggtgggttgcacgtttcgaggatatgctaacactatacccacagtattctgaagtgcaaaaattgagcagattgagaattttactcagtggacaagcccgagccgactttgactcaagtgaaccctcacctgtctctctttctgatgttctaaaccatttaaaaagaaaatttgaaaacgaaaatactcggtcaattgccaggcaggcaatggcaagttgcagaaaagcaccgggcgagcgtgtctatgagtttgcaaaccgactaaatgaggtagtcagaactgctctatcaggagaaaatgaggagacaataagaaagagacttcttgaagaatttcttgaaaaattaacccccgaattgcaattcgaggtcatattcaaatgcttatgaaattgctcaagattttgagcttcttcttgccactaagcggactaaccaagtgtctgtggcagattcattcgctgaattgacgcataaagttgaagcattgtccatccgccaacattctgtacctaaaagaggaatagaacggcgcgtctgttactattgtcggcgtccaggccatgttctaaaggattgtagagacaagaaaagggacgaagaaaggagaggacatggtggtcaaagggaccgaccgtttatggggaaagaaaatggaattatgagagaaatgaaagagaacaccggcataggcatttttcaccccacgacaggccaactatggaggaaatgagagggaacaccgacaacggcacttctcacccccacaacaggccgagccatggcagaaataatcatcggtcaccaattgcttatgaaggaatggaatatgaaaatgagcgaactcagtcgccggggaggcgagttcaatttggtggccatagaataggagcagcaaggattgctagcccaatttttctagcattaatggttattctttcattgttaggtgcaaattttgcgacaaattcggtggagagcccaatgatttgccatcccgattctcccgcaactttatggtcaatcccaattgacccggtttgtccaagttggacacaacggaattgcctgtggcaatgaaattgaacgtatatagagtaaatacggttaagtacaaaacaaatgcaactgcatgtaaatgcatcaagacaaaaatatccataaggattggattttttgggggaaaatacgaggaattatcaaccgaaaatgttgaaatgcctacggcaatgtgccgaaaaatgaaggattttga

SEQ ID NO: 9586 - DNA, 1838 bp, Heterodera glycines
caattctcaaaattcatcgacatcccgttgaaataaattgtgttcccctgacagaaagatggctttctgttgatcaactgccaacagcagcgactcacaagcagaccgagcggaagtcagaagagcggaaatttgtcaccattgctcaagcagctacaagtaaatgcgatgagaaatttcgtatcagtggatttgccaattgcttgaaaaccgttttcttattggacacaggagcccacgtgtctttatgtagcaaatcaactgctttacgattgggaataagacaattgaaaagggcagatattgctggagtgattggaataagtgacagaattgtaccaatttttgattattggcagaagcacactccgacaaatgcctttactcttggatcttcagttgggcacattaacacgacaagcggatgggaaaatttatgcgttcgaaattgaaagggaaacgcaataaatggcaataaagagttaaaacgaaaggggacaagatggtcaaaaagtaaaaacgggaattgaagaatgtctcgaaaaacacaaaaatgtattttcgacccacgattatgaccttggggattgtaaagtaaaagcacctcctatcttgaccatctctgatgtacctgctaaaacgaaaccgtacccagcgccagagaaatatgaacgaaaattaaaatcacagatcggaaaaatgctggaagcgggcgttataactgaaagctttacaccttgtgctcataatgttgttttggttaaaaaatcaaatggccaattacgtccttgcgttgattttcagccattaaacaaaatcacgattcccgacccatatccaataccgagaatggataagacaattttacgggtcgctggtcaaccattttattcaaccttggatttggcttccggattttggcagattccattggattccgaaagttcttataaatgtggcattgttaccccttggagactttatcaaatggtaaaattgccattcggactgagaaatgcgccaagcatttttcagaggaccatggacaaagctttggaaggtattcggaatgtaaccgtatacattgatgacattatggtccatacaaatacggaagaggagcatttggagactttggaaaaagtattttgccgattgaatgaattcggattaaaattaaaaagagagaaatgcgaacttttgaaaaatgaatgcacatatttgggacatattttaaatgggaagggctatcggccctcattgaataatcaggaagtgattgaaggattcccagagccgaaaaatgcaagggaagtaaaaagatttttggcgctatttaagaaaaagccactgaatgaaatgatagtccccgaaatattatcctacttttgtacagactgcaatcgagcacgacacgagctcgctcctcgaggccgcgtcgtcaggaccgccaaatgatccaccgttggatgtgagtgagattagattatcatgagagaccgatggtgcacgaaggcgcggttatcggaccccggttatcgacgtgctcgcccggggaaatgcggtctgaaggcgctgcgaatggtttcgcttccgatgagagttcactcgagacaacctttagaccgcagggtcaattgactggttcgaaggaaacattggctcctcgcaacgctatgacaaagaacacttcgccaacgattcaaataccgaaaaactgttaaggtacaacaaatgccccccaattagtttattttgatttgtattttttcatgatcttcagaaaatacgtcggtgtgcccaccgacggacgcctcctttccctacgatttgcgcgg

SEQ ID NO: 9587 - DNA, 1983 bp, Heterodera glycines
tttatggcgccgccgccatttgcattaatgatgagattgatgatttattacggcactttttattgacctaattgacagacgactgccagcagcacaacacaaaagcatcacatggagcattgatcaaacgatttttttgttttttgttttgaacataattcattgagcgaaaacgatgcccccttttttgttaatcgaatttttaattttgtgattctgcactttcatatctttcattatccaattaattatcgtgtaaattaatgggaatttaaagttttaattattattaaaatttatttattattttggcaaatgattagattatacaagatcattaattagaatggaattgaaagtttcataatttgaagcaagaaaattgctaaattttattcaatgtaggcaaggtaacatatgtatgtatctaaggctaaaatttagtagtttttttttcatttttcttagaattttttacaaaatattttaaaatattgacaatcgtgttcatggcgcgccgcatttgcattaatgagattgatgatttattacggcactttttattgacctaattgacagacgactgccagcagcacaacacaaaagcatcaaaaagcattgatcaaatgattttgttttatgaacataattaatgaggggaaaacgatgccctttttgttaatcgaatttttcctttgaacttttagacactttcaatctttggtgtatccaataattatcgtgtaaattgcattttttttttattttactaaaagattatatggcaaataaatttgcatgaaatttaatttaattttttaaataaaaaattttaatttattattttcctaaatgattaaatcgttcattattgaaaggaatttaatttaatttttaatttgcggtaaaaaattacatacacataatttgaagaatgaaaaatttaagttttattcaaattttttcacaattaaggccacatttaagacgaagattagcagttttttttctgacaatttttgataaaaaaaataaaggatgggcaaaattatgtttatgggcgccgccgccatttgcattaatgatgagattgatgatttattacggcactttttattgacctaattgacagactcatggagcacactactcattcattgaccaaatgaaattttttgttttgttttgtgaacataattaatgggagggatgaaaacgatgcccatttttgttaatcgaatttttccattgaactgttagcaattttaattgtctgtgtgtaacaattaattgtcgtgtaaattggcggtataacaaatttttttttttaccaatattaatcattttaattttttttttttttgccgtttccatttaaagcaatggtaattagtgtttttttcatggaattttttattgaagaaaaaataagttcgcattattcaactaaacattttttgccaaaacaaaaaatatataacaatatacaatataaatgaatacattttcattaatttttaaataaaataaacaaaaattttctttcatttccatcttatgcattattaggcatatttccgaacaaaattgggttaccattctgttgaaatccggccaacagttgactatacagagcgcttaacttttgttgttgaggaatgcttaaataaataatattatatctgggaaaatttaaaaatctctttgaagagatagaaaataaatttgaatggggaaagttttcaaaaaaatgaaaaaattcaatattttaaaaaatggttaaaacttttttaaaaataataaattattaaattccgagaacgaaaaaattttattttttaaaaatataaaaaaacaattattaatttcccaaaagcaaaaaaaaaaaaaaaaatattttccaaaattatataaatttaaaaatggtaaaaaataaaaaaaattataaaaaatgaacccccaaaaaaaaattttaattaaaaa

SEQ ID NO: 9588 - DNA, 2362 bp, Heterodera glycines
  unsure (1)..(2362): unsure at all n locations
cgatggtgttgtcatcaatgattgcgcgcagtttgcagaagttgcagtaacgaccgaaattgttgcatgctgttgttgttgttgttgctgttgctgtactgcaagcagctgattcagaaactgggttgtaactgcactcgatgaacttgaagcagtagtcgggctaattggcggcgatgcctgcaattaaaaaaatgcttaattaattattattaaataattatataattatgttaaaaaatttattaaattatgaataaaaattaagaaaatttgattaaataaatttttaaatttcgaaatattaaaaaattgctcaaaaaatcattttatatttattagaattgcgattaaaaaaatttataacaaattttattcatttaataattttattaattatacatgtgtttgaagttatattgtgggtttttattttgattttttaatatattaaataattctattttaatgaaaaaattaaaactaaaataatttttattaaaaaaacaaatttttacattatttattggcatcttatttgcttccactacaacaacatctgtatcattttgagcagtttcatcaattttttcagcaattttattttctttcacaacattttgcgcctaaaaattaaaaaaaaaattgcttttcaaaaattttaattttaattttttaaatttttaccgaattttttggcatttccaagctcactggccttgcttccggtgatgagtttgaatttgaaacatccaaatttgcgacgccttttggctcaatgccaagcatttcagccatccatttattttgtgcgattgcctaaaaaatttttaaatttattttaaaaaaattntaaaaattttttaggacctgtccaattgtgaacaatgcaggcagtaacagaagcattcgggccaaacacacggatgcttcagtggtggaatttccagcgaccaaaatggcacgcaaaaggccgtcacggttttggagaatcctaaatttgttcaaaaaaccatttttttgttaaaataaatagtttttcatttaaataaattaaataagtaccatcgaagggaggagataagaaaaattttaaaatttaacccaattttttaacaaaaaaaatcaataaaaatgcctaaaaaatttccccggtggcggcgccaataaattaaataaataccattaaaagaaggaataaaaaaaaatttaaaaattttctgcaaaaaaaattattaaaaatgccctcaaaaaaaaattttccaagcggcacctatcagcacaactggcctctaaaaaaatactaatttctattttcaaaaaattggctcgaagtcgcaaaatttagaaaaagtcgtttaaaaaagctcgtcaatttaaaaaacaaattttcgattttgtaaaaataagagggaaatttatttagaaatgaaaattgtttaaaatttcattgttttctaagtcttaccaattttttgcttgctcactcatttcagcaacgtccggttgcagcaataaaatcgctttaagacaagcaaaatcaatgttttgtgcattcattcgtcgaagcggattaatcaattcatccttaaggccaaaattttttattttcttgatattatttgatagcactaagtgttttctactagcctgaaaaattttgtaaaatttagttaaagcttcaaaaaagttatggccaaaattttttttgcaaacctggttgcttgtgtactttttgcaataactttgttcaaacttgacgaaattttttgaaatttttatgataattgagaactgttagtgctatcgaatgatatcaagaataaaatttaagttgggtttaggttataggtagttgttttttgtttttttgaaaatttcatttgaggttttttataacgccctattttatggcttttttataacgacatagcaacgataaacggaccctaattttggcaattagcatgataaacggacactaattatggcaattagcataaaaaaacgtaccctaattttggcaattagtatgataaaagcattatggcaattagcataataaatgtaccctaattttggcaattagcatgataaacggacactaattatggcaattagcataataaaagtaccctaattttggcaattagcacatgaacaccatcatcatcatcagttgttgtagaagcaccaccgtntttgcggaagtgtgaaaaacgtgtcatttgggagcacanaaatggctggttgtgatggtggccctgcaaattgctcgcttttcatgcccatcacatttacagagcgttgcacggaaatggagaagggcaaatggggcggcacaatggtgcaaacaaatgag

SEQ ID NO: 9589 - DNA, 1596 bp, Heterodera glycines
ggcggcacaatggttgcaacaaaatgagctaaattaatttaaaaaataatttttgaattaattgaaaataaaaacgaaaataaaattaatgtgttaagaataattaaaaagttgttttaactgattttaaatataaatataataatgaataagaaaaaatattttcttaataagaattttttcagaaaaagataaaaaattttcgttttcataagaactaggaaatataaatataattttttttttaatttaatatttattaaaatagttttcaattatttaaaattaaagaaaaaatttaaaaaaatataagtttaaatgttatctacaaaatatttatatattaattatttttatataattaataaattgggcaaataattaaaatcacttttaaagggacacaattaattattttaataaattctctttttatataaaataatattttttatgattttattaattttactttatcattgaatttcaactcagaaaatccgtgcaatgagtttgaccatttgttcaaatattggaaagttcgatctcgaattgctgttgacgagtgcaaaacgggcgcaaattggacacccgactcaatttccaactaagttttttaattaaattaattaattaaaatttatacatttaattaattaatttttttttaccaattgttccaaaattaatttgctatttgttcccatctgtccgacaaatgaataatgtttttgatgttgaacaacattcaatggcgatttgctattatgattattttcactatttgagtcctataaaaaataaaattaattaggtaaataacaaaatgaattttctttattttttttattaattaccccaattaattcgtcggttattccgtctgaaattgttgttggagatgtttgcgcatcatcaagaacctgtttcattatacgacgagttgaccctatgcgatcacctttaaaaaattaaataattatttataggtaattaaaaaataattttacaaaatatatttaattaaagattgatacactaattaattaatgcgataattattaaaagaaataatcctatgtaactaatgttaattaatatattgagaagaaattttatatattatttgccataaagtaacaatataaaagaaatcaatttatatatatataatattttgaattgattgacgaattattattatttttttatttaaattagctaaaatattaaattaataaaaaaggaaaagctttttttcctacgctcattttgaattgcatctggtcgcattccgttcgcaacacattttcgaaaacggcatgaacggcacgcgtttcgccgttctttgtccacacggcacacatttgtaaaacggctaaaaatgtattaattattaatttaaaattatttattttaaaatataattagtaaagaagtattttaaaattatttaaatgcattttaagttttattgctttttaccatgtgtattgcaagttttgccacacagaacggcggaaaaagcctttgcacccattgcatgaaacaccgcgttgggaatttacaaaaattaaattcttactgtattaagta

SEQ ID NO: 9590 - DNA, 997 bp, Heterodera glycines
attaaaaaaaagatgttgttacgataagcctctttgttgctcgacttagatgaaaaatgtcagaaaatttatttccgattttcaaaaaaagtaattgcattttttccaaaaatttttcatgccgtgcagagagagcaaccaagagagctgctaaaaatgccaatattttttatgaaacaacgacaatgaaaactttttttttacaaaactaattaaattgtgctttttaatttgattgagtttcagcaaagtaatgaaggaaatttcgtgggaaattccattacattagcacctataaaacgctaaaaatggcactttttacaaaagcacgacctcagcatgttaattaaaaaaaaaactcagattctttaaatttcttgcgtttaaacaaaggtaatgaaagcatttttcgtgggaaatttttttagaattggcacacaaaacctcataatggcactttttgcaaaacgacgcaagcatttttaattataaactaattaaattgtatatttaattacggtcaagcattaatggttggatcatcagcggttgcgaaattgatgctccgttgaacaaaagtgaatttgacgaaggcataaacatttttacaaaaataaaaaataatttgcttaaatgaaaaattaaataatttttaggtaaattaaaattacatttcaaaaaattaaaaatgaataaattattatatataatttaaataatgcgaaaaagaattgtaacccaacaaaaattttttttaataatttcttaggcgaaacaacaatttttaactaaatttttacgagagggaatagtgaaaatttaataaaatttaaaagtttattaattataataattaatttgctttatattgtaataaatttaacttttcgaattattttttataagcgataaatattaaaattataaaataattaaataaatattatttgcattaaaattaataatgaatgaataaaatctaatagtgaaataattc

SEQ ID NO: 9591 - DNA, 4631 bp, Heterodera glycines
ttttcattttgggctcctttctgtgcggtttttgtgactaaaaatcgaatccctaccaatgagaaggcttaatgttaatcattagcacagtatataattaattataacttatgattatcagacagtaataattcctccatttttcttcctttttgtgaattggcccattttattgctcttcgtttccctctttttgttcttgctcatccgccaaaaattcgtgccacattttgcagtgctttcggcacaaaaaatcggcgtccattttggccaactcgacatttgcaacattgcgctggagctgctgattttgatgggaaaattcgaactgaaaaattcataaattttacaataaacggctttaaaaatcggtgtcgttaatgcttaaataatttaagttatataattatgaatttcattaactcgatcatttgattatttagttgttttttatattttaaagaatgagagatttgcattttaattaaacgtcatttaatgagactaatgagcatcgatcctattctaattataattaattaatgaccgcatattccatttgcaacttttctcgctcattgctcacgtctgaaatttcgcgcagccaaatatcaacctgcagctccattgcatggatttcgcgctgaagccgtttaagcatgacggggtcggcttaattatgcaattaagttaatcaccgactccgacattcccattctcgaatttgcaggacttccacaatccgtgatttcccgacccagaaaaaatttttatgactttaaagtccaaacattcaatttttttctctaattttacccgacttcgaagcgagcatttcaacaacggatttgtgccgggcatttaaaatttgagcagtttcattcaaaatgttcagctgcgagttgttctttaaataattaattcatttttaaaaggcatttatttcccaattccacttgttccatgccgagtttccatgatgccaatgtttggcacaacaattcgtgccgtgatttcaatttgttcagaccattcagttcaatgcaaatgtcatcaattggctaaataaaacttttataatatatctgtattttaaattaataaagttttgataaatttaaaataaaatattttcaaataaatgaatgtttatttaaaaattacctttgtaacaattttgcactcaaaatcgttgaaagacatggagaaattggacaaaaatcaaaaatattcaaataataaaaaatagataaattaatttaaatcttaagtaaaaatatgatttatttttacactaatttttaatacaataaagaaataaaatgaaaatcatttattttaaagaatttttcggggtcaaaatatgtaaaaaattgaaaataaaatgccattgtctcccattggcacatttgcaatgcggcgatgaggatggcacgttctcctaactttggcactcgcttaatggaagttttagggtattttttgcggctttttttagcttatggtcacacaaaaatggggaagataccaattctttgctcttggcgccggcggaattcactgcaaattctcccaggggattttaggggatgggaaaggccgaagaatgagggccaaaaaaggaacaaattaattggcaaaagtaaaaaaggcattaaatttgcaggaagatgtttgtatttgaaatatgaaattaataaatttaaattttgtaaatttttaaataaataaatgttaaaatattaattaaaaaggagttttttatttattttttatttttattaaaactttctaaaaaaaattcaacaaattttatttatgtgtaagacttaaaataaactttaatttacgaaaacggtttaaaaattgaagggtttttttttgaaaaaaacctttaaataatttaaaggtaaaattatgggaaaacccatcaaataatgaatttgacgaaaaagagaatttagcttatactttttattgttcagatttttcggggttttaaaaaaataaagaaataaaaatttattaataatttttcatcaatggaaattatgatttttagaaagtttttgcacaaatttgaaatttaaaaatggaaaataaaaaaatggatccaaattattgaattaaacgtcacaaatgggagcagaaaacccaaatttttgcactgctttttgtgcgtctgacgtctaacaaaacggataaataatttgtgctgtgatctttggcctttgcgcgagaagacaccgccagtcgcccgagggcataaatttcattgcggggctgagcaaatgtgcctttgaggcgaggggggggggggattttgaaaaaaatatccctaagattagcagaattttaatattatggaatttcataatttattttttcatttaataatctgagaaatttataaaagaaataatttacaaaaaaaactaattgtcctgtgaattttagttttgataaaaataatttttgaaaatgttaatgaaaattacatatagctaaattattcgtaaagtaatgaggccaagcatttttaagcggtatgaaaacgtaataaattactcatcgccacccgccggcggtcgaaggcaaaaatggaaaaatggacaagccgagaatgggctatttttgggcattaaatgagcagttcccatggcacgaagaagcagcttttgaaacgcaagaaaaaggacattaagtgcaaggataaattcagcaactaatttcattatattaaaaaatctaattttaattttggaacacttttgcgaaattaaatttgaattttttaaattttggtgtaaaaataagcatttgacaacatttgatagaatttatgaatttttcgtttccttacaaaaattttaaaacaccgaaatttggaattgctaaaaaaataaaaatcactaaaatattttaatatttttatggtttggctgtatttaaattagtaaaaatgactctctctctctgttttttttttcaccaccgactaatgagcctttttggtcagcaaaagcagcagtattccttttttttgccaaaataatgtccagcagcccatcagcagacggacactttcgtcgccgtcctcctcatatttataataaaaagggtcgaatgcttagggagggggtatattttgccaaaaataaatgtgtacaaatgggccaagtggggaacggctggcaaaatagtggccagcagacgatggccggccggcgccacccgttttagtgccaaaaacaacaaatggtggccggccattagtccggcttggtgcctcgttttacaatacgacattataaaaattgtcaattaattaatattttttaataaacagggtccatgtttttatgcacaaaaaatctttgaaaatacattttaaacccataaattggcaaaaacccacaacagaggcagtgcatgtgcctcatgacgccggcaaaaatatttgtgtgcaaatccgagttttttcgtggccatttttggccctaattgagatattttttacagaattaaataattctgaattcatatttatactaaggtaaaaatgtgtaaaaaataaataatgataataataatagaactataatttgtgaaaatgttcaaatgaaaaaattaacagacggacgacacctttccgtgccagccgcaaaatttaaacgtacaaattgggtgggaatgtttttttgtttgtgccagaaagcccacaaattaatattgtcaaaatgggcgagtgaatgaatggtcattagccattagccagggcaaacaaacggacacttttcggagtcaaccgaaaagtgaagtgtttgtggccatgacaacagcaaaaatgagcagtagccaggcacaaaacagcagcggcggcagcagcggtcagcttgtgtcattagcaaatgagtcagcttttgtctgcaaaattaacattttccatctgtttaaagcactaaacaccgccagcaatgggatgccgaattacaattattaattaatatataaatgaaaaaacgaaagataacaaaattaatttggctaaaaaaaaaaaattaaattcatgctgttgtgagagaaacaaattttggaattgattcctatgatggatttaattagaattttattgaatgaatcaatttaatcagactcagaatttctttaataatataaaataatttaaaaaacttatattgtcagatgcattcaaattaaatgatttggttggcagattaaaaagtgtgtccagaattcaatctttgtctgcaaaatcaaggctggaatctgaacaaaatctgaacaattccgagaggcccccagggccatgaaatgtatttaactttattaacaacaacaataatttttcaacaataaaaaatttccatttataaaggctttgacaacattgttttccgttttcgaagatcggatgaaccacattttcggcaatttgacgcacgcgggggaagtcgagcataacaatttctggcaaattaataaatttaaatgaaatctcaattatcctgtggcagaggagaggaggggataatgggtgcaaaattaaattgtcaaattgttgtcatttgaaatttgaaaacccgaaagtatttataaaaaatttgtga

SEQ ID NO: 9592 - DNA, 3475 bp, Heterodera glycines
  unsure (1)..(3475): unsure at all n locations
atattgtcanaatgggcgagtgaatgaatggtcattagccattagccagggcaaacaaacggacacttttcggagtcaaccgaaaagtgaagtgtttgtggccatgacaacagcaaaaatgagcagtagccaggcacaaaacagcagcggtcagcttgtgtcattagcaaatgagtcagcttttgtctgcaaaattaacattttccatctgtttaaagcactaaacaccgccagcaatgggatgccgaattacaattagtaattaatatacaaatgaaaaaacgaaagataacaaaattaatttggctaaaaaaaaaaatttaaattcatgctgttgtgagagaaacaaattttggaattgattcctatgatggatttaattagaattttattgaatgaatcaatttaatcatactcagaatttctttaataatataaaataattaaaaaaaaatatattgtcagatgcattcaaattaaatgatttggttggcagattaaaaagtgtgtccagaattcaatctttgtctgcaaaatctaggctggaatctgaacaattccgagaggcccccagggccatgaaatggatttaactttattaacaacaacaataatttttcaacaataaaaaatttccatttataaaggctttgacaacattgttttccgttttcgaagatcggatgaaccacattttcggcaatttgacgcacgcaggggaagtcgagcataacaatttctggcaaattaataaatttaaatgaaatctcaattatcctgtggcagaggagaggaggggataatgggtgcaaaattaaattgtcaaattgttgtcatttgaaatttgaaaacccgaaatatttataaaaaatttgtgagtttttttttctaaactaattatttaggccaatacaattaaaaataattaaatttaaataatatatactacaattgatgctttttctggttcagtctagcacaatatttacaatacagctgttttcacattgtgtttgagcttaattagctaatagagcatgttaagaaattttgaataatttacaagtttgagtgggtttgacaattaaaaatagttaaatgatgctctaaatggctgggacggaattggccaaagttccgtcggcactgaattgtctggccaagcgccacaagccattttgaatattaaaatacccattttgtgtacctgcaaatcagcttatcccatcgaaaacttttggccaattgcaccaattttgggtcgcatcgatcgtacgaaccgccgccatcgtagaagcttcaaatcaagcggaaaatgcgtttttcttgtgcctatttgggcgtatcaagtgcgcagaaattttaggcatttgccgaaaaaacgaagtccgactaataaacacttttcgtaaataatgccaaggatagaaaatggaccagacaaagaaaagattaaaattttcagcttatttattttttgaaaattaaaatttaaaaaataatcagaaaaagctgctgcccgtggtggccgaatttacgaaatgacaataaaacaaagacaataaatcaaactaatgtcactcatcagcagtaaaaatggtgaaaaattcataaatttcttttttgcaaaaatttattttgtttttcatccgttttcaatcttccattagtccgtttacaaattgtttcttccaattgccaatggtatttatatgaattttcaacatttttccaatttctttgtcactcattttcggcttttctttttttatgtgccaataaattttcattttctccattttttctttctccgttatttttcggctaattccaaattgtttcatccattttttaattatgaaaaggctaaccccgattttcttacaaatttcttcataatttttgttccattcttttcttgaatattttcttttttgcttaaattcattttgcatttcaatgaatttattgataatttcaatcttttcttcttcagtttttgatttgtagcaattcttttgatttaatcccaattctttgatccattcataaatatattggcgatttgtgcccaatttttttgctatttttctttcaatttgactccattcttttgctgaatattttcttcctttttgcttaattttctcttttatttgataaaattttccaattatttctctttttttctgttcttcgtttcttttttcttcccatttttctccaaatatttcgtcaaatgttttttgttccatttttttcttttctgatccaacattattattactaattaagatggtaatcaaaaatgcaaataatgaagaaattaataagcatcctttcatttttatgcaatgacagtctaaatggttttaaaatattttcaaaatttatacaattaaatgaattctttttgaattataataattttatcaaaaaaaaattactcagtttggcagaatttgtttaatatcgaatatatattattgaaataatattaatctataaatttgatgacgttaattagaaaattttcgcctgtttattcattatttcaaaaccaggacactttatgcaaaattcaaaacatttttgatttttagattaattgcttaataaattaaacaaaataatttaaatgtttagatttaaaacatttcatttcttttaatttaatgtaattatttttttataaatatgcaaatgttcaaaaaaccaaaaataaaattcaatttacgacattttatgttcttgttagcttcaaatagttactaacaaataagtgtgggttctctaaaagaagaataattttaaaaattatgaacaaaaatttcaaaaatagtttttccttgcgtttttatattgaaagccttttttaaagcataaaattttaattattaatagggcttccttttttaggcaaatgcctaaaatttttgcgcacttgatacgcatagatgagcacgaaaaacgcgttttccgcttggtttgaggtgtctcgatgacttttataatgcctatttttgcctatttcgggggttttgtgcctaaagtgcctatttaaggattttcgaaaaaatccttaacaaaaatgcaataaaaacgaaaaacacaccccctaagaaatgacccaaaaaaatttcagaaaatacacccttaagaattgaaaaaatttttcaaaaaattgttcacaaaattaaatattttttcttaataaaaattttttggtttaaaaatttgttcatattcgaaaaaaactttaaaatattttataatttcatttacaattgaaatatttaagttttaacgtgttttgttacctaaaaacgttaataaaaaattttatttgcctattttagtgcctatttgaggatttttgtgcctatttaatgcctattttacgatttatttatgcctttttaggtgcctatttcgcaattttttgtgcctaaaaaaggaagccctaattattaat

SEQ ID NO: 9593 - DNA, 1151 bp, Heterodera glycines
aagttgttcagcctcgcagggccggtggaacggccaatgagcaaatttacgactatgatgaaatttctgctacatttaaagtccgctacatgacatcaatggaggcatatttgcgcttgcattcctacaaaatagtgtcgctctctcaccaaatttaccagctttcgatccatgatgagcttggtcaaaccattgtcgttgaagaaggtcacgaagagcaggggcgcaaaaaccttgaggcacatacgcgcttaactgccttcttcgctttgtgtacaactgatccgaatgcatctgagctaacatatagtcgcgttccatatttttatttgtaattttctgttttcttatcaaaattaatttgatttttttagctggaacaaaaaaaaacgttattggcaaaaacggacgcgtccattgtatgagggggaacgagctcgtatgtttgtgcgtgtctacaccgtttctcccaaacggcatgaattgtttgcaataaggtttcaaatccacaaaaactctttgaagattttattgaccacatgcgtccccaccggtcgggagttgatgaagatgaccaagcaagttcccttgaaactcgcaggggcgaagttatgcgcaaccttgagtattattttaattgcatggacacttcatgcaggtggttcttcatagtgcggctttttaaatatattttttcagtcaaatgggcttgcctgggttaccttcagactactcttacactcaacaagcatcttttttgaacgatgcacgcttgcttatggatttttttggtgctgaacaatcaaagcaatggacgcctattcaattagttttgcaacaaatacgcaaacttaattctgaccaacgtgcagcatttgaccgaattattactgcattaaatggcaggggcgaacatcgttgcttttttattgagggagccggaggatgcggtaatttaactctttgttttgtttattttctcattttaggaaaaacttttttatacaatttgtaatccgatggtgcctagcaggaaaacactactggataatataaatgaagaaatatgtcagcagagcaaaatggtggacaatcaaatattttaaagttacgctaaaatttagctacgctgtgggtctgtcatctctgca

SEQ ID NO: 9594 - DNA, 1797 bp, Heterodera glycines
aacatatatcttaaagttttcagtcacaaggccaaacgctgcagaaaatgggtcttgtgctcagtgggaaacaatgcttttctcacggccaagtgtatgtggcgatgtcaagagtgacaagtatggaaggagtccgtatttgctctccacagacatgcaggggcgaaaacaattatatccataacgttgtgttccatgaattactcgatcaaagtttcaatgcgcctagccaacaattttttcatttagacacacatacagcgaccttacaagaaaaattatgtagtgatgaagaatctgatttgccatgttgaataaatattttaaataaacttttggctaacaaaattatttaacatactttaatcatgcatattttttttatttttctcttattttttatttttgttggaaaaagatatggatagcaacgagtttggatgttctttgccaccaccaagtatgttcaaggatatgttcagctcaaaaatttatacttaattcatttaaggtcttagcaagggcgttggagagcctgcaaacccacatgaaaatatcgatgtctctaaaaatgaaaacagagaaaatggcatgaatgctgttaatccatctaaaaattcgattgagagtgttcttgtatatgtgtcggatgaagaatcagaaataagttagcgtatgaatgcgtttaaaattttccgaaaatttttagttcgtgaaaatgagcacacaaatttgcgtaaaatttttttggaaaaacgcaaaaaattttcatgaagaaagagaagctgatcgtcaaaatttattgctcgaattgggaaaagtgacttttgatgctatacagaacatggactatgcaggggcgaaaagtcaactaaaaattgaagcaatacaaggccgactcattccgttgcgcgaaaactatgagaacgagaagaaaaaattggatttctattacacattacaaacaccgtaagatggactcttttcctattgtttataaactttaaaaaaacattttttaggactaaacaccatctgaaagcagcagctattcaaagcggtaataatcattgaagtagtattaattctttattttgtcagccgctgtaacgaccgcaggggcgaacctcagccttgaacagaaaaaagtggaaattgaagtcaatgctgaactgcaaaggaactctaacgaaaccacacgtttctgggctatccaacgaatgcctattcaacaattatgcaaggatttttttgaccgttggacagtgcgtggaaatgctgagcttatgcccttagcaaagcaaatgaacagatccaagcacaaaaacatagttgtttattttacgatttttttcatctcataattgttcaggaggaaattttgcctgaaactcaagcaggggcgtcctctgagaagagagtgcgctcggagtctccgaattctgctaaatcagtttcttcagacaaggaagttggcaaagacaatgacacaccgctgaccgaaatttagttattttggcattattccttttcattatggtttgtgttttttaaagtattagtttatttcctaatttctctttactttaaaaatatatattcattatttataattgttaattgataaaaataaatggcattacagtagtttttgcagcagattagcttactatacacgaaaattataataaaacattgaacatttttcaaattttattatcccttttataacactcgcagaaatattcaatttataaatatttggttttttttggaataaaaaccctctatacctca

SEQ ID NO: 9595 - DNA, 2344 bp, Heterodera glycines
tgcgccaattggacagcgattgcgttttgcacgaccactttttcttcaactgcttagagcactttggcaaactcaacatctttgcaattgttggtggtgcaaatttaatcgacaaagactggcaggggcgttcacaaattgtggaccagtctgcatgtaagttcatcatttgattgcaattaaaactaaattgttaatttttgaattttccatatgctgtcttttatttaaaccctgttttagtgttcaaatgtgccaaaaaaacacagttggaacaccacaccgaccgagttcctgactttactacgctcccagaacatgagcaagggcgtatgcttagccgtgcacaagcgataagcgttattatcaatcttcttaaaggcgcccataccggcttttccatcgacaaatacatacaaagttttttaaatattaattaaataaaattaaataatactatttagccatggacgattatggcttatgggatgtgcagcttcaagcaggggcggaggaggatgctgaggcttttccttttattctttcatatataatttttatttttagtttgaacacgattatccgattccgcctgctcttatgttgcgaattgagcaggagctgcacaaccctggacccgcaaggggttgttaccattgcagttcctttgggcatcgtgctcgagagtgtcccagaagtggatcttggagacaagaccggcaagggcgattggtgcgttttggtggccgtccaaaatgctttgtctgtggaaacaattcgccgaatcatcaaagtcaagattgtcccttcaggcacccccactcatatgatggtaaacttacaggttttaaggttttttaaaaataacaagaatttgtttgagccatcagttcatgtaataattgttgggccagtttgcatggccagcagcaatttcgaagttcatgtcctcgctgcaaacagtcgctgcgctgctggaattgcggacatccaagtcaccgacttaaccaatgtaccgaaccgcgttaccaaccgcccaccaacaatacaactcgtccgcgcgaagagcgcggacgagattgaaggcaggggcgcgaagaaaaagcgactgcgttgacatttaatgtttttgattgttgaaatatgtttgatactttttccataactttttattaacttttacatacaaaagttaacttttatttattgctttgttaaaaattaaacattatgcatttacgattgctatagttacagtatgattattttatttagacaaaatctacataaagaaaagaagctgtaaaaaataaaggaagcaaaattttttatttaaagttcaaaattaaagatatttaatatttttcaaattatttggcgcggagcgccccctagagccagtgttaaatagcgaagctatttcaattttaaacaaataataaaatttgtcactttcagtgcccatagggcactggttatccggactaaaatgattattgacactgtttccttgactccgacaatttctcgatgattgtctaaacaattcttttctaaatcctagtctattgctcttaaggaaattttcaagcatatataaaacattttcgtatatttttgaagcatgttaaaaaaccgttgatatccgaaatattggactcaataagaagaataaatatgagatataaaaaagaaatacctgcatgaaaattatactaaaatatttataatttattatcaggactaaaataattattgacactgtttccttgactccgacaatttctcgatgattgtctaaacaattcttttctaaatcctagtctattggtcttaaggaaattttcaagcatatataaaacattttcgtattttcattaaaattattaatttttaaagtttatgatgttattgcacatgccctacttttaataatgtccatattgagaactccaaaaaacccacgacgctttatataaaaaattgttttttatgactatgaaaatgcgattaattgaatgctttaatatcagcgaaacttttcgcatctttttgaagtgcgttaaaaaaccgctgatatccgaaatattggactaataagaagaataaatatgagatataaaaaagaaatacctgcatgaaaattatactaaaatatttataatttattatcaggactaaaataattattgacactgtttccttgactccgacaatttctcgatgattgtctaaacaattcttttctaaatcctagtctattgctcttaaggaaattttcaagcatatataaaacattttagtatatttttgaagccatgttaaaaaaccgttgatatccgaa

SEQ ID NO: 9596 - DNA, 4222 bp, Heterodera glycines
cgatgaccaacatgaagacaagtccatggacaacaacaacatgggcaccaatgacgaccaccaggcaaagatggactccaacaaccagcgcatcaacttggacgacaagacgaacccgaatccaatacgtcacgaaatcaagaagccaacaaacggatgcaacgacacctcccaacacaattaaatcggcaaaatcagcgaaaagagacttgggaacgaatcgtgacggcgcggacgttttctggtgttccgacagaggcagcacgatctgggagctcaagggccccgagaattcaccattctgtcgtcctccaccatcactcaccgcggaatggcacagtctcgcaattgaactctacgccaaaagcatcaggccagagcagattgattccgcgtggcattgctccgtcaaacgaactacggagaattattataccaatttgttgggcgacaagtttgtgaccatcgtaaaagaattcccaccggtcaacaagcgcatctgcaagcaaatggcactgcaccaggaatgcccatacgccaagtctgaaatgatcaaccacgagggacagctgtggtcaactaatgacgaactgaacgtcaatttcccaggacccatttccggactcttcaagggctaacagacaagcacagctacgaattgttttgtgcaaccagcaaccatattcatcaaacggcagactctacaaatgctttcgccagtccaccaagtccaaaactgtcaatactctgcggaattctgtcagttgccaaacaacacgactctgatatggaaatcaacgtgctctggagatgaatgcaaaatgtgcgactacgatcgagcggaaatcatcagcggaaaatttaccgcagcttatggagaaacagtagccacgtggatatccgacgatcaccagaaggccttgacattcgccaaaaaggctcccgaactcatcgcctgcgacggcgtacgcatcgtcctatctgaacagaactttgggattgccaaagatcaatacgacgacattgtcagtactatgaggagatggaaaagaggaattcggcccgagcaactcgcatcacaactttcggcttctcaagtagcgacaagcgtggctttgaatcagctctacataagagaatgccaacgaaacacgagagccgcgaacccaacgctacaagccaggaaactgttacggcaagcaaacatccaagctcgttggatcggcgagacgacaatggaagtgtttccatgtgtcaacatttcgctacaggacatctcatacaggccaatgaatgactgtcgcctctacattcccgtgactgcgcactttcccgaccgagctatcgcagctttcctggatccggaagttcgcatcatctcgctgacagcacaacaggcaagctgtaatagctaccggatcaatcatcttcaactgcgaagcaatcccaacatctggttacggatcgactctcgaaccggcacagcacgacgattgccaaaagattacgtgcacgaattgtacgaaacaacgatcaaccaaacaaacagcaacttggaacttcatccgttgatcttccacgcatggcaactcgacaatgagtctgacgcgacacgcttcccgcacatcaacgaattcatcaactcggagcagttcaaggacaagctggaacagcacattacagcaaggactgaagctttgggcgcgttgaagggcggaatagaaggattcaccatgcgctggctaaaaggcctgatcgacgaagcaatcacgtggtggattcgagtcgcctgcgtttattcaaccttcctcatgctgcgcgacattgttctcccatgcactctggcgtatttgctcaatcccatccgagtgactcttctcagcctcgttggagtacgcccgcacccgacattccgacccaccgtttctaaaccactcgggatcgaagagggaatgccgctgcgtgaactgccacgaacccccaaaccaccagcgcgcagggcagagcaccgatccatgtcaccaatcaaattggacatgattgccagaacggctcggtaccaacaaccacgaacacagagccatctcgaccccacagaagactcgccctttgggaggccgagacgaaaagaattctgacgggccccatcctttttcgcgccggaatgtcggaatttttattcctatcgccgatcaatgatcggcggaattaagagggaggaggcccttcaccaatcccccgcccgccgcgcaacatgttttcgccgtttcatccctctgtcccccttttccttcaaattgtcaattgtttttgtgtgttcctcccccgccctgcgcacaaattaatgaccaatttgtcaaaccgcaacttttctgcccccgtccccaatttggcgaatcgactccaaagaacgatgaacctcccaaatttcccgttttccgcccattttgttcattcgttcatttttgtcccccgtttttcattttgtgcccaaattttcggcccattttgttctgctcacatttgccactttttatctaattttattgttatttaagcggccaaaaatgcccccaatttcacaaccaaatttcatttggcaatttttgccgtttctctccccgcccctccatttgcctttaactgtgatggccccccaattgtgatcattctttaaccccccggttattgatttttgttctgtggccccagtgccctccatttcctgtcccatcccggtgcccaattccatttgtgataattccccggtgatggcatttctgtaatcaatttgtgataattcgttcaccatttcaaaattttggtttaattacccaagtttgaggtcatttcccggaataaattttttattaattctgtgtctcgtccctgcctaccccgaccccagtgcccgacctttggccccgaacgcaatcgggacaggcccgttaattgccggcccaaaaaatttcaaagaatttttttgaaacctatccgtttgagttaaccttattaactatattcgggttttgtttcattatggttgaaaatttggttccatgtataaaagacccttatgaggttttttcattcagtgaaaatccaaaacaaaatccaattggattaatcgagaatttcagtttaattcaataaactaagccagaagggataacaaaaaatgatatgtcttttgttcactgtcaatggcaaaaattgatggaatattggaaaaaattttaaaattaaaggaaatacttgcacacaaattaatatataaaaaataaaataaattatcaaaataattaggagtcataataaaataaaatttaattaggcccgttaattgccggcccaaaaaatttcaaagaatttttttgaaacctatccgtttgagttaaccttattaactatattcgggttttgcttcattatggttgaaaatttggttccatgtataaaagacccttatgaggttttttcattcagtgaaaatccaaaacaaaatccaattggattaatcgagaatttcagtttaattcaataaactaagccagaagggataacaaaaaatgatatgtcttttgttcactgtcaatggcaaaaattgatggaatattggaaaaaattttaaaattaaaggaaatacttgcacacaaattaatatataaaaaataaaataaattatcaaaataattaggagtcataataaaataaaatttaattaggcccgttaattgccggcccaaaaaatttcaaagaatttttttgaaacctatccgtttgagttaaccttattaactatattcgggttttgcttcattatggttgaaaatttggttccatgtataaaagacccttatgaggttttttcattcagtgaaaatccaaaacaaaatccaattggattaatcgagaatttcagtttaattcaataaactaagccagaagggataacaaaaaatgatatgtcttttgttcactgtcaatggcaaaaattgatggaatattggaaaaaattttaaaattaaaggaaatacttgcacacaaattaatatataaaaaataaaataaattatcaaaataattaggagtcataataaaataaaatttaattaggcccgttaattgccggcccaaaaaatttcaaagaatttttttgaaacctatccgtttgagttaacggggattaactatattcggggtttgcttcattatggtgaaa

SEQ ID NO: 9597 - DNA, 4018 bp, Heterodera glycines
atatgttgaaggggatcctcgaatcccgttatttctggttggcatcaaaaattgggcaaaaaccagaaacattttgaatggttccggttatttaaacacattcggttggtctctcatggctatgcattattttgagggaagaattaaagcaaatgggttgaaaaacaaagatatgaaaagccttctcataggtttctttgagttttttaattgtttcccattccgtactcatgtgatttctgaaagaggagaatgggaagagagaagacaccataaggaatttccggaagatagacaatctattttcattgaaaatccatacaataaaaggaatgtagcgagtagcgtgcgagaagatgggtttaaaaagatatgtgaggagtttgaaatgacagctaatgaattcggcttaccattagtcagggaagtcaatgtccttgaagaattaggaattgatctggaaaaggaatgggtagagaaaacgtcagtctcatctgatgagaaaagtgaaatgttagaaagggctaaccaaagtcgagagactgaagagctcagtgacgaaatggtcaaattgaaagtcatcttaaatgagcccgtgtctcaacacgagcaaggtaagagaattgaaaaccctgagtctaaacaccacaaacgcatattttggaaccaaagtctccacaattttttatagtttttattttgtccatgataagtacaacaattccaaatccaatgctttgtcatcatagggcacagaaaaattatgtgagaatagatagagacacaacccaatgcaaactaattgccaatttgtttgacgaacctcaacgggaattggaagttgacatttatcaacccaattccgaaccattcacatttaaggcacatcgatgtctaaaggtcaaacaaagtcaaaaattttggaccaatttactaaacgataagttcagtgacccggtcagtgtttctaccctcccaatgacaattgaagattgtcaagaaatgatcaattatgaaaagtgtgaattcggacctctcagtggtcatttaaattagcaatttcatacaaaccaagaattgcaaatagcctattcttggtggaaattcggaaaagacaaatccgaagaaataactgttatcatgcggtaataaccttaataggaaaaccgggatccgaaagtttgggctcacccacagaggaagtgagcaaatgtaagttttcaaaaggttcatgtcgactgggggataatgcgattctaatttggaacctcgattccacggagcatcaaagcgcgtgtctttacaataaagtaacaacagaaaatgggaaattcaccaagagaatgtggatatcaaaaaattcacagttcgctatatcattccaagagaatgctaagagtgtagaatcatgcggtcacacgcttaaattaagcgatcaaggttttgcagtcccctcgtggcaatttaggataattacgggtaagacaacccataggatcaaaagagagcaatggtggccaaaggaaaaaccattagaccagaacgagaaaagctcaacagcagctgcacaattgacagcgagagctatttaccaaaataaagaaacaaaggaattatttcaaaaaatggtgaatctaatttgtggtattttgcaaaatgccaatccaaagcaagatctgagtcacttaaacccaacgcaattaatgcgagaaaagacgggtactgaattggtaaaggcaaaatggatttccccaaatgtacttgaatggtggccgtgctcttaaatgttcattcgaaggactaattaaaagcattagcagaaaaacaacaagcattttcattttagctttagatgtaaaagcatagggatttcaacggaaggacaaaaaatccaaaagaaaccttaatatgacccgaaaattgaaaagtctaaatggagaaaacccaaactgtcgtaaaagtgacaggaaaagaaatttgatcaattttttgaaaatttggaaaagaaagaataaatgaatgagtgggtgagtgacaaacgccactttttttggtccttttaatatctatgacaaatttaataattcattattttttcgctcaaaaacgtgaccggggtagggagtcacggctaaatcccggcggggctccggtccagtccgggctctattgcttatcaatgtttatcggcggcggcgacacgcggggtagcggggaaaggctgacaaattatttggatttcctactttatcactgatttgtgagttgcaaaacgactcggcaaaacgtttcgagggacagaaattaagttgccaggctcaggttccataattctatgaaattgcgtttgatcgaagaaatgatcagtttcttggctctttcttcacaagaactctcgacggatgccaaatggcaactgttggcaaaagattggctcaacaggaaaaggcatcttatcgaagtatcggagtcaaaaagaaatcatattcagataaagcgatattccgtatcaatcaatcatgcctatcaaatgcaattttcattgaattttctcaatggccttagtgaatatacaacatattgatcatttcaaatcattagctgattttcgatataataataatccaaatttatattttattcagtgtgcccaattttccgtgagtccgcaaaataggtatagttttctcggcgaataaattgcgatttttcgtcatttttgcaatttaattttaataattaaaattttgtttgtattaatatttatttttcatattatttatcattatttagtcactctcttaaagagctttgttcgtttgggcttttctgtgccctttacaaatgtgttaaaatttaaaattagataaagtcaaagtcagttactacaaattcatatgttttggcaatggattcaacaaatgttgatgaaaatttgattagcttttttaaattcattgccttgattctgtcctggctgatgaatttcactattttattttatttgattattttcaaaaagttggaagaattgaagaaatctgggccattgatagcgaaatatatattactttcgtgatctgctaccttgaaaatcgcgaattttaaaatctgaaaaagtctaagatgattatttaatctattgaaaaccattttaatttgaactttcccatcaatttttatattgaaaaacttttgtttttcaaattttgaattaagcaatattttttaattttgtgtctctcataattcttacagatcgcaacttcttttcaaatccttctcgatagttagtccaatctttgcattgccaaattacaggcgcctgattaattaatttgcacttttaatgacaagtaattaactaattgccgagaaggtgttttgacgtgctgacaaaatgcaaaagattcgctgaaaaatgaataaagcatgggtgacgggaccacacaaaaatgtttcatattttttttacaggttttagcgtattgttccccgccaataacctacttcatatataaaaattagataatacttaatgtttttttatttgggtttctttaatttaatatttattaaattattttacatttaataaaaaattaataaattataatttaaactcaattgacaaaatatcaataatttcaaaatttaataatttattttctacaaatatgcttatttaattaagatgatatataataaatgaaaaaaatatttaaaattatttatccaaaatccaaagctcaccgatcgcaaaattgccgaaattttaaaaatctcaaaaggatcattagagaaatacaaatctgaattaaaagaatatgtggagatcttctgaagacggggaagatcgtctataaaaataaccaatttgttgctatgaaaatattacaacggaaaagtataatgaaaaaacaaattttgttttattgaatttgtatttttaattttttttctctataaataaaaatttcattttcaatacatttacaaattagagttttcaggtgat

SEQ ID NO: 9598 - DNA, 5682 bp, Heterodera glycines
tcgttgtctgtggagctgtccacccgtcggttcatctgctactcattcgccgatgggccaaagttttgctgccaaagggaaatgggagagcgtattaattaagccagaaaggaacaactaattaattcattaatgtgatcataattaagagaaaacgaaattcattatggctttcgacacatttttaaacaatttttttgactgaacgaccgaatttagcataaaatgtttacaatttcaaattcataaattgggaacaagaaaatgaaagttgaatgcctaaaaagcagttagaaaacggaaacccaattcggggggccaatcgaaaaatctgtaccatccctactgagcaccgattgatgaaaaaacattatcgaaccacgctcaaaacgtaccaatctcgcatttgttggcacggtttgtggtggcaaatcgggcagaacggcacgtggcggcgccgccggaggggtgacgacgggtgccggcggtcgctgcggaatcggtgtcgttgtcaccgttgttgtcgtggtcgttgttgttgtcgtactgcgccaaggctgcaaccccttggcacgttgcatcacggcatcaattacgacctgcaaaatttaatttatattttttattggtttaatttgtgtggcgacctttacgccctcccacgtctcgcggccggtcgggatcagctggcgccggtccaacagaaaaccgtcctaaattcaaaaccgagttaaattgtaagtcgagatacatgaattatttcaattacttgtagtaattctgggttcttgggtgtgagacttagtttttgttgaaaataatagccaataggtttgagacaacaatttcgctaatgagaaattggccccataattagtgcaaaattactcggtttaaaaaaaaattaaaatccgaatgaaaaatgcgaatttcaaaatatcagtacaaccatggtccactcctcacccattcctcctctcccggcctcagttccaacagataaacgtatttgacgccagctttggattttgcccaatcatccgaactgaaaaatcagtgcaattagaggatgtaagcataatttaaattcacatcacagagatatgatgtggtttcttgcaaaaactaggacactttatcccgccctgacagctctattcattattatattagcacttgccctccggcggacgggtacagtatgtcggcgccggtaccaaaacggtagcgagtaccgtacaattgttcaagcgcacggacgccacgtcggccaacttcttgctaaaatgtaaatttatacaataaagaaaataaaattggaatataattaatcgattaatgggatttaatgacattcaaatttaaagaatatatttttatgcatttttgtttttttaattttagtagaatttttaaaatttctcccactgaccaaatcttcaatgtcatttgggaatgatttgcgttcatggttgtagggatggatccttaaagagacaaatgaatgaacaaattgaataaaaaaatttaaaaaatcagttttaaatctttaaattaattaacattttaaacattctaaaaatgatcaattctattaaataaattaaaaaaacaaaatatcgcagcaaattaaaccctgttttttaaataattttaattaaatgatgacttatgaaaccattaaaagaatattttgataaaaaaaaaaaccccaaaaatttggggaaaaattgaaaaaaaactcaccacatctgtgagtatgtgtgcagtgtgaggaacgcgtcaactttgccgtacaattccgatgacatcattttgtcgcgaattgcgcgcgactcgggctcactgaaggcgtaggcactgaaatttcagggatttgaaaaaaattgtaaattaaattaaaattctgccacaacgaacccttggtaaatgtcggagcacatgtcagaactggagccagtctctgcaaataaatgggataatgagtgaaaatggactaaaaattaaaggctgccgaacccgccaaggctttcttggaaaaatgacagggtttctacccgaatcccgagcctagtcccgacaaattctcccgaatcctggtcccgatattcttctagtgaaaaactggtcaaagtgagcctgtttttgaaatactgaggcaatgatccagataaaaaaggatttaatttctaagaatcctctcaagttccgttgtttttactcagtaggatcaccggtatgggcaattaaaatttcaattttctcaggccacgcctagcgcaccacttgtcactaatttcttttcatttttccaaagtttcccaaaaaatcctcaaacggcaaaattgaaaaactcaacaactaaggagaccgagagtctcgagcagtcctaacaaccatcaccccccgtgccatgccattccgtacctccccagtggaagtcgaagttcctattgaggtccaccccgccgcagcatcgttcccgtctccagcggtccttcttgcacacttgctggcctcggttcttgcgccaaaagcgcgtctgcgggttgacgtcagagcgcgagtatctgtgacaattaattaattaattagtcaatcaagtggaaatgattgctgatcagtgatcacacaactttgccctaatcgatgttccaacatttaaatttaattactgatcaagttatgtttgtcaataatccaatcgtttctttcatttgaaaatgttggcactcactcaaatccgtccgggttggccaacggcaaaacgtaaaagttcaacgtgtccatgtaagctgtgacttgcgggtccactccatacagtgagatcagctacaaaagtgtacacaaataatcacaagagatttaataatcaatcacctgatcgatgaaccaaagtgccgtgtgaattgaagcccactgaaaggcgggggattaagcgactggcacgggataaagtcataatttactaaatcccttttatcacccaagaactggtcgaatgccatttaaacaatttagaagatcagttttttaaggattttggaaataagttttaatttccaaaatatgaaatttgttccaaagaaaattgtgaaaatccataaattcggcatttttttaaaattcctatttggaaatatcttccaagaattcaaaaattttcaatttttggtcaatgtcagggaggctctattcccatagatgtcgcctatttttttgaatgcgcccaaaaagccacaaaaaatgccaacgattgacaacaatgaccaacctctctggcatgcattcctgaaattaattaaaattaatgaccgtttttccaaaaatcccgcctcctctccctcccattacctccgtcaatccaaacaatgcgcttgtttgtgtccgaaactgggctcccaatctgtgagcggagggaaaagccgttaatttggtttaaattaattttgctttcatttttaaaagggatggaggagggaggagagccatggtctatcaactggtcaatttgaggctaatcttcttatcttggtgagataattggtctcagcagcaatctcagaaatagaaaaatgtcactcaatgttttcaaaaaaattcgctttaaattttaatccgaaattttctgttttgacaaacccttcggattttcgcggcttttccccgacttaaattgtttaattttcccaatgttgttttcccctaatttgctgttttttacatatgcccgttgtgccgggttgagtaatttctcgaatattttcccgattttctttgtcatgccgctcttttgactcggcttgcctttatgccgcggatggaccggccctcgtatgtggtgccaattgtgaaggtttttgccagttgcggataaaagcgctcaatgtcatccatccaagtgagcatttcgatgtacgaatggtaatcgcctattttgtgaggacacacaaaattatacggctgtccaaaatcaaattagaggctctattgcagttttgacgcaattaaattttaaatattctcataaattttcccaaaaaataaaaatgataactttaaatggccagcaaaatatcgacattttctgatcagtattttttctcaaatcgtcttctgatcaaagttgacgatttaattcttttattcttctatatctgatcaatgacatggaaaaatcagtaccagctggtcatttacatattttgacattgatcatttggtgtggactgatcactatcaaattatattggggctattttatatcgtcattgacggcagggcttttgaatcgctaatattgcacccaccgaatccgtaaacggctttattcctcgatacaaaggatggcgacgcatcgtcacgcatccgtttgccgaacagcttgaactggctgagcagcaacgactcgctgaggttgcccttgtggtgatggtgccgtccgccggttgccttttcccgttgaacaatcatactgtaaacagtcatactgtaatcttgtttacttctagagatatcggcacacatcttttcatttatttgaaaaaccagcgaaatttttttaaattttcattttctgcaattgcgcatttaatcctcctctcccattcatcagttgatcccaatttttgcttatgccatccgttcaacaggttttggttaattgaccgtgactaattaattagataattgtctctcctaaatagccactcttcactggggcacataaaaaatagctcacggagagttccctttgaattgatggcagtttatcatttatcatcaattaaccgcattaataataatttttgtcgtcattcatttattaaaacttccatcccattaatttgcccttaggcaattaaaaagtaattaaaaaccgcgtagcgacaataaaaaatggcgtgaatttctcaatcagctgtttttcccctcgatgaaaatttttttattgtttttggtaagttactgttaatgaattttcaaatctatgtcattaccgtgttctattttctggaatatagtaaataatttaagatttttggaatactgtaaccagtcataaatacaatatttcggcattattatgtatttggccacccttgggaatacagtaacaagacagcactatttctgtaacccaatccctttttgtcccacctttgtacgtcctcaatgattgtgttgtattgaatccgctgtttgtccaacaattcgctcaacgagctgacaaactccggcgccaccatcacgtcgacaaatgaaccgacatttgtcggcgctttccaaaagtcgagctgaagtgccatttaacgccaaaatttaaatggaatatggaattggggcagttgtgccgttgaaattagggcttaaaatgccatttccgactccactgacaatgcttttggcattttcattgcgtttgggagtttctcccaagatttttggtgtttaattttcccaacctcaaactcttgtgcaactttgtacaatgttctcagcaatgtcaactcgtccgccgtggagggcactatccgcaacacttggaatttgctgaaaaaggacagtgggaaataatgatggcctaattgataagcaggatatgtttaatagatagcatgcaaagggctaactgatcaaaattcaatttgccgatttccgaaatgattattatgggacaat

SEQ ID NO: 9599 - DNA, 3921 bp, Heterodera glycines
attgcaattaattggactttttctacgaattggccgaactattaataagcgatttaacgaatgaagggatattttcggttgggtgggtccgttcatttgaattgaattcaaaaataataattggaatattttgccattttcattttcattttcattttcattttcattgacattttattttattttattttgaatggttttcctttgccctcactcccgtccaattcgctttttgtccattggcggtaattccaatacaattcaaatgttttcttctgctccttctttctgttagtacaccgtgcactatcacccgccgaccgaccaattattaattacgcccggggggagagggaggaggaggcgaattgccgtaaaattgggagaggaaattggcggcactaatctgacagaaagagataatgggcaagagtgagtggattaaaagtgaatgaattggcgggagacacttttaattgggaaacgtgccgaaaatacgagggggagggcagaattaatttcagattctcagaagcatcgcttaaatcgagtgaacatgggcgagaacagcaaaataacaccaaacaaaaacaaattaaatgaatttttttccgccaaagaattgaaaaagaaatgccattgttttggaatgccattgaaaattgccatgccattgtgattcgcgtttggcattgccatcggctattttcttccctcgaaaagggcactcccttctcgaaatgtactcgtaatgcttggttaatcactctcgactacttctcgaaaccaatccccgcataattgcccttttccgcccaatcatccaattttgtctgtgagttgccctgtggaataattgccgagaattgactgaatggccgaatgctttcgcatgagactgtccctccctaattgcggacttagccggaaacgtggccacattcaagcggacaaacaaaactcattgggccaaggaatcgtcgaagggaaagagaaatgggcatatttagggaggtgagggtgggaatgggcagggaatgccgtggcattggcagccgaaggagcggacggccgactccgccaaaatgcgcgatccctttgaacaaaccgcgcaaatataggaaagaaaccccaccagcagcagagcaaagggagagattagcagctaacacacggacaaatccccaccttcgcattgacacttaaagaaattccaaaacagccaatatccgtcccaccctcacattggactaattgggcggaagaattatcggatttggacgtgtgggtggagaggggaggcaaaggggcgggggaggaaaagcgggggaatggcaatgccaaagcgtatcatcgcattcgcgggggatggcattacaaatgccaaaagaggaagtcgaatgggagtggatttgttgtcggatttgatgccgcgcggtttatcggatcagagacattccgccgccccttctgactccttccaattcgataaggtaaaatgataatcaaaacaattttcaaccaagtaaaaatatttatttgcgtccttccatttttctttccttccgttttccattggaaatccaatttcggtggcttaatgaagcgaatcgaattaatttttgtggtgaattaaaaagagcggtaaattacacaaaaaaacacacaaattggactttgttgtgccccgcggggaagcaaagagagaaacaatctgagaaaaggaaaggatctctgcacattcagccgaaagtcagtcggtggcggagacgacgacaatcagcaaaattaggagggaaatcattgctttgtgataagggaaagggacgagggaattcatgccaatttcagcggaattttatgagtgagggaaaaaggggggagggggaaagggggagaaaagggaattgtgtcctttgtcccttttgaaggtgggacaaatgccaaaaaacggacaaaacaaatgcggaaaaactgggaaagacattcattcattcatgtgctgacggttttgctgataaagcccaaatggcaaagtgacaaaacggcaattggggccaaaatccgttgggctgaacctgtttatggccaaaggaatgcgggtttggcacggcacacaaaaacacaataatcgccccgggcggataaaaaggacatgctgagcccagtcggatgagattcagctgcaatcctcttacaactcctttcattcccatccgctaatccttttttctgattatcaaataattaaattcccccccccctctctttagcacactttcggcttccctccccgtgccaatcatcgataagctaatgccccccccccaatttggtggcttaattcctttgcttccctttgtcgttcattattttattattacccccgcaggacactaattaaaatttaaatgaacacaaaaatacgagaaaaagggaaataaatataatcggtccgttttatattcacagaaatgaaccccttcttaaggggccgagagggaggggaataaatgaaaaggggaggagagagaaaagagagaggaatatgaagagagaggggagagagagagagagagactggggagagagagagggagagaggggagcgatgtaaaaggggtggggttgcgaacttttgagcacatccaaataatgtatttattgtaaatggttgggatggcctgagggtgatttggggggggagtcattcgagaagaatgggacattttggggagttaattggaaatgcgaaagggagaacatgcacttaacttacttcgatgaaactctccccccccccccctccgatcactttttcgttctttcctcccttttcctctgatctgttgccttgctggaggcgttttgtgtttttttgtttctctccaatttttacgcattctttcccgtctttagctgtttttgttttgtaaagggaccttctgggaattgtgggtagaaaaatttaaaaagggagggagagaatgaagaatcggggaaatggcgagtaaattttggagaaattatttaatgaacggagggacaccaaattagtcgctgaacggatcagcagatcaaattttggaaaagttggggaaggagccccaattaaatacaaaattcataatattgagggacggccttgaacaatggagaagaaaaaagggaggatattgctaaaatagggagggaaaaagggggagggacggcatgattttatcggttctgccaattccgtctgccaattgctcattcattctttaataaattgatattcaaatttggattaaggacagtgaaagccgagaagaagtcggaaaaggcacaaaattcgggaaaatgccaaaatcagaaaagtgaattgaatttagcaaattgtttgggaggaacattaagcatccgtccatcatccatcgttgctctgcattttgtaatcaaaatggtcaattttgtccctcccctcctctgtccatgatgatcattccctcccccccccccctccccctcattttttgcttttcctcaattgcccgtcttcttccatttttgcctccattttatggccctcacctcccacgaagagcctgcccagatttggcaatgatcattttcattttcattgagttgaggtggcgggggaggaagctgaatttggaattcagaaaacggacctcgacagaattttgaaaaaaaacatttttttgccattttatgtgagggcatttcggcgtttggttgggggactttttctgaattcgtcacccaaccaaagccataatatgcaaatggttaataacccagaagaagagactgacatggccaaaaagcgtgggaatggctaaaaaatggaggaaatggaagagggggaaagggaggggaggggaatggcccctgggggaaggatttgtggaggggggg

SEQ ID NO: 9600 - DNA, 2001 bp, Heterodera glycines
  unsure (1)..(2001): unsure at all n locations
gaggctgatcagcaacaacccgagggcatttcgacaaaatcctccccgaaattccgtcccaatgggcgtaatagtgaaatttgaaacgggacgaaagtgatctctcgcctgctcaaagcaaaaattgtccaacatttgtgccctggccaaataaatggacactttcgggcggtggcaactgacggatggcaacaaaaggccaaactcggcaaaatcagatattttatactctcgaccttacgccaacaccgaatggtacaagaacaacacgaaagtgagtttaaaggggagatcgactcggatcagttgatcagcttcaaaagggtggccaaatggcacgaggcaaggcgaatgggacagacggagggagagcattggagggagaggaggacgaggtcgcagagggagggcaccgcgagacggacagacgacggcacacagcgcacctgagaaaggcattttgacagaaaagaaaggggaaagggagacgaagggccaaattggccatttgacagcttaagtgaatgacaagaaagcttaaggctgatgacaactgatcagggtccaacagggctgtgattctgtaagggtttatcctcaccttggggctttcgaggggcaatgaacactttttaatgcggatttgttggtattaatgagaataataacttaaaacgaacggagtttaatttcttaaattttaattaagccaaaaattattataaactgacaaaagatttaattttttaaataaagtatgaaatgttattaagtattttggattttttgtgacaaatgagatttttaaagctcatatgatgtnggaatttccaaaatttaaagaccgcaaaacggaggctatcctccccctgttccccccaccccaccgtcttttctgctttgatcagatgggctaccgtacctctctgatcagctttgggccgtctaataagtcagttcttgtcatcgcgactgccatcactcctccatccgtgctgagcattgtctccacactttccttcttctcttccccctcatccgcttgctcccaatccgtcaaaggctcatgccaactcaaatcgaaagtgtccaaacggcacaatgaccagcgaaaagtgccaaaaaaaacagatcggaacaaagccatagcgaaacgaccgccggaatgggaaaaatgccgaagagagccggcggggaaggaatgagagggcaattggaagtgatttgcaggggacgaacggatgggcaaaatgcggaagggaagcgaagcggagagagggcacactctgagaaaaagtgaaataaaacggatcagcacagaggtagagaagagactgatcagaaagaaaaacggaccaatgaaggacacattattaatgagagagaaggagagagagactgaagagagaagagagagagtgagaagagagagagaaagaaagaaagacagacagaaagagaaaaaaacattaatcgctgatcaaaaacttacgggatagcaaaaaattgcccgttctggggattttgagcagcgaagaataatttttcggcttgtccgcttggctcaatgtccgttccgccgttggcaatgggacggccgaggaaaaagagggaattgagagaattcgggagcaaagaggtggagaagccgcgcagggacacttccgaaggccaatcggcacaattggggagtcgcgggacgaaaagaatggtcggaaaagctgaagagagagagagaggggaaattgaaatgagagggggatttgggggattaaaaaaatgagaagatttatttgtaattcggtggcatacatccgtcttctgttgtgtcttctccgacaatggcacaacgaacggagcccaacaccacgcgcagaatgcgcgagatgcttcccgtgccatactgacgatgggtgggacccgcccaaagtgccgtccttcgcgaatggtcaatctgaagggcaaacaaacgaaggcaatgagcggacaaaacacagatta

SEQ ID NO: 9601 - DNA, 3017 bp, Heterodera glycines
  unsure (1)..(3017): unsure at all n locations
tttttcgaatttatgttaaaaaatacccagnccatgatgaccgggatcacggatttcatgatcaatttggggcgcatcaccccccatggaacaaatgccgaccgccgactttgcggtgccataagccgcgccgaacacggtgaaaatttgcgttgatgcagcaccaatgtagccaaagaatggcgcataagctttcagcgttctcgaggtcatacgacattttctgcttgaagtgatttatagaatttgaaacaacaacgaaaacgcaccaggctgaaaatttgggaaatggctttaaaattaatggacggatgaaaaaacaggggatatattaaatgaaatggtattttaaatagcttaattgataaatggatagaaaatcgaactactactatgtttcgagtgattcggaaattactagcaaaaagaatgttttgtaaggcctgacacattagaggaccaaatgaggaccgattttaaacattgaaatttttagacaaataaatttcagtgaactgtgaatgatacgcagaaacagaaaggctttaccgcacgacgcgggcgccgctgccaccacaaaataatgttaactcacactgttcaactactgctattttctgtttctatttgcctttcagcagtgccgaaatttgaggagaaaattgagagaaggaaagaacggggaaatatctaatcattgggaatcgattttggagtcataaaattaatttcggatttattcgcagcagcaacaacaactatgaacgatcgcaaatgcatcacaaaaacatcattaaatgcatacatatcatgaaaaattcaactccctatttctcaacattttttttggaaaccttttccggtttctccttcttttcgtccgctttcttgtccttcttttcgtccactttcttgtccttcgttttgtccgctttcttgtccttcttttcgtccgctttcttgtccttcttttcgttcgccttttctttggtcgtttccgccacggccacgcctttaaaaagggagaaacctttaatttgtaaaataaaactcaaaagcttttgccaatatccataatggcttttttgtccgaaccccgcccctgcttccttaccagtggtgccgagctgcacctgcgcaacgttctcgttgccgccgtacacagtcagcgtgttgtcgacgggctgcgcctgcacaacgttctcgtcgccgccgtacacagtcagcgtgttgtcgacgggctgcgcctgcgcaacgttctcgtcgccgccgtacacagtcagcgtgttgtcgacgggctgcgcctgcgcaacgttctcgttgccgccgtacacagtcagcgtgttgtcgacgggctgcgcctgcgcaacgttctcgtcgccgccgtacacagtcagcgtgtcgtcgaagggctgcgcatccgcaacgttctcgtcgccgggcggtgtgtcttgtgacgccattttttcagaaaataaagaatttattttagaatttctaaaaaaggattagttagctgcttcggaaaacgggaatattgctgtttacaattttaacaaataaggtccttttacaagattgacaaaaaagggtgacaatttgtacggatgtgtaatgtgtatttagtcagggttgcataatgaattttgttgcgtgtccaatcatgaccatacatagtttcttaggccataacttttttcttacttggtcccgacctaaattttttagtatcaatcggaagcttgaaaggtacagaagtttttgtgtaactaaactatgctcaagaaaagaaataaaaaaattgttactgaaaatacggaaatttcgtttctcatcaacgcatcatttataaattcagagactaagattttgtttgatagctggaatatatgcaatgaccaagtacggaaaaagttaaggcctaagaaagggaggataatcatcgttcggtaaaagattttcgtttcaaaaagcaccgccgttgaaatttttaaaattttctaatactagaaattccttaaaaatcgctcgaagaacatttccagaaaatagagaaattacaaatccaaataattgatgaaaaagacgaatgaactcaacaacatcctcgtaagtgacgaacgaaaaatggaaaaagtattgaaaatggacccttaaatagctcgttcatcgtcgcccaaaaatgagatatggacgaataatggagatgcgaatttagatgaccgattatggcaaaaatgacttgtgatttttatatttagaatggtaggtattatgtatgtattgcacctatctttcttcaaaaatgaaattatttgggaaaatgatcagtagggctgtgaattttaggttttaactaaattttttgctcgattgatttgaagaaaggagctcaaaaaacagcattaaaaattttcgattctgatgtcactatcggtcactagaaatcactattttggggttttgtcactaaaatagttaaaaatcactattttggggttttgtcactattttttcactatttcgacattttttggaaaattccttaacaaaaatgcaataaaaccaaaaaatacacccctaagaatcgacctcactatttcgacattttttggaaaattccttaacaaaaatgcaataaaaccaaaaaatacacccctaagaatcgaccttaaaaaattttcaaaaaaatacacccctaagaatcgagctaaaatttttcaaaatatactcctatgaaatgaaaaaaaattttctccaaaatttactttcttggcaaaaatttttaattctaaaaatttttttaggtaactattttgggttttttggtcttaaaaatcgcagtcctactcatttgcaactgcaatcagtgaataaaaattatttttgctcaatttttggctgaaaatttgcactattcgtcactctatttcttcactattttggcatttttactcactattttagttaactattttgggatttttcgtcactaaaattcacagccctaatgatca

SEQ ID NO: 9602 - DNA, 2727 bp, Heterodera glycines
ccgagttccgacatttttggggtcggaattccgatttccgaaaatttttggggcctcggaattccatccctggcaccaactacactattaccaatttttgaattactgtttcctcggatgtccattatcccatcccctgttcttcacgtgtacccgagtatataaagtcgaccaaatcccctcagcccattcaattacatcaactgaaaggagcagacagtgttttgttcaaatttccgaagaaggaattgatggcaatacatggcgatacgacgaatttcattaaatccgcctgacacgctacatgacttcaattgaggtatttatgtcacttggggtgtaccgctgtacagcagggatggcattccgaggccccaaaactttttggaactcggaattccgggggtccaaaatttttcggaaatcggaattccgaggcccacaaatttttcggaagtcggaaatcggaattccgaccccaaaaacgtcggaaatcggaattcggaagtcggaaatttttcaaaaaacataaaacataataaaaattttctaaatattttaataggctaaattttaaattcttaaccaagtaaaaggtgactcaaaaaattttttggatctatttaaaagcatattttcatggtcaaatgtttatctacaccccaaaaaaatcaatattttgtaggcccaaaattctgaaaaaattcctgctaagctaacttttgatgatgatcaaaaaagtgttttacaccaatttgatcagatcactccttcatggtgatctgaaacctcaaaaatggcaaaaattccttcgaattcatgattagcagaccgtaagggatcgattggtatctatttggtcgcaattccatgcgtttttggctttggacggttcagtcccaaagccatttggccatttcagtcccgggtctgtaacgacaaagggtaaccctggattatgtgcattaaatagaattgttttgaattttatattaatacatgtaggtatgcaaataatgttttttggaaaatatcggtcatatggcccgaagcccaaatggccgaaaaaatgagcaagggctcatataatgcatgtgacgcggaaactgtttttggacgtgaaaatgtatgtgataggacgcgcttaaaaccgacaagaaccgcctttatttcttccatattcaatgccgaccgtgatggcatgagattgaattttgaggatttgaagccctacaaccaggaaaaaaccgtggaggaagtgttggaccgtttggacgtggaagtgtgcccgcaaatggtctacaggatgggcaggagtagtgacgaaaagaggaaggggccgcgcttggtgaaggtggtcctgccggcgtccaccttccaacgcttcgcgctgatgcagtgggggcgtcgtcggacggagctgaagaagagggctggttgggagcgtcttctggtcaggtcatccctgacgaaggaggagctggaaattgaacgtgaacagcgccaaaagaagtggatggaatttggacagaagaaaacggatgaaaacatcacgacgcgacgcggaggcaatgaaaaaaacttttgaggtcacctccttttttaaattgtttatattttaatgcacgaagtttggcgaacaaattggacaagttaaggtttttgttattagaaaataggtttaaaatcattgctgtatctgagagttggttgagtaacaaaatagaaaacccccaaattttggaaaatctccactattctataataagatcagatcgacttaacaaaaaaggtggcggtgttgctttcataatatcgaatttaattccttttgaaattatcaaaactgcaaaaaacaaaaattccgatattctttgtgttgacctattctcacctcttaaccacacaaaaacacgttttattttgatttatagacccacttcacatgaaaaacaagaagatgtcgaaaaattggtcgaacaactctctggtttaatctcggcttccgaaaaatgcattttgttgggtgatttcaattttcctcttttaaaagcaaaagactttagcatccaaaatttcgaaaaaagatacaatcaccttgaatcatttttcatttcctttttagagggatttaaactaagattaatggtaaactctcctacacggggcaataatctattagatttattatttacaaacaataaaaatctgttgaataatgttaaagttggacctccattcgggaatagtgatcataatgcaattcaattcagcataaatttacaggttaatagtgatgcctctgaaaaattttataacttcaaaaaagcaaattatttggaaataaatgccatactctcaatggttgattggaatttatttttttctgattgcccggacatagagcgtatttaccaaaaatttatgtttttcctaaataatttgataaggaattatgttcccatacaaacaacgaaaaaagttgaaaaactaccagaacatattttgaaactaatcatctatcgtaaacagctttggaaggacattcacaaagaccatataaaaataaaattcttagaagtttcgaaaaaaatcgatgtagaaataaataaattttataaaaatcgcgaaaataagtttttgcggaccttggactctaaaaaacgttttaatttataaattctttccttaagactaaaaatactatgatacctgcatttactgata

SEQ ID NO: 9603 - DNA, 4372 bp, Heterodera glycines
tgtctgattgtaaggtcatggcaatgggtcggcggccaccatttgaagagcaaagttcaaagggggaagcaggtgtgcatgccttgcccagggtttgactgtttcaagacaagaccacaacagccattcgatgtgtttgtttccaaaattcgagtgccgaatcgcactgaatcggttctgaaaatcggctctattcactttgctgaccgaattcaaaagccagtaacaaattatcagttaatctcttcccaaattacacgacaaatgcccccacccgattttcgcattctctcctcccccaaatattaatgatttttctgcggcgatatgagtcagtcattttcatatgcatatgtacgatgagtgatgggatggataaacgaatgaatgagaatgaattgaatatatttttgtgtactttgtacgcgttatttgctgagaatggagcaaatgctcaatccattttcaactgttcgactccaattttaaaaatgacagtgaatgagtcattttttcattttcgggttcttaaatacactctttgccgcatggcgattgattgtccacactttttcctctctgtccccctccgccccctctttttgaattttaaattttttattgtcttttatcccaatttcaatctctccccgtccccgtttcagtttgatcaattcggctaatccacccatcttcgcttcctccaccgttttcttttccgcttccaatccgtccgcttccgtcttctctccgtcgttgttccgactgttcaacgcctactctcttctcgtgatgaccatggacgtgctgccctcctgctccgcgccccacgacacgaacttcatgagccaattgatcgagaagttggccgccgcttccattctctccagcgccggttcgctgtgctcctccacatccgcctcctcctcctccgttccttcctcttccactcatcccccgtcgcccccaccgtcgggcgcggcacgcaatttcaatcagcttagcggcgcccgctcaaagtgcgtaatgtgacacaaaactgatctgaaacagagtgctcaatagtgctgtcttggttctttttgtgatcagactcttccaatgatgatcaattgttttcatgagcctgatcactcatagggacaataatagcctcaagcgttgatcaacagatcaccctgttttgtgacccttatccaacttgggtctgatcaaatcaacttttggtgccgttgtaggcgattcgactcggctgctgccgttcccggcgagttccactcggtgcagaatgcaatcgccgtcgctgtgctggtgcggctccaccagtggtgctgccggctgttctggctcaccattgtgtgcctgatgagctattacagtgatcagcagcaaaatcagaggatgagcagtggcggaaacgccgaaaatggggacaaatccgcggatgacggaggggcggcagagcgacagcggaggacattccgcgaagtgcgcaaaagcattgtgcaagcgacgcaacggcacggctccaaaaaggtcaccgacttggaaatgcaggtgggcaaggcaatccggcaaaaccgggcgatcagagtcgctaaccatggatgatttgcttgagatggttgcctgatcagacagtttctgtccgatcactcctgatcaattccccattgcgacagccaaaacatattcacacctgtgtttttgaattgtctgcgtgtcttcatcatggtgatgatgatgatgcggcgtgtttatctgtatttgattgatcggtcgatcaatcattcgcggacattgcgtctgcgccacacctctcccgtggggttgggcaaggacaacacagtccatggggacccaacccagccgaaatgtgagggcatattgcctgggtaataataataataagtggagaatatagacggataattaggagacttgttttgacaatgatcgatccaattcttaaaggaaatgaattgattcgttagttgattaaatcaattattctttaaaattgacccaaaagttcttcataaaatcgcttattgctgctatgtattagattgatcagaaattttagaaagatatgacaattttcaacttcgagaaacaagcggagaataattaattagaaaataagaaaatcattccccaatcagtgatttgttagtgctgctgctatttcaagcaaatccatcccgctgatctctgctctgatcagcaccatttcctaccgccgatcaaattcattttgcttatttctgatcactttcagctgctccgccacttgacctgcccgcagacggccgttctgcgcccgctgcgtcctttccaccacaaaaagcggcacttcctctcccggcccccgtcgccccaactgttcgacatcagcgaggagaacgacgagcagcaacagtaattgccggaggacagtccgatcgatcggtcgatcagtgatcagccgctgcttctgatcagtcagtctctccaatccccgcaaccaaccaccacgaggagcagcatcagcagttgttgtttgttgtctgttgctgttgactacatccttcttttgtctgaacaaagcgccttcgtgtaccttctcaagcgctactgagtgatgatttataccaacacctcatttgcttattattaacaagcctccctcattagttaatgatcattaattattttctacccgacgtctcccaaagtctctcccctcctcggcagctcacaattcaaatttatatttgccctttcttgtgtctctatttccttcacccggcgggtaattaatgctaataacaatttggataacactcactcattaggccgtccaaattgcgtttgtttcttctaatcacagacacttaattatgtaatcactagagagagattacttttgtgacgcctttttaacatttttctcaccatgttgcgctgctgttctattttggcctaataaaagttgaaattttttttccgtcaagactctcgagacccacaaatttcttggcactattgtagcaggccaaacaacagcgcttgcaatgttagctttttgttttccttttcggtcttctgccattgtttttgtttttcataccatcgcctttctcatttgaccaccgccattcatttttagtaatttaatttaattattattatatttacatattttgcttcacttattctattttattttcgttccattttgtccatgtgttaattaatcctttctcggagaaaggaacagagataaataaatgaatttgataaatatgtaaatacaattaatttattttctgtgttcgccccctcccccaaaaattttattgttttatttttccattgccacccaaaagaggcaaaaaaagaattttgttttaaacattccccacagattccgttggatgaaatgggcaaaaaaggcaaaaagaaaagataaaagctgataagggaaaggaattacaattacctaatgaaaataatttaataataatacgataacaattcatcatattttattagtgctgtattattattttattatcgccatcaaaattatgatggaacgaacggcgggggcaaaggcaaagtgatggacaacgacagtgaaagaaaagattgcttctctgctgattttctgatgggtggtggtgccaatttttgcttagttcggcacaatttaacaataaaagttgggtgggcccaacagataaagggagagagggagatgggaccaaaagatacgaaaattaatgggtaatttgagggtgccgattttttatgtttgaaaaagtgtaaaaaaataaaaataataataaatgtaataaaaaatttaatttgcaaaaccaccatttggtctgttgcttctgtgtgtggctctgaccaagctaaaggctaaagtctgttggttgatcgttctcgttcaaaagactaaacacggaaccaacaataaatgcccttttcggtagataaatgcctttgccgtctgcttttccctcccatccatcaattgatctattgctactgctgctgcttgtgatctgatcagagtgaccagccaagactctcccatttttttgtcattacatcaaaagccaatccaagggaggaaaaaatgtctgttgtctgtgcttcctctcttgcgctctctctatgcttttatgaagccaaaaatacgcgaggacaaaagcatggcttttccttgcgattgttcgttccaccgctgctgctgcttcttctgccgctgtttgtccccaaaagcaaatggcagcagccgatgaatgagtggcggtcatgcaaaatgcgtgtgaagtgcacgtgcaccgcacccgcagctccaacaccgcccccctccccc

SEQ ID NO: 9604 - DNA, 1752 bp, Heterodera glycines
  unsure (1)..(1752): unsure at all n locations
gaaaatgctaaaaaagagacccagttggttcaatgcgaataattgggctaaagaacggttgtgaagggttagtctcgtcatcagagaattgatgtcctctaacttcttcgacatcgcttcgttttgatcatttttgggcgattcttgctttgttatttcgtccgtttgnnggttgacttcggacagctcactagtgagcaagacatctacagtatacatcacgttcaacagcagcagctctactcaagaggaggaagacaagtcaatatatctgtcggacggccgaatggttaatgttcatatcatccaagggaagtttttgggcggcagtgattgtgctgagagagagataacgattgatacattaacttcctctctgatagtattgagcagtggctgatcccaaagcggatgtggaggtgaaagagtctcaaagaaacggacaaaagtgaaatatagagggaatcttgagacctagtcatgcaatttaaaaatagcaaaaaaaacaattcaatgaaattaacttctagagaaatactcgttggaaaatatcgaagaaaaaatgggcaagaaatttaatcggggtacgcaagaaagaaagaaaagtaaataaataatgggaggatgacgatagttagttgtgatcaaaaaaagttgtttggatcaaatcggtgagaaaattagcagaatcaaaaaaaacgcattatgttaattagtgccacgccaattttgcaaaaagaattaaaaattaattggttttaattattgtgtaattcatcccattttattaaaattgatgcgaaaaaagaactgcatttgtgcagctctccgactcaaatgggacgagcaaatttcagaggccgagttgagtttgatggattaaattaaggaggaggaagcgagagatgggtcttttaatgagaccaaagtcgagagtatgcgcgactctcgggtcgaaaatcaaaattggctggggaatgggacattcgttgttccgctgggattccttcgtcccattctcggctaatttcttgtgtgaaagtcgagagcgttgcgtgtgacttatttttgttcggtatttcattgcgctgttttgatcaaattgaaatcatgtgtctgctgctctttggtgttccgtccgccattggcacttggcacttgccgtgccatggcattcgagagtctcgcccactgctggcgaatgccctccctacaaaacacagtctctctctctctctctctgctgttttctcgaccatttcggcggtgccattgttttgccgaaccaaagggtgggcaaacagtgaaataaaaatgatgggaatggtcaaaaagtgtcgtttatatttgtcctttttgcctgtcgctgctgtgtccacccctcggcggtttactttcaatgcgtcgcttcgccgatggacaaacattgcgacggatcggaccgatgagaggggtcagaaaaatgtaaaaattgggctaaaattggtggtgagaaaagggggcagcacttaattttaccaaaaaaaaagaatttgaaaattgacaaaatttttgagtgttttaaaattaattgaaaccaattaattccaacgataccaaacaaattacttttgttgtttctgagaaaactcattaatatttttttcaaaatctttacaactgggaatttttacaaatctcataaatagtatcgggaaaattatacaaattaataaaaaataataattaacatttaagttggatttgtcggag

SEQ ID NO: 9605 - DNA, 1747 bp, Heterodera glycines
aaattcagtaccaactttgtcccttcagtcccaggtgctcccgagtcagggtttgatctgagcgagggggctccagcggtcttattgtagagctttgaaagctcgatttttccaaattttaaaatttcgaaaattttcaaaaattttcgagttaggcctaaaagtaggttttggggtttttgaattttatgaatttttaacgaattttcctagagaaatggagaccacttccaaaacatagtttttcgagctctatcgactggtatttttttcggaaaaatttcgattttttcccggaaatagaaaaaaattttggcctgagcgggacatttgagtcccgggctcataactcgttaggggttggttttagccaaaaattgtcttagaacatttttgtagagcttttaaattgctatctaatgaggtactataggtcggaaaaatttcaaaaattttcgagctaggccccctagaaattttcggaaattttttttcggacgaaaatgggggtgaaaattttttttctggggtattttgaggtgctgagcacgaatatgacctttgtttttcgtttcagattttttgaattttttaaaaatttttgaaaattcgtcaattttttggccttcgggattttgagttaattttcgaaaatcataacaaatcgaagggtggatcaattttcatgcaattatattataaaaatagagaaaaatcaggagaattttatgggatttatttgggatttctatcttaaaaagaaaacaagttattccagaatttctgaaaattttcgatttttcagaaaaaaattcataacccccttctgaaaagaaatttttgaaaattaaaatactacaaaaatccgcaattttttgctctattaaataaattttatttggcatttttatcacttttttgagagatgttacaaaaataaaagtgattttgactttcgggaccaaaggggtgagcataggatttttgagctggaaaattttttcaccaaaaatcttccaaaaatatgtctttaggggttatttcggccgctgatcatgaatacgtaatcagtttttacttttgacatcgttaagacctcagaatccctgtgtcattggggattctgaggcatcattttgagggggggggggcaggttcggatccggacggtgtacattaatttactatgcattttttgcttacttttacattttttaattaattgttttgcattattaataataaataaaaatttttaatttaaattaaattattttggtgaacaaatgttttaatttaaattatttaattttttatttaatttaatattgttttattaattattttaaattattttctgatgaataaatgttttatttaatttgaattttcgagaaattaattcctttcaatttcaataaatattctatattataaatttcgaacttttcatagttgtacttctttttatcactgttgtgcctcttttaatcccttttatatctcttaatccctgtgtgattgcccgtctgagttcaactaaattttaaaaacgggcgcgaagcgcccgcccaagcccaataaaattttaaaaacgggcgcgaagcgcccgtccaaggccaaaaaattgaaaaacgggtgcgaagcgcccgtatgagttcaatggatttaaaaacgggcgcgaagcgcccgtctgagattaacaaatttaaaaaacgggcgcgaagcgcccgtttgactccgaaag

SEQ ID NO: 9606 - DNA, 2438 bp, Heterodera glycines
tcactttttcttgcgtttgaaggcccctaactttttttctgaaactcggatcaaaaaattcccgctgtgagggcactccgcagaagtgtcctctataatccagtattttttattttttgatcagaccaaatcccggacctgtacagacacggagactcagttaatttttttttcccacttcagtaccaggcgaataactcattagggtttgacctgagcgcagggtggccagcagacttattgtagagttcaataagctcgattttttcagattttaaaatttcgaaaattttcaaaatttttcgagctaggcctaaaaaacggtttttgggtttttgaattttaggattttttaacgaattttcccagaaaaacggagaccacttccaaaacatagtttttcgagctctatcgactggtatttttttcggaaaaatttcgattttttcccggaaatagaaaaattttttggcctgagcgggacatttgagtcccgggtccataactcgttaggggttggttttagccaaaaaatgccttagagcaaaattgtagagctttttaagctctatcgaacggtgtactacatgatgtaaaattttcaaaaattttcgagctaggccccctagaaattttcggaaattttttttcggacgaaaatgggggtgaaaaatattttcctggggtaaaataaggtgctgagtacgaatatgatgtctattttaattttcataatttttggaattttttaaaaattctttattttttggcaattttttggccctcgggattttggcctaatatttgaaaattcataactcagttcagatcaggtctattttggcgaattaaagctttaaaaatagcaaaaaatcgggaaaattttatgagatttatttgaaatttatagcacaaaaacaaaaaaacttattccagaaattctggaaattttcgatttttcagaaaaaaattcagaactcggttctgtaaaggtgtttttgaaattttaaatacttaaaaaatccgcaattttttgctctattaaataaattttatttggcattttgatcacttttttgcgaattgttataaaaataaaagtgattttgagattcgggaccaaaggggggtgaccaggatttttgagtggaaaattttttttcacaaaattcttccaaaaatatgtctttaggggttatttgggccgctgatcacgaatacgtgatcagattttacttttgacatagtcaagacctcagaatccccgtgtgattggggattctgagtcatcatttgaagggggatgggaggcaagttcggatccggacggtaacacattatttttctatttattttttgctattttcaatttttattcatttaaaatatttttattttattaataataaataaaaaattttcatttgaattaaattattttttggtgaaaattttatttaaaaataataattttttaaattaaagaatttaatgtttttttaaattagaaattgtcaaaaaaattattttcaatacaataatacgcaatcattgtaaattcaaagtttatttttaattaataaaagaaagcattttttaataattttttaaaaaatattaatacattttttaattctatttttcataaaccatttactaattttttaatcactgttatacctcttttaatcaccattgtacctcttctcatcactttcgttactgccttctgaaaagctatttgagaaaagtaaaatactacaaaaatccgcaatttttttctctataatataaattttattttaaatttttatcacatttttaaaaaaagatataaaaataaaagtgattttgtgattcgggtccaaaggggggggggggagcacatggtttttgagtgaaaaaatttttctcacaaaaatcttccaaaaatatgtctttaggggtattttaggacgctgatcacgaatatgcaatcagattttactttagacaacgttaagacctcagaatccctgtgtgattggggattctgaggtatcattttgaggggggggggcgaagttcggatccgggcggtaacacattatttttctgtgtttttggttaaatttcattgcttttaattacttttaacgctttgttttattaataacaaaaaataataaatttaagtttattatttttggtgaatgtttatttaaaattaattttttttttcattaaaatttaaaaaatttcatgttttaatttaatttaaatttgttaaaaataaatgcatttcaatttcaaatattctataattctgtatgctttatagtttatttttaataaagaagtgcagaatttattttgtaaaatttaaaaatattattaatattcaatttttactttttttaataaaaccatttccttatttatttaattttaaactatac

SEQ ID NO: 9607 - DNA, 1506 bp, Heterodera glycines
ccttttgttttgcaaaattttttttgtgatagtcaatcccccagtctctggggtttttggggtccccgatcacgaatctttcaattattttgatcaattccgatttcctaatctaaatttgaacaaaaaatcataatttgaaaaattcaaaattccgatttttattcgagttcgggttatggattagaaattagtcaaaatacatttcagattcgtgattagcgacctttataaccccggataaaaaattatcatggttttttatcttaaaaaaattttgcaaaacaaaagggtccccccttttgtttcaaaaaggcccacttttacactagcgccaaaaaaaataacaaaaagaagggacaataaatagggctcggacaaatagtccgaaatatggagtaaatacatatttaagaaaaattacgaaatttgtggtgtaaaaatttttcgaaaattatgccaactgccaaaaaatgtgatcgtgtcaaaaaaattttttcgcattttttagggaaaattcgaaaaacgcctaaataaaagcatccactgcgtttcggcgccagcatgtctttccaatctagcgattgcttcgcgattagacaattactaaaaagtttatgcatgaaaattgcgaagtcgaaatttttgaagttttttcttaataaaattttttccaggcttgaaaaacttttcgcatttagtaaggctaatagtgcatgttaagagttgaaataaatgccttttttgagctccttccttcaatgccataagcaaaaagtattttagacggcggtcaaatttattaataggatgaatccgttaatttgacaattttaagctcaatgcctgcttgagtgttgaaactaagattttgacaacaaaaataagatttgcacatttattacagaaaatcacaaataggtaatcataatggcataacacaaatccatgttgatcagtcgaacaaaaaaagacataattttctgaagcacgtcaataattccataattcaaattgatcgatcacttcgcaacaattcattcattcacttctgctgatcacttgggccgggagttgtggcgagaagcctaaaaatagaaaacacaataaatttaagcttttaaataagcattcgctgacccgtctccgatttcgtgctcatcatttatttgaatgtcaatctgatcacattgatcaataaatttccatccaatcgcttcctcctcccattctgcccatttgttcacatctcgcgcaattggagaacggatcagcagaaaacggcggttattgttagtccttttcaatgccaattgttcgcgtgtcaattcgttggtcagatcaaatggctcaaccgacgactgatcaaaatacgacggaaaccaaatgacgacaatgaaattggcgggagatgaagcattggtaaatgcctgaaatatgaaaaaaaagttataaaaaaattgaggggttgttggtaagccactacgcaccgtcctgaaggctgca

SEQ ID NO: 9608 - DNA, 1592 bp, Heterodera glycines
ttcgaatccgatgactttgtgtggcacttcgttttgcggaattggcaattcttcaccatcgtaattgacaatttccatctccttggtgccattctcgtcaattttgcttccaattcgaagaaaatccaatccccatttgcgggttttgaagtgttcgtccacgtagatgttaaaacggtggctgatcatcgaaattctgaggccaagttgataagccggaagcaaatcgaacacggctagccaacagtcaccagagataaagctgaaaagggaaacaaaatttaaaattggcattttaattttacattgctttttccatttttgcctccacttttgccatttcttcctccgccgcttcttttcgattgtctgtcattttgtcgaggcaaatttggtctgctggaggttttggtgtttttttgaatcggtcccaaaacatccaaagaatggtgcaacagccgacaaacaatggcacgccatacaaactataaaatgagaaggaaaatggtaaatgtgtggagaagaaatgcacaaaacgtacaaagtcatttttgaaggcattgtcagagagaaaatcgaacaaagagacgaaaaacggcgaatagataataataataataataatgaatgtggcggaggaaaagcaaccacttttatactaattttttcggttcatattcgaacgccttggagaaaaatttcacattccaacttaaatgaacggattttgattttaagtaattgctttgttctgctatttgtatgcttttagtggaataatccgctcctgcaaaattttcaatctcaacaaaacccacattttttaaaatttgtttttattattttccatttgtatgcttttgcagtagagaccggacaactggggtcggagggatcccgagtcgggatcccgactgaatcccgatcccgaacattttggaaaaatgatcgggacggatcccgggttgggatcccgaccgaatcccgatcccgatcaatcccgaagatttttttcgagatcccgcgggattatcgggatttgctcaaacccaattttttttacattttgtgtggtattagtgactctttgaccctttatttgattgtttgaatttgtttggcataatgtttgatttgaattgacccaaattgtttcgtttttcttcagttgtgtgggtggatttttggttatcgtcggtgataattttaggcgttttgttggtcgtcgatttatttgtgttttttattaatttgttgttgattgaattttatttattttggattgtcttttaattattggttgcataaatttattttgtttggtgttggatttttaaagcaggttttgccaaattcatagactattcgtgcaaaatttagaagtgtggcaaagaaacccccgacaaattgcttcttctttttcaacttggcgctcctggtaacaaaggttagctcagtggcggacggctttatttttcttcagtgaatttctcattttaaaaaagcgactacctaatttggcaaaaaccctcgtgttgggttcatcgactgttcttcaaatttttaaaaccctcgtgttgggtttatcgact

SEQ ID NO: 9609 - DNA, 2393 bp, Heterodera glycines
  unsure (1)..(2393): unsure at all n locations
ctcgtccatctcatcaaagcagaatcaggatttagttactcaatttctgcacctcaatgaggaagcacgcaactttttggagctggataggctgaaaaagtccgaaaaaatggagaaaccggtaaaagtgagcaaagaaaataagaaaggagagggaaagtcaaaggaagtgaacaaggaggaaaatgagtacaacgaattctgcaagtcaacgactaaaaacattgacgagtcaatagtccatgtgcaattttttgctgaatttgagagctccttcaagtccattttttacgtgccggaaacgttgaccgcagacgaattccaaaatcaaaatttggcattttcatcagggacgatggaaaattcgagggaggagaagaaaattggcagcagcgagacggacaagaaaaatggcctaatgagaatttggcgatttgaaaattgcagtgtgaaagccgacggacgaatattagcggaccgtgcaaaatggctcaaaacgtggatcttcatcaaaattcccgataaaattcttttggacaaaacacattaaaatttttcgaggacaagaatgacaacattttttaaagccgtcacgtcactagctgaaaaccttgaaccccaccattcggatgccgaattcgccgttatttttacttaaagacgaggggaccgtctttcttagaggccggggatgtggtattagtgactctttgaccctttatttgattgtttgaatttgtttggcataatgtttgatttgaattgacccaaattgtttcgtttttcttcagttgtgtgggtggatttttggttatcgtcggtgataattttaggcgttttgttggtcgtcgatttatttgtgttttttattaatttgttgttgattgaattttatttattttggattgtcttttaattattggttgcataaatttattttgtttggtgttggatttttaaagcaggttttgccaaattcatagactattcgtgcaaaatttagaagtgtggcaaagaaacccccgacaaattgcttcttcttttccaacatttgtgccaagttttgttcaaagggggggggaaggcccacccgagccgcgaagaggccgagtgagtaccttcggtgcaggaaaattattaaattttaaaaattttttaattgctttttaaatatgccaaaaaatgtaggcttaacttttttagtgaaaattcgatcactcatattttttgctaattgagcagaagcgtaccaaactttgcagggatactccccggtaaaggactaacttacactgaaatgagcgccgagctagctggctcaaaaaaattttcgaaaatctgagtctttcattatttatttatttttttacagaaattaattcataagtatttttacagaaactgctctgaaacgcaccaaattttatttacatgctagtttaggcactctgatgctttttctatcaaaaagggagatgaataaatttttaaaaatttttaattcctttttaaacaggccaaaaagtttaggcttaacttttaatgaaaattcaatcactcatttttcgagtagtgatcagaagcgcaccagattttgcaggggcctaaaaaggtcaaggaaaggcgtctctgcgttgatttagcagtagtacctatgaatttaaattttctatgaatttttaaagttttttgaaatttttttaagtgcaaaagtggtggtgtctgcaaaaaattttcaccgggtttaaaaaatctaggaaaattagtaagcatttgtagtgttccgatacgtatccctgcaaaatttggtgagcccctgatcaattacaaattatttatggacgatcaaatttttagaaatttttatttatttttgcataattaattcataaatatttttttcagaaaatgctctgaaacgcaccaaattttatttacatgctagtttaggcactctgatgctttttctatcaaaaagggagatgaataaatttttaaaaatttttaattcctttttaaacaggccaaaaagtttaggcttaactttttgtttcactcatttttgaaacttatcagaagcgcaccaaactttgcagggatactgaaaggaaaagaattaacctgttttatcacattagcttgtcatcagtttttataaaaaattttcaaaattctgagtctcctattattttatttttttttcaaaattttgaaatgcgagaggggggggtgtctgcaaaaaattttcaccggggtttanaaaatctaggaaaattagtaagcatttgtagtgttccgatacgtatccctgcaaaattggtgagcccctgatcaatacaaatatttatggacgatcaatttttagaattttttattatttttgcataattaat

SEQ ID NO: 9610 - DNA, 2559 bp, Heterodera glycines
tattagtttttaaataaaatatagtaaacatatattcattttaacaggccaaaatgagcatggtcattctgcttttcttggctgtcttcttcggattcctaccatttcttcacagcttagacaaagcatacgtcaccgaaccgtaaaattaaaaaatgtttatttaattttcaaatattttaaaattttagctttctcttaacgggtggaaaaattggaaaattttccgtgccatactttgcgtttgaccaatgcaagccgtaccacagcatcactcatgacctgaaggttgaatcccggaactttggtctgtattttatgatgaagcatcgaggtggacactgtgatgaggggtaaatttttgaagaaatcataataattacaaattaggcctaattaaatttttaaatgccatttagcttactgatctgctacccgggcacattgatgcgcaatcatatgatcaacgagttcaaaaagatgtccgatttcagattgaaacggacattccaagtcggcaacaaagaagtaatgggaattttaattaaaaaatttatttaaaattttttaattttcgaacgattctctttcattggagtgcgcccaaaaaacggaacaatttgttggcatttcaaacccaaaacaatggcgtggcatcaaagtgtacacgaaactgacaaactcatcaaatccgctttcggcacgagaaatgatcctggagacttcattgacaaatcggaggtagaaattttgggtaattagggttaattaatagcatttttaaatttaagttactcctttgagccaatgactcgtcaactttcgcttaactttggcaccagagtttcaatgttcacttgggtcacaactcattttggtatttaaatttaaaaaatatatttaaatatatttttaaatttaggacaaccatttcatgacgaagaatttgatttggctgaacagtacgccaagcaaatgggctatggaccattcttggaacaacatgtcggactttggttgcttggcatggacatgttgccatggatggccgaagagtttgtgagtctgtacgtctaccgtaactgctcttgtacgatggacgcttgggtactgtacctttatttgaattttctataatttatatattaaaaaaagttcacccggccaaccgatgagaatgacccaattgagccgattgtgccatcggccggctcatcgcaatgcccgatgaagcaaatggacgaaacttttgaacttggccaattggacgcgcaacatttgcaggctgatcttgtgttcactgtgctgacggatgaaaaatggcaaaatttcacagtggaattattacaaggcgaaaaaggtgtgagctgacaaattaaattttgattaaatcaattatatttgtatttaatgaccgttgaatgggggaaggaggcaaaacaattagggtggctaatgaatggtattggaattaatcatttatataggaggtgtgaagacagtcaatgttggcctgattaaattttggttagatcaattaggcacaagtaactaaatcagtatttggattaatgactgtgtatgggtgggaatggaataaataattaataaaattactgatccatattgtactaaatcatttaaaaatcccgtatgtgaagatgaattatatggattaatgacccgttgaacattggacattcatttaaacaaaatttttgcaggtacaaacctcacaatgataatgatgaatttcacaattggaacaatcgacgacatgaaagtgtcatttcccggggtaaatttaataaatataaataaaaaataattatgtaattaattaatgtagattaacacatcggtggtggtcaatggaactcagatgccgaacggaacgcaacaattgcgttttgacattttcctgctgaagcattggtatgctatgatggtgaacggtgtgcagtttggcgaagtgttttggccaaacgaatggtggcacgcggcggcatggaaaaacatcacggcaattagggtgagtgaaaaagaaatccatacattttattggtttgagccgattccgaaaatttaattttgaattgaattcgtcagaattttaaaaatagtttttttttctcaaactacgaatttttttttctaagttggagtttcgttattgcctccttatgtcaaaaagaaaataagaaaatttttaaaaattattttttaaatttttcccagctattactttttttaaatttcattaaggtggagcgagtcttcccaaatttttgatcaagttcccaaataaaatctattttgtctaaattttttaagatttttggaaatttttaattatttttttcaaaatctgtcaatttttctgcatagattaggaaaaagacgagaatttaaattgggactaagaaaattgagcagaaatttgataatagattttttccttacataatattattatatatatatactaaattagttttattttgaagcttaacggccaggtatattgctttatgggcctgaattggatgactacggtat

SEQ ID NO: 9611 - DNA, 1450 bp, Heterodera glycines
aattaaaattaattgtccttattatttagttcaacctatctgtgccacttccattttcacagaaaattgatggttttcgagtgaattcaacattctttttccgtgttcaactgcttaatgaaacgcataacacagtgaacataacatttacagatgggaaaagcagtaagaaaagcataaatatatttaaataaatttttattaaatttataatcaaaaataaaattaaaaatagtcgatttaaaaaaataattttaggtgatgtaattgatcagacggaattgaacatcgaaattgagaattttgagacaattgaaatcactgcttcttatgtaatatttaaatttgtttatttttttgaaattagctaattaattaagtactctggatggaataaaacatataaagtggaaagaacaaatacgacaattcagactacaaatagcaacgtatttgaattttttttgaacttcactgatgtgattatgtttaatggagaacacattttacaaaattacactgatgacataccattctgtcatattaaatatgttaaggtaataaatatttattattattattttttaaatttaattaatcaagtaaattagtctgccaattaattaattagattatttattttaattattttattttatttttattgttttacaaaattgaaaatgttgattttttttttttatattctagtatttatcaaattataaccagtaaattagttagcgttctaataatattaaatatttaactattgttattattatatttaatttattaattagtttaatttttttttttattattttgataattcattaggtgatttttcattctgttattatatatttgtaatcaattaatttaggtcactggtgatgccattttattagattcgccaaagctgaatgtgccaccaccaattgtaagtataaataattcttttttattttattttatttttttattttctaggtaaaaaagggagaacaaattattttggcagtgaaagaatttttaaatttcggcgacctaattgttattagtaattataagcaaaaggccaacgaaacaattgttgtcaaattgttgcacggcccaccggaatgcagcaaaaattgtaaagttttgtcatatatttaattttatattaataagtgtctcttcattataacatttaatttgaaatatttgtaaattttaagaccatattattgccaaaatggagttcaaagttgatgctggaggaaatggcaaacagtttttctgtgaacacaagccgagcatggttaaccaataatttttttgtttaattacatataaaaataattaaagataatggatagaatcgaagttaaaatacgaaattcataagcgaaaaataagattttttggtcaaaaataaggacattttgtaaaaaataaaggaggg

SEQ ID NO: 9612 - DNA, 766 bp, Heterodera glycines
aaatgttttctctaatttgcatttttgaaattaaacagagaaactcatagtttatggagtctctctcaactctctgcggttaaacaaacattttcttttggaaaaaccaacaaaattaatgagcaaaaatgagcatcaaaaatgatcagaacagaataatttgtccaatttattatatctcaaaaagaaagacaactcatatttcaattaaaaatggtaatgctgctgttgttgaggcggacgatgtatttagactagggtaggtcgggaccgggaattttcaagttgaaaacctggatcttttggctgggaaaaccgggaatttcccggatcggtactcaattgtccgtgttttggtcccggtcccgaccaatctttttttcagcaatcagaaagatgtgtccctgcgattgtcaggggtgctgttcaagaatccggcatggcatcaatttctaacatattgtaaccccggacccgaattctaataggaagtttataaaaattttcgcatttcaaattttggatcaaatttgtacacggaacgaacttaaagtgcattaatgcttcatttaaactatttttagactaaacatgaaaaatgacacatttgaattaccacttttttttgttcgaattgacccggggtccggaattgatcgaatggatggatgccggattcccgatcggtgaccccgataacccttgaaatatgttttcatgactcttgacaagaaattattttttttctaatgggagcgaggggggg

SEQ ID NO: 9613 - DNA, 1915 bp, Heterodera glycines
tgtcagcttttcattggtccgttcgttcaccaattcaaatggcacaatttgcgttgatttgggcatattaaattgaattgtgtagcaggcagaagaagaaatggcacggagaaatgcctaaaacaatggaaaaagaaaacataagcaataaaaatgaattccaaatgttaaagaaaaagttggacattttaatttgatggcttagcggttctgtgatactcaaaattgagaattatattgttgaaatcaatcttgttttatcaaaaaccaaaaaaatacttgaaaatccctttagtaaatttgctctcattaaatttcattttctattttatgactagcaaaatatcaaaaagaaaagaaaaattgcattataaataggatgaacaaagcgtatgggatggtcgtgcaaatagcgcagttgttactagcgcagccacaggtcacattaaacacgggttcagtcccgctagcacgcaatctttttttaaaatttaattggattacttaaccactacagcatcatttaaagcatattatatattatttaatttattgttgaaatttattttaattataggaaactagtttttcaatatgaaaaattttatttttcaaagaattactttttcatttgtcagcacagaattggtgaagcggaaatgccgtcgacaacgttttcattatgccaattatttataataattgcacaaaaaaataaataatttttaaatattctatttagggcttatattttagtctctaaaaattgccaaaatagatactaaaaaatagaaaataggctctaaaaagcctcaaatttaggagtgtaaaataacaaaattttagtcaaaaagcaaaaaaattaagccaaatgaattacaattgttgaagccaaaattcttgtcaaaaaacaaattaataattttaagatgaatttttgagaatattttcatttcttagggatgtattttcgtttttgttaaatttttaaataaattttgaacataaggccaaaaggcaaaaacagttttttaaaggtttttagactttaagctctaaaaataaaaaccttgaataggcttacaaggcaacatttcgaactgtaaccacccagatcagtttaaaaccacttctatcgtatagagaatgatcgatttactattgccaatttttggcttttttggctccggcgccaaaaatgatcagaaaaaagtgatcaaagtttcgaaaaatcgataaaatagtaaaaatttttaaaaattcataaaaaatttaaaaataaagttagagtaactaaacttattttaaagtgatcagcaaacatttctctatcaaatggcatcataaaacaaatttaaataattgaataaaaatgtgttaggtgaacgaatagtttgaaaaaaattcaaaataattcatcatctgtccagcgggtttgaacccatgacaaatggtaaagagtagggttgagcggtaccggtaccggtactggccggtaattaccggtttttttggtaccggtaccggtaccggttttttcaaaaatgaaattaccgttaccggtttgtctagtaccggtaccgccggtaaaaatttgcactggtaagaatgggggtctgggtgagaaaagagtagggaatggtgaaggagaaattttttgagaaaaaaaaattaaattatttattttcatttaaagcatttgttcatatgcataagtggtcaagtggctaaaccttctgattttattatttctcgcttgggttcaattccccacttggatagaatatttctcacattttctttaccattattttaattaaaattttaattttaattaaaatattccaactttttttctttcatgttaagcatcctaaaaacccaaaaacttaatcaattggtcatttttttttta

SEQ ID NO: 9614 - DNA, 2764 bp, Heterodera glycines
agaaagcgttcccgaataatgtgctaaccggggaatgaaaaggtaattaaattaacttacctatattaggtgaacacaccgtaattctgccgtagagaatgtcgcgttgtccgaccattgaaaccaattctgaaaaatggaaagataaatgtgaatcccatgctgtcgagaaagtcaatcccattcttcctctgcaattgccttggatgtgttttttctgtctccgccccttccaactttcgctggtaaagaaatttgtttgtttatcggtgccattcgcagctgacagtaataagcgctccttctcgtaaatgtatgcgtcgagaacgggttcaatggcctccgaaaaaagactttcgtttctaatccaaatttgttgcttgacagaaaggctgcattggtcgtaaaactcctgaaagtccatcattttaaactatgacattatttgttattttttaaattcattttcattagtctactttgtcgcagatgatcagcttcaaatacctaaacatttaaaaagcatcaaaaatccgatacatttaccggcgctagtttaaagaaggggtcttttgaaatttttttcatttttttgacataatttttttttaaatttatttatacattatgatgaatattaagcattaacaagacaattaaaacgaataaaaagtatattcacgattttttatctcaaaaaaattttgcaaaacaatagggtcccccatattgtttttgataaaattaaaaatctgtcactttataactagcgccaaatttgcttaataggcccaaataattgtcgtatccacgatcagcgacctctaaaacccccgggtacttgggtttcaggactttttaaattaaaaaaaattagtcaaaaaaaaagtgaaaaaattttcaaaacgccacgctttgtaactagcgccaaaaaatgcatgatgaagcttcaaacaaagtttagaacactttttaagtcattttaaggccatttagagtcagcaaaaaaaagtcattttacttaaattcccagccctacttatcattagggatggtaaaaatatggatataaaatcgcgaaatatggccataaaatatggactaaaaatcgcaaaatatggacataaaatggcaaaaatctcaaaatatggaaataaatggcaaaaatgtcaaaatatggacataaatttttcaaaattgggtgcaaaatttcttcaaatttgttggttgaaattgcatatgaaatacatttccaaattttttgactcggtaaggcgctttgacaaagacggctttcgttttgcaattagtcggtcaacattcggaaattggtctcgaattttttcggcaattacgtgcaatcattttaaatgaaaaaaaacataaaagctaaaatttattaatttttttagcgcaaaatcaacaacaaaagcgaaattttcgcttttttgcttatttttgacataaatttattaatttttaagaaaatttaaatttattcaatattctcgagaaattttggcgaaaaaatgatttttttgaaaaatttttcgggttttgggctcaaaaaggctaatttagctgctggggccgttctaatagaggtttttttgaaaaatgccaaaatatggacataaaatatggaccaaaatgccaaaatatggaaaaatatggaaatatggacataaatcgcgaaatatggaaaaatatggaaaatatggatatagaaatccttcctagaagcttcaaaccaagctaaaaacatgtttttcgtgcgtttcaggcctcccacattccaggaaaaaaatatggatttccatataattaccatccctacttatcatttaactcttttctaaaccagggccctgcgggccctgtgaaagcgccgggggcgctttcaacgctggctctagtgggagatataatttggggcgtgcaaaaagtatctattggccgctaagcgatcctcatagtttaggaatatgagaatttggaaatgaacaaataattaatttaaaaacgatattgttttaaatttaatttaaatgcgatatttttatttatatgcttgtgattttttataagattttttgttaaatgttataattctaaaataaataattttcgagttgtcgctcttgctgctctgacttcctcttccactttctcttccactttctgttcctcttccactttctcttccattttctgttcctcttccactttctcttccactttctgttcctcttccactttctcttccactttctgttcctcttccactttctcttccactttctgttcctcttccactttctcttccactttctgttcctcttccactttctcttccactttctgttcctcttccactttctcttccattttctgttcctcttccactttctgttcctcttccactttctcttccactttctgttcctcttccactttctcttccactttctgttcctcttccactttctcttccactttctgttcctcttccactttctcttccattttctgttcctcttccactttctgttcctcttccactttctcttccactttctgttcctcttccactttctcttccattttctgttcctcttccactttctcttccactttctgttcctcttccactttctcttccactttctgttcctcttccactttctcttccactttctgttcctcttccactttctcttccgcttcctgttcctcttccactttctcttccactttctgttcc

SEQ ID NO: 9615 - DNA, 2246 bp, Heterodera glycines
agaaaaaaaatgagggagagagagagagataggagagagagatagggagagagagagagggagagagagaatgggagagatagggagcgagagagagagagggaaagagagaatgggagagatagggagagagagagagaatggaaagatagcgagggagagagagagagagggagagagagagagagggagagggagaatgggagagaatggaaagatagcgagggagagagagagagagggagagagagaatgggagagatagggagagtgagaatgggagagaaagaaaaggagataagagagagaaaataaataaaaacagtaggcacaacaataatcactgtaattttataaaaaaataaggagaaaaaggtgaccttgtggcaatgtctttgtggacaatgccgaacttctgcaggtgacaaatggcactgatcagctgccttcccagtgagactaagtcgtgcgtgcgcagcgtcgtctccgtttcctcctgtgagcccaccgaatgagtgccggccaaaactgtgccgagaacggacatttgcatttgggcgcttccgtgtgacttgccaattcggacggcgcccgcgttggactgtttggcccccgtcgtcccctgtgccgctccgtccgtttcgtcccctctttcgccagtgttttggtggactccgaaatccatcgaccgactaacactttgacttgcgctactttggcacgagtgtaaaaagtttttcagcactccgaacccattgtgcgcataacaaatgagtggcaaatccttcactgattccggattcagaaaattgccaaaagtcgcagcggcaacgacctgagaaaacgggggggggggggtaaaagacggaaaggaaaggaaggggggggacaaaagggacaaaacattagcagtcaaccaacaataacaattcatcagtcaaattatgtaaatttgtgccatttacctgtgccaaattcgaatgcgcgggaacgtagtgaaattggagcgcattgcgcagaaagcgttcgaactgagtgcgtccggcaccgggcttcagtgtcttgcagatgagcgccttgtcctccttggcgtcgtcctcctcgtcgtccacttcgtccaccatcgccccttgccccgtggccccaatttgccgccaatttgcccataataattctccgtattttcctgcggggaatcattcgcctgtcaaaatcccttttcgcctttcactgaccttccatttcagcacgcggagattgctcaaaactaacgaaaaaagcgattagtattgaatttactgataaaataatccacgaacaggtttctgtccgcatttagctcaaccaatgcttgattaatgtccaacaattgggcctcggacctttcgaaccaaattcggcacaaatggggagggagcaaagctaaaggacggaatgccaaatgaaagagacggagaggaattgagtaaatgtactgaactgttcgaagggtccgaagtggggaagggggcggtggaggtggacggcatttgcgggtccgaagcagaggatggcatcggcactccgttgagcagaaaagcgggcccttgcggggcgcgcttttgcccatcggtcaccgaattgctgcgactgctcagtgccaaactgcttggcgttcgtcttccaatgaatgtgccatcgtaaagtgtgtgtccccccccccttccgtcctgttgtcccttcttacggtatcgttcctccgattgtgtgctgactcggcgaaattgtcgtcgttgttgtcgttgccgtgccaattgtcatcgctttttgatggcattgacgaaacttttgacgcagcgatattctgccggaagcgtaaacagaaccgaatttcccgcctctccagcgcccttcccgcttcattcctccgccgggggccattcgtccgtcgcttttttggcgttttgaacgtaaaaaataaaaacagaaaagaactgatgaccagagcagaagcgagagaagaagagagccgatagtgagttggagaagcagagagggcagcagagaagcggaggaagagggatcagagtcgagcagagaggggcggtgggaagcatcgtcagctgggaggggatgaaagggtaaggaaaaccccgggggtgagaggaaaaaccaagtcgggcgaggggagtggaatggtcaaaatcgaactaatcggggtttttagtgtgcaattcgctgagtaagactattttctcacaaaaatg

SEQ ID NO: 9616 - DNA, 1669 bp, Heterodera glycines
aaaattatgcgaagcggacagagaatttgccgaatacgccaacgcgtcaatgttttatctgccttggtatttgtttaaaacgaaagtggttagaaccaaggacattctggtggcacaggtcaatggccatctgttgccataccgtaccattgaacaaatggtaggcaattggcactaccaattcaaagcattgatggaagaggaatggcacaatgccaatgccgaagagaatgccaatgccaacaatgacgaggaggacgcgcagttggaacagcagttgcccaacccatgtgaagaggcaaagctcagagtgaagaagtgatggctgctagatcaattacaatagtgaaaaatttcgacaaattttttaattttttatttaaattaaattttcgggctgccatcgaaaattttcaaaaacatggactgacttattaaagaaagattttgggagcaattttggctctaatggaattcctccccccccccctacctccctctccccctgtacccttcccctccgcgctcctccttcccccttgccctccccccttcgcttttcatcctccttctcaccttggcttcttcgcggaacattcccttcagctggcaaatggaggaggggcaaaacgtcaaaatgttcggaaatggcgcggacggaataacgaagctgaagggggacaaacattggaaaatggcggaagagcgaaagagtggaaagagggggggggggggggggggagacaacaacttggtccgatcagtgcttttttacatttcgatcccccgcattattccatgtgaagcgcaagtgggaaacattctcagccacgcggtaagggaatcggatggaatattcgttgatagcgcctgctgagacgtaatccatccgagcggaaatacctcaaaaatgtaaagattggaagttcatcaatgatgaaagaaaacgggaaaaaagccgactgaccaagggtacgctgcatttcctcgttggaaatgtacaaattgaaggaacagcggacgaacaccgggaacaaactgacaatgaggatgaccaatttggagatgagaaacggaagggagggggaggaggaggagaagtgtgacgacgaggcacagggacaggacgaggaagaagaagaggaagcggaagatgaagcggaagaagaagaggaagcggaagatgaagcggaagaagaagaggaagaagaagaggaagcggaagatgaagcggaagaagaagaggaagcggaagatgaagcggaagaagaagaggaagcggaagatgaagcggaagaggaagcggaagatgaagatggaggggagaaaggaatagccgcagtagctcttcctcttttcatcacttcttctgatggaacacgcaacaatacttttttggcagtttttttttgcttataattcactaaaaatctgtcgcaaaatatcaaaaaattcttttcaaattttcctaaaacttttggaatttcagttcataatctaccaaatggaaatcgacggcattttccctggcataatactcaccgccccctctccccttagatgtgccaagcgtcgcctacattttctctcgctctctgcaattgctccgccacaccctttgtgagtctaccgcataaggtggccgtgggaatggcaaaaagtggggggg

SEQ ID NO: 9617 - DNA, 1832 bp, Heterodera glycines
actgcccgaagaatgggctgctgatgtcaccttaaagcaatttaatttaaataatttttcgaatcgaaaaaaattgccttaaaatgtcatttaatgaaaaaaaggaagaaaattcagtcttcaaaatgaaagaacattgtcgcttttcaatgtcaaaaattaatttcagttctgcccttaagctccacgagggacaacaaaataaaacaaaaaaaaagtggtgataaataaatgcggggacgaaatgccattgaaatcggaaagccaccaaaagtgccaaaactctgcaaaccaccaaaagtgccgttctctgctgacaacccacttcgttttgctgttgctgctccagcagaggttgttgttgtttgtagagcaacgaagatgatgaagcggatgaagcggaggaagacgaagaatactgttgttgatgatgtttgaatttaatggtagaagactctgaaaaaattaaaatataaaaataatttaattgctttttatttaaattttaaaatttaaaattacgcgctctgatgacatattgtggcgcgtgagattttggtgaaaattttggccacacattgcgctgcctctgctgcggcggagtgcgaacctataaacatggagttgttgaaaaattgtaaaaaaaaacatccccagtcaatttgggcaattattgaatagaaaataaaaggttactcgcccagtgggactcgaacccacgcccttcccataccaaagaatgctcaaaccgactgagctacgggactcttcagagatcctctcaggcctttatcccattctctcccacactctgcttccttaaggcctatcagttgcatttttaattttctaccaatacaaagttaaaaataattttaatattcagatttttcaaaaaatttctttcaacgaataattcctatttttttatatatttaaagaaatatttgcaaaaatccaagttttcaaacaaattaaggttagaaaattaatattttcattttttccaatttttaatttccgactttttgttcgaattctgctttggagcttacgtttgtaaacagcgagctctaaaagctcggaagtcatttttgtaaaaaggcacaaagcaggggatgggccaaattgaaaaataaaaagcgaaatgcgaaaagcgaaatttgcgaaactgaaaaatgtgaaatgaaaaaaaagcgaaatgcgaaaagctaaaatatgcgaaaatgcgaaaggcgaaatgcgaaagcgaaattttttctacaactttttaatagttaaaatcataaagcaaaaatcattttttaaaattttattccaaatttaaaaatcaataaaacgcttttttgaggcgcgctttttccaaaaaaaaactgggaagagggggcaggcgccgccgggaaaatttttgaaaatttgattaaaatttgttgacagattttcactaaaaaatgatcaaattttgtgatttttatcatttttctaatgagaaataagagttttggcgcgccgctgagaacagtttttcatcaaattaccaaattttgcgattttgggccattttctaagaaaaaataggagttttgggggcgcggcggtgccgataggcgccgcaggggaaaaaaattggaaattttgatcatttataaacagtttttcactgaaaattagccaatttataggtaaaattttgaaaaattttatgggaatttaatccaattcttaggggtgtaaaagtcgcgtttcgcgccaaaaagcgaaatgccaaaaaatgcgaataatgcgaaaggaaaaatgcgaaaagcgaaacctaggcacatccctgctacaaa

SEQ ID NO: 9618 - DNA, 1022 bp, Heterodera glycines
  unsure (1)..(1022): unsure at all n locations
cccccccccccgggggttcatgacgacgaccacctgctgcagctgttcaagttgcgccgcactccccggccacgcggtcagcatgacggcgagcgtcgctttggtcggtggtgccgtcgtcgtncgatgttgcgtaaacagcaccaaccagtaaccgttgtggttgtcgcggcaggtgtcgttgacgctggtgccgtcgtcgttcgtcgccgccgttgtcgtcgcgtgcgatgtgccgccaccgctttggcccnaacagcgggcggccgcggcggcgatgccagcaacaattgttttggtggcgccgacggcggtcgttgttgcccatctttgctgccgctgctgctgttgttgtgctggtcgctgatggtgtttgatttgccttagtttttagaatatttttaatatatttattgtataaattgatttttaaaatgattttttcttttcattttttaattttcttgtcacaaaatatcaaatacatttttttaatgcaaattgactttttttttaattttcgaaaaagtccattcttaggggtgatttttctattgatttttgttaagaaatttttcaaaaagtcaataatgccaaaagaattgcaaaacgccaaaataatgacatttttatgacaaaatccaaaataatgattttcagttgcgaataaagaagttaaatcagaagagtaaatacgctaaaacgtgtttttttcgtgcatatttcgtcgaataaagtcgcaaataatcattaaatcacttaaagtatcagaatatgcttaataatgcttacttatatcacatgggctttatgtctttgtgtttcaatttttgttattattctggatttataaaatttcaaccaaaaattggttcggtttttccacgcatttcaatagcaaaatcgatgcaaataaacggtttaatttttggtagaaaattgttgtggcatttttctttctgccgccgccatttctccctcaggggggctggtgccgccgccgctgttccgtttcaacggca

SEQ ID NO: 9619 - DNA, 2240 bp, Heterodera glycines
aatggcatcatcttagctgtgtgatctaataggttacaggtccaaaatgaagaactgtacttttttataaagcaaaaagaaactatatataaatctggatacataaataataatccgcgttacgaggagggttatatatttttgtgaattgccgcgcaaagccacctcgggaccgcacaaattgttggtttcgaatcaacacggacgcacacagttcttacatggaccaagtacaagtcgatttttcgagaaagtataacaaaaaataaatccaaatatgtcgagataattaataatgaggcaattaacgggaggatggagtttctgattttttaaattataactacataaataatatactaaaaataatgtttggatttcatattaataaatttaattttgctataattaacaacaatacatttgtaaactttttcaaaaacagaaacattggataaaataattaatagtaaaatataagattattctgctcgaaaaccaaaaactaataaaattaaatcagtccaatacgttaatataaatttaaatattgcgacgccaaaagactctgaaagaagacaacacatcaagaaaattttaaaactatatttacaactaaaacaaaaggaaacaaattaaaaaatagcaatataacacgaataaataaaatcaaataaatttttgtttaaaaaataataattaatttaaaccttgaaaaaagatttattgattcatacaaaattttagtcgtaagactaaactgattattggagattattggagaaaaagcaagattaattaaagtttaaagaaattattttaattttctcaattttaaatcaaaaaaaaaattattatattttttaactaacatcgaatttaaaaataaattgaactattataattttttaagaattttcgaagcaaaataaatgacaattttttaatttacccaacaaaaattacatttttaacaaagaaaaaactaaaaaaattattaattaaaaaatttgtgacggcttaaatttattaaaattaatacttattcagtataaggctgaaacacaacatgtgggaaaattccatgaataaaaaaatgcatttattaaataaaatgcaataacatttaaaatgtttcatatatgaatttgagagtgaaatgaggaaatgaaacgtgagataacaaatgagcccttaaagaaattaaattatgcatatctgaagaacgaactgaatttgaatataaaatcacagtaattttatagagataaattaactataaaaagaaaaaatatattaaaattcttcacgacgtaattttataattggtaaacaaattataaactttcaatgtcaacagcatataataaaaaatgcactgaattatgtatatgccaattacaaaagaaaactaacatcatagaactaaacaaataaacattttattgatgatgtaaatttattataagcactaatgatcatattaggaataattaaactacaaataaacaatttagtaaaattaaaaaaatattaaagtgttttcacaaataaaatctgaggaaaatttaaaaaaaacattggagtactggatgtgctaaaaacaataatacatggcgagaaaaatgacccttgcagttgactaagaaaatgaaaaatttatttaaaaaatttataatttatattaattggattaaaaaattaaattggcaagaattgttgatatgcatattacaataaaaaactaagttttgatgttataatgtattataagcactaataatcattaagaatattaaaccaaaaaaactatttagcaagatttaaaattataataaaatctgagcaaaatttaaaaaacgttaaagtagtgggtggatatgataaacccattgttacgtggcgagagaaatgacccttgcagttacttggaaaatgaaaaatttgtaaaaaaaaatattcttaaagaaagcgatgatcaaatatgaaggtaatacattcaaatttttctatttaccttcaattatttgaaaataattgcaactttaaaatagttttcaatgagaaaaacatatttaatataataaatacaaatattaaataattaattagactaatgaattaaaacaaaagataaaattctttcttaaagaaggcgctgaattaatattaaattaaaaaaatttaaatttatctaaatttggtaattgttgaaagaattacaaatatgaaacagattt

SEQ ID NO: 9620 - DNA, 1968 bp, Heterodera glycines
  unsure (1)..(1968): unsure at all n locations
agtcgagatttctctagttgtttgtcaaaaaaattaatctatgcatgttataaatatattttattatttaagataatttgcttaataatattaaaaaaattaattataaaataattttatttgattaatttgcttagtaacacttaaataaataattataaaatttttgcggtttccgcaaaatacccatttttgcgggtttcgcgcaacgacaaataaataattctatcaaaaaaatttaaattttaaaaattattttctaattaaacgaattaaattttgtcctcctagcaaaaatttaggggcttaagtaaattaatgttttacaattttttacctttttaacagaaaattgaattgacaattttaagctcatttttcactttcattttgttatttatttagctaatttaatgtattttacttcagttttttgtgatattttctctaattccattaaatttgtcttcaaagcatcaattcagtgattcgattaattgtttttcctagggctgattgattcatcggtcaaaatgtttatgattgtattattctgattgaatgagcctatctctacaggaatttaaacacaataatttatgtgaagcgtaagatttaattgattttaaaattcacaaattaataatatgtcataccaaataatttaggtttcaacaaattttgcaaaatatttaagagaaaaacttattaaaataagtaaaatttatatgtattagtaatttaaaatttatcttgtaaattcttatttttgtaaacttttttatctaatcattggtccattactaagtctgccaattaaggtcatttatgctttcaggcagacaagcggtcggacatatccagccagcttccagcaacatagtataatattcaatgtttttctaaaatatttttgtttacgattaattctcttattttttctttgtgatttcgcaacctttaattatttgctgatctgatacgataccctttcaaatatctataattatattatattacgcaagaataattttttagaagtttagtttctctttatttttattcttgcaaatttccatcacttttaaaaatttattgtaaaaattttaagtaagaaaatttatttataaaaattattttttgaaattttattaagaaattatgcttaaagagattaattctgtctgcagtcatttttccaattataaacttttttgccgagagaagaatattttctctcattcattttttttaatattgagaatattttttattaatttctaatgacaataatatgtttttagaaaataaaaattttattaattagaatattaatatttcgagttttctatttttagcatcactttaattttttgattggtagctttaatacttgcccattgatgtggttcggcaagccggcattggtgcaactggcttttatgcaatttaatctccattttttagtatatttatcaattattcactaataattctaatcatttgtttttcgtcatttttcttttgattataaaacatcaactaaattatttttattaagttgtaaatttaaaacatttttttcataaggttggcttaaattttttgtaatgtatattaaaatttttctaataataaagaaaacataagacaaatttctcgaagtgatttagcttggcggtgtttaagtaaattttaaatattttgttgaattaacttttaaaatttttacaaccctccgattcccggatactaataaaaatatgattgatttattgcaaagttataagcaaaattgtcgatgattttttgtcccaaaaataaaattttcaattttttacaaaatttcaaaaattaatacataaagttttagggtttatttttgtattttttcttctanaatgcgttgagatatcaaactcttatnttttcacatttaagaacgaaaaaatgaaaaataaataaact

SEQ ID NO: 9621 - DNA, 1155 bp, Heterodera glycines
  unsure (1)..(1155): unsure at all n locations
aaaaatgaaaatataatattttaagtattaataattaaaacttaanaataaatntaatatagtaagttgtttaaaaaataagaaactaaaataaataaatttaagaaaaataaaaattaattaatttaaaaaattagagtagaggggaccggggaatttttggctgggaaaaccgggaaaaaacccggggactgttcccggtcccggtcaaaaccggggacctcggtactcagttgtactcagttgtccgtgttttggtcccggtcccgctctactctataaaaaatataataaaactaaaaactttacaaagacgaatattatttacttaataaaaagagcaaaaagaattaattaaatttttaacactttcaattttttcaatcaatcatctttaatctgcaaaaatgttaggcctttctcatttaaacatattccttcagctatttctatctgaaaaattaaatcaaaatacaatcctgaaatgtaactaaatatgtatttcatatattcggttattaccatagcaaatttaaaaatatatgaatgattaatcatttttataaaattcatattaaattgaagaaatattaaaaataaatctatttaaattatttacgaataaatttccgacgaaaattcaattacaaaattaaaaattttcagtttcgaatttttccaatcaaacaaaaaccgtccgaaaaaataacgctaggacgagaaacttaagaataataataaaaataagtaatttctaatttaaactttaaaatcaaaaataattaaatagaaatcaaaatatgcaaaataaaaagagttatataaatagaatgcttaatttaaaaacttgataacacaattttgacgaaaaaatggaaattaaacattattattattatcatttattattaacaagaaaaaataaatactaaaaacgctaaaaatacaaataaataagctaagctgaatccgggagaaggggatttcattttagctataatatataataatattcaaaaaagggaatgaaatattgaaaaatactttatccccaaaccccaacgtgaagaagaaatcccactttcctatgcgaggttcgagcactgctaacacataagaattaatgaaagctgctcaaatataataatgtatcta

SEQ ID NO: 9622 - DNA, 1460 bp, Heterodera glycines
  unsure (1)..(1460): unsure at all n locations
ggggtgctgttagttttcgacagtggtgatctcgacagtgttggtttcgacagtgattgatttcgacagtaaagcttgtttttaaaaaaacaattaaaaattactgtcgaaaacacctggtacggttcttagattacaaaaatttaaaaaataaaattagtcttttcgttttgataatttcgtttcccttttccttttcttattatttttctccaagtatttctgcaaatgttttttttaacttttttcttttccattccagttttaatttgaacaattaaaaatgcaattgaaaagaataatagacacaatttcattattgacaaatattcataaaaattaaatgtgtttttcgtgaattttttggcgaatttttaaaaaagaataaaaattttacgtggtgttccgaactaggcttttgaagggaaaggctgtatattcagtcccaaaattattataataaattctttaattgttttaatttacttttccttataattataaattttaatatttaccaaaaacaattattcgcagagattggacataatctgttaaatagccataacaaaattttttttacatctataaaaaatatatttgttagaaaaatatccaaaagtgttttttgaaaattgttggaagtttagatatttggatttttaagtacccaataaaaattcttgagaaaattctacttctcgagcctcggggatgagtctctgtttaaaaaaaacattttattttttggaaatgatttcaccccacctcagccatatacccccacactactcgcacgttaacaaaatctccaacccgactcctcctcctcctcctcttcgtcaactgcgtcagcagcggttggtggcggcagttcagcggaagacagaggcgacagcggctaagggccgttggctctacgaattggacgccaaaaaatatgccaagaatgctttgcgtcagcagcgcatcaacctgaaaaatgggcctttgtactgcgccggctgtcatgcactgggcaaccacgtcatatcggactgtccaatggacaaaggtgtttttgttttgcttgataaaaaaatatgctaagcaacttttttaggaagatatgccgccgcctcagaagacgcagcgcaccaggctgaggattgtgtgcttttttgccgctgtcaatgctgcaagctgcggggacacaaacccaaggactgtgagacccttatggcctggcgtaagtttccatccatttgtatttacatctatatatatacatataattgtactattcaggggaacacttggcaatggcgtcagccggcaaaaagcacacattccttctcggacacaagcggttcagctcaagaacctacatggaggagcatgccgtttccgctgcgtcagcatgggaaggtcatgggtaatagtgctagtggttatttgtttaanttaatttgttttaaaaa

SEQ ID NO: 9623 - DNA, 1754 bp, Heterodera glycines
tgaaaaaatacataaaaaatgatgtagtaattaagcaaatgatcattgcatacgatatcaaagagaatcgcaatgacgctgatgtgctttcccacttgtacgcattacaatatcgtttagggatgaagggttttgaagcgtgggattagaattttaacgatgaaaataaaagaattgttgttgataaaaattttgtcactgtgggtgggcgccgcaaaagtcggcgccgcaagtgtcactttggctgggcgccgcaagtgtcggcgccgcaaaaaaaatagctgcaaatgtcgggccgcaagtgtcagcgccgcaaaagtcggcgccgcaagtgtcactttgggtgggcgccgcaaatgtctgcgccgcaagtatcggcgccgtgaatgtctgcgccgcaaatgtcgcatcacctatctatgcacaaaaataaaataaattggcggcgacagtccgccgtccccgttttcgtccgcttccacagcggcggacctttcgcccgattggtgctgattagaattgccaccggcgccgcacccgtcgaactttgggcctcaccatcagctgcagcagaataatccgtcgttgttcagacagcatcagataatcgtctcgttggtgtttctcgaaactatgaaatgtgcccgtaatcattttcaatgttttgttattttttcgttgttaacacattgataaatatgttgttattgattttaaaaattttttcaaaaaaaatctgagtagaatctattttggacaaaaacagcttgccgtactaaaccgaccctccgactaaaccggccggactaaaacggccggactaaaacggcccgactaaaccggcccgactaaactgacccggtccgccgtttcaaacatttttggactcaaaatttttaattataaaaatgtgaatagaagcttaaatatgtatgtgaaaacagttaacattttgattaagaattaataaaggaatattaaaaaaaaacttgacacgaaatttatgctgatttaaatgtaaatcttccaaaaataaagatatggacaaaggccagggccagcagacttaaattaaagaagcgaaattaaatgaatgttcatttaaatgtagttgaattatttggccaataaaagttcattttaaagttgagattgacttttttttggttcgggattcgaaatagatgtaagactcgctgtgtaaaaagtggagaccacttgcaaatgttcaattattttggccttttgtttatgtttgtgattctcattttgtgttatttttgtttctcagacttggaattaaatttggatttgcttccaataaatgtgaagcatccttccatagaatcgtaggtccggcgcttcttgaggaagagtagaattataaggatttcaaatctaaaggaaaggccttcagggagtgggccgaccaagcctgagcgactgttgacactagggttgagcctcgacccctcggagggcaaaaaatatcgggggacgggggccatcggcggggggcgcaatgtcgggggtcgggtcggggggagttaaattgtcggcggtcggggaccacgaccgggaagtgatcaacaaatttttaacataaaaacccaattcttctttttaatgctcgtaaataaagttttaagaactcaaaatcatctttttcttcacattcatcatctgattctaattcattccgttggtggccagtaaaagtgccgtcctcgggcgcagggttggcggttttacca

SEQ ID NO: 9624 - DNA, 1258 bp, Heterodera glycines
  unsure (1)..(1258): unsure at all n locations
attcattcgtgggtgccagtaaaagtgcgttctcgggggcaggggttggcgttttaccatggtacatgggttaggtacccataaaccatgtcttttactgtgcgttcacaaaccaccaacatcatggtcaaatgancaggttaaatgaccatgaacccgtggttgctcattgctacgggtaaccatgatggttgtggttatttaaccataacctccttcttttactcggccccagggctctaataatgcgtaggtccaatcatgatttaaaatttgtacttgtgtttgtaaataaattataaaaaaattgaaaaatatattttaaaaaatatgtacaaaagcaaagaaacaattatcgtaaagaaaaaagcggtcaaaaaaacaaattttatctcattaattcagttctccttaattacttctccaaattgtttcttccatctgcaaatggtcccttgattaattttcaatatttttgcaatttttacgtcactgatttttggattttcttttttatttgccaatattgtttcgttttttccatttttgctttttcagttttcctttcgcccataccaaattgtttcttccattcatcgattactctacgactaactctaattttcttgccaatttcggcataattttgttggcattcttttctcgaatattttcttcctttttatttttattgccataaatttttgcacaatttcaattttttgttcatccgtttttgatttgttgtggcatttgtataagcctaattctttgatccatttataaatatatttgcgatttgggcccaatttttttccgattttcaattcaattttattccattctttttgtggaatatttttttccttttttcttgattttctcttttattttgttgaattttcggattattatttctctcgtttcttctttattttgattttgatcattccgtttttcttcccattttccggtaggtgaagattcattgccgccgtttcgctgccgccctttcattgtcagccgtttcattgcccgccgtttcattgccagacgtttaattgcaggggtcgtttcattgccaaggtgggtctcactgccaatatttttcggtaccatattatttcactataataattaaattaacacatttgctactagattcgaacttaaagcaatttaatttcaacaatttgacaataacaaaaaatcaggggtccatcgaacaattgtatgagacaccagcaagaaaatcaat

SEQ ID NO: 9625 - DNA, 4595 bp, Heterodera glycines
  unsure (1)..(4595): unsure at all n locations
aatttggtgatttgaacgaagaaaattgacgacagagtgatcgatgtaactgcaaaaagggaatgaatgaatgcttttattgccaagctcagattttgaatctctttttttttaaacccaaaatattttaataaattctcttcatatttttctcattttaactacaaatatgctgaagaaattgttggggtgttctttaaaattaatcaacatttattatataattgatgtgttaatttgttttgtttatttatttttagtttttattgcatatgttttttgtttggcgcaaaatatgttaataaaatagataaaattttcaaaaattatgtggtcaccaagccaaaagttgtgaattttttaattggaattggccttcccccggtcgcggtccccatttttgtagattactatttttttctgcggctaccaaaaattttcaaaaaatcaatgcaggatcctgctgaatcctgcataaaaatctaatttgcgggtcctgttgcaggattagaattcaaaattttttacaggacaggatccggcaggattaatcctgcaaatcctgtattttcccaaaatatgcaggattgcggactgggatcctgcaaaatcctgcgcaggatcctgtcctgcgccggtctctacttgccattctccaaatagtcgtccattgtttttgcattgaaatgaccttccaaaaggccctggagagtgaaaaagtgccaacaatcaaaaattaattgctcaattaataattaattaattaccctgatgaacaaaagaatgtccactgattgtgagccgaacacgagaaatggtcgatagataacacaaaagttgaccatcccatgggctgctccgtcgttggtagtcgacttcttcaacagactgaacttcttgccgagttcggcgtgtctttcccggtccccaaattgtgcccggccttggccctctttctcccccaattctctcagcaatttgatttcttggtcctcattttgctcctcctcctcctccccctccccttttccgtcctcaattcccccctcattcgcctctttttggccttcctccgcatccatcgctgcgttcgccaaattttggtcgaaatgccaaagcatcgtttgccattccgtcgggtcaatgttcggccacattttggcagtgaacaccagcagcagtggtgccccgttgtgctgctgctgctggtcaattagcggacaaagatggcaaagatcatttgactttgacttcaatttatttagttatttattttcacattattttgtctttttaaatcctgtgatcatcactttactttatcacttactctacgacacatttaactgaatagtcgtcagagtaagtggttttcgcccttctgatgacttttttatttttatgaataaaataaaaaaataaagaggttttttccataaaaaacattattaccactgataaattatgatcgatcggtcattcttaattaattcatttcttctgcttatcattgtttttatttgttgctttgtccgtcactcattgtcagaagacggctcatttgtgatgctttgtcccgcttcgtcttcttcttttgctggtggtggcggagacaatggccttaattaagcgcaattttaattatttatttttattgctcacccaatgcaattagtgccatcaacaagccaaaataacacagtgttccaattttcatctttcttttgatgctgaatcgccgcggtctccccaattttgcatcgtttcattatccaacagttgatccattcattttcgttttctttggccaatgtcagcttttcctttgtccattcgttcaccaattcaaatggcacaatttccattgatggcacatgaacataaaaatgaatttggtaactgacggaagaaatggcacggagaaatgcctaaacaaattggaaaacaaaaatagaggcaatcaaaatcagtaaagttgtaactaagtcgcagaccatttggccaaatggtctgcgactcagccataacaaaaaaaaacgaaatttaatcaccaattccatcaggcaacagaccaaatgaatgaattgaattcagcagtttgagatcagtgagaattgttggcgaaatgcgacgacgcaaattgtccaactgatcaccattggtaaagcccaagtggcgaatgtttgacgcaaaaattggacatatttcacgaacgaaaatgtcaaaaatcagctggccatccgtgatgtgtgcggaataaatccacaactctaaattggtgcctcttttgtcgaaaatttggtgatttgaacgaagaaaattgacgacagagtgatcgatgtaactgcaaaaagggaatgaatgaatgcttttattgccatagctctaattttaatactcaatctgaaggcgcttaaaacgaatttaattcgcttttgccatcaaaatgtttgtccaccaacgaattgaaacgtggcgaaagcagtgccaatttgaggccgagttgggcatggtcaaaacaggggaaaatgtccatccaaacatcattggaaatccaactgaaataatgaaaatacctaataaaaggatatattttcatattttttgtagaaaattttaactttagtaaagagaattttaacaaatattaaacgataataattggcgaaacattggcaattcggaaaattgccttatttcttaacaaatttcattaaaaattcaaaatttttacgatcgactaataccgatttgtgaggaaaattgtcgatcgtaagaggagaggggtagaataattttctttaaaatttggcttaaaagcataacattgttaattttttggtgaaaatttgctagaaatatgcaaaacttaggcattttttggcaaaaatcgttaacaaatcgcattaaaaatggaaaaattgttcccggcggcgcctatcggcaccgccggacccccttttcccaaagtttttttgaaaaaagcgccgcaaaaaagtcgttgcccgggtgggaaccccggacccaaacggaaatcttgaaaggaataggcgttaaaattttttaataacactggagaaaacaatgaatgaatgtttgtttgtatgtatctttagaatctgttcggatactgaccagggttgttccgggacgagaaaaatatcgggatttgggtttcgtgattcgggtcataaatattttttatatatgttcaaaaatcaataagaaaattatattaaaactttttgggaatatgagggagggggggggggggcgtcggcggtgccaataggcgccgtcgagaaaaatttgaaattttgagtgagattcgttacagattttgtcaaaaaaccaaatctttggttaaatttggggttttagactgttgaaaaaagaaaaaataataatttttaagttgaaatatttgtctttaattaaatttcaattgaaataatgtgaagaaaatataaaaaattcgtgatcagcggcaccagaaacccctataaaatgtttaggtatacggctttttaaactaaaaatttaatgggcaataaaaaggtgaaaaaatttcaaaagagtactctcttaaagtagcgccgaaaaatgaatgaaataagaagagaaaaatgagtttaatgagggggaatttatgctctgaccgaagtggggtcatttaaggattagtcatgaaggagaacactaattagggtaatttgggagaacactaattagggtaatttgggagaacactaattagggtaatttgggagaacactaattagggtaatttgtttatgcaaaaataatgacatttcatttgtccattttttccacctttttttgcggtgcgttttttaaaacttcggggacagttggggtcgggcggtgccggtaggcgccgctgaaaaaattttgaaaattgtcttcggatttgttaacagattttattcaaaaaatgaccaaaacttgttttttttattttttgtttttaagtcgctttttttgtggcgctgttttttcaaaaaaacttttttggaacattgggagcggggtccggcggtgccgataggcgccgccggaaagtttaattgagaacactaattagggtaatttgtttatgcaaaaataatgacatttcaaattgggcagcgaaatgacttcgtccgtcccttcccatgcccttttgttctttgttgggtcatttctttgcttttggcagagaatttataaaaatgcaagccagcagaagacaacataaaatgcattttattaagggaatgaaacaaaccatattgggtacagtgcagggctggccctgattgaatttccaatcacgggaatccgtgagccgtgatcacggcaccacaaaacccccgtgatttccgtgatccgtgattataaaaaaaattttcaaatgatttttttaaatttaaatttattaaaaaagggaatttaattgctggaaaaattcccaaaagatatttttaagaaacaaaaaaacacaatccgctttttttgcggcgtaccttttccaaaaaatgactaagtttacgatgtgaggaaaattaaaactttttgtagaaatttccanagaa

SEQ ID NO: 9626 - DNA, 1391 bp, Heterodera glycines
  unsure (1)..(1391): unsure at all n locations
tatatatggtcaaattcgttgtcaaaatatatatattttaggttagtaggcgaaatgaatgttttttggttagtaggcgagatgtcgagtaggcgaaatgaaggtttttggcttagtaagctcaatgaatgttttcgggatagtaggcgaaatgaatgttttttgcttggtaggcgaaacgaatttttttggcttagtaggcgaaatgtcaataggcgaaatgtcggtaggcgagatgtcgagtaggcgaaatgtccgtacaccaataaaaaatcgtgaaacttttaaaaggatttctcggattcattgatcattttgaccttatggtgaacatttttgaaacattattttttgaatttgatttagtggttgttttttttcagtttgtttatttggtttttgtgttccttgcgtgaaataattatgccgatgcttaggcttaatgtttaattgttattagatctttgtttttttgtctaatttttctgatttagccaaaattgaagtgaataattaaagtaaatttcaacaggtttaaagtttctgctctgccggttcggcaatattctcattccacactaactgccggtcggccattcatcatagtgcgtagcatttctgaataagttaaagtaattgtcttttgtactcagaattatgtaaaaagtgagctaaaatttgtatttgtggctgagactgtgatttagtttttccatatataattgtatttgcaaaatttagataatgaactaagtgtcatggaggcctaacatttgttgaatgcattgggatattagttttgtgtcagtcaaccacattagtgtggtgtgtggttcgtgttagacaatagtgtggtgtgtgatttatgtcaaacaaaaaattcactaacaacggctgttaccagcatcatctgcagtcaggcttttgcaagcggtcgaaaaagtgcatacatccaacccattgagccaaaggagcgcgacccctaccgcattgttgcatttgatttggaaaccatgcagcacatgccatctaaaaagcccgaaaagcgtgaacatttacccaatttcatcgctgtgcgtgtcgcatgcccctactgcattgaaaatgagagctggcgagaggcatctgaagggtgtgaagtgtgcggtccaagcagaacagtcgccttttgccaacgccacttcactgaaacaacagtcgacaagcaagtggtagcggaaaacccattggaagcgtttgtcagttggctgattaacgacttgcctttggcatacgacacctatgccttctcgcactttggcggccgcttcaatatggtgctggtgttccgcgaactgttcaaacgcggatacaatccnngatatgtgcgcaaggtaattgactatttttca

SEQ ID NO: 9627 - DNA, 3428 bp, Heterodera glycines
  unsure (1)..(3428): unsure at all n locations
agagggcgagaaaattncatattatgaattcacgtcccctctaacccgtacgtaaagtgagtttgtgtttcggtcctttacaatttatacttttattttctgtttctccacccacttacccganntgaacatccaaaaggtgctcatcttgaatgaggatgtggagtggacaagagcacgggacaacccttacaaattgtnctctgctcaaggtgtgggtgatccctccgcggaagtgcgatgtgccagtgctgcccgtcaaagtcaacgaacggctgtgcttcccgttgtgcatgcagtgttgtcttgactacccaaaaggaggcgttgattttgactaccattgtgaacacgacgaccaacaacgcggctgggtaacaacatgcacatcaattgaattggatgctgcgcttaatgagggctaccgtgtgaccaaagtgttccgggtgctaaggtacaagcatggcgacgacaagctattccgcccatacatcgctgaattcatgtcgcaggaaattgaagcctccgggtaagagttggagcagcagttcatcacgaaactcggaatttcaattgacaaggacaacatgaaagttaacaagggaaagcggtcgttggcaaagctgtgtctcaacaacctatgggggcgcttctcacttcgaaactttggccttgcccagacgctaatcaccgacgaccactctgtgttaacggaatacttggataaccgtacagttgacgtcacttccgttgatgagctggacgacgaacaccttttgatcagctatgtacagaagaaggaatgggtggagaagcacgattgcgccaatattggtgagattttttcattaatttttgcataatttttgaaattttttcagtcatctaactctggacaacatcaaagtcacgccttctgctgttgaaagcgatgcagaaggtgatgagaacgcctggatgctgactgctgtacactgacaccgactcgttgattttcgtccatccgatcggcatgaatccactggagacaggaccacatttggggcaattcatcgatgaataccccaagcatgaaattgtggagtattgtagtggcggagcgaagcaggttaatttacccttttaataattcataatttattcatttcagtatggactcaaactccgggtaatgggcaggacgaatttgtactgaagctgaggggcatcacactgaactacgacgtgatgcagaaccagtccctctgctacgacacattcaaagaagaagtgttgcggtacgcccaaaccggagaatatgagccaatcaatgtgatgtaccccaactttttgagacccgacattaggagtggcggacacgtcacttcaggccccttccaaaaatgttacgttcaccattcattgtatctctcacacacgcataccctatacacacacacacacaccccatacccacgtaccagggctggccgtgatcacggatcacggaaatcacggggtttttggggtgccgtgatcttggatcacgggtcacggattttttcaaattttccgtgattttgatccgtgattggcattttatatagggaatttttattgagacgaaaataggaaagtggtgtgaagaattttttgagaaaaataaataaattcttttctgcttacaaattcgaaagtaaacatatatatgtagtctggtggttaagccttctgtctttcgttgtctgtcccttgggttcaattccccattgggataggacaatttatatattttgttttgataattttaattgaaatttaattaacaagaaatttcataacattgaaaattatttttctttattttttaaaacgtccatataccaataaattaaccaatgattggacatattttggacaaaatctgtcaacaaattcactcaaaatttcaaaatttttcccggcggcgcctgtcggcaccaccggcagacggacccccattttaccgtatttttgaaattttgaccccaaaatggcagaaaaattaccatttttggcatataaactgctaaaaaccctatttcttctctccgtcgcttaaatttaaaacgacaggcctaatcaaaattttcagaaaattttcccaaccctctaagaattttttctaaaattttcctgactttcagtatcttttggggtgttcagatcgtcatgaaggactgagcatgttggtccaaaagatttttttcagcatcaaaagttagcttacaaattagaggaaatttttttctctacataaatagatttttggttaaatttaagaaaaatttgaaaaattttcttaataaattagttaaaaataaaaaattttccttggagatttctacaaaaagctctaattttcctcaaaaaattgccaaaaatcgtaaacttagtcattttttggaaaaggtcgccgcaaaaaaagcggtttatatgttttggtttctttaaaacatttttgggaatttttcccgcgattaaattccgttttttaaataaatttaaataaaaaatcattagaaaatttttttttataatcacggatcacggctcacggatcacggaaatcacggggattttggggtgccgtgatcacggttcacgggtcacggattttttttaaagccccgtgatcacggctcacggatttccgtgattggaaattcaatcacggccagccctggtcagtacggctcttcattcagatatgtataaagagaataattgtatttttttattttcaggtatgcctaagtagttaacaacaacttatttacaattcaaaaattaaatggatatgacatcggctaaacttgaggcgttcaacaagcttgaaaataaaaaataattatttaattgtttgctttttatatttaatttgttgaaatttgctttttgtttatgtgactctacgggatgaatccaaacatcaaattgtgtaataaaaattcaaatttacgttcatagtttatttggatttagaagagccgcactgaagaagaagcccacttttccatttattttttcaaatgaaacatttttcacgaattttgcgcaaatgtccgcccacaaattccctctgcggattaaattcagtgccgtaaatgttttctgatttatcataatgttctgatttgtaatttctccgatgtgccttttgtcaaataaattttttttaagtttcaaagattaaattaaattaatttttttttgtttttccattttaattccccccccccccctttatacttttggctttgttcttaaattaaaacctttgttcgcatggcacctaaaaagggtatggaagttcagcacgcaaaaaggtcatttttgagtaactattgtaacggatacgctgctacaatattaataccctctcctaatgggcatcgatgttcaaaaag

SEQ ID NO: 9628 - DNA, 1891 bp, Heterodera glycines
  unsure (1)..(1891): unsure at all n locations
cacgtacacacgcatgtaccctctttgtttttcatgttttatactcaaattgtgtaattttgtcattttatttgcgtttntaataaaaatgagtgcataattaagcaatggaagttacaatttggaaattattaagcatgtgggaacgtcatttttaggtagaaaaatgcagaattaagagaaagaagttacaatgcaaaatatgcatatggaaagtcatcatagaagcttccaaccgagctaaaaacatgtttttcgtgcgtttcatgcctcccacagtccaggaaaaaaaatatgtatgtgcatataattctgagccatagagataagtttttaggcaaaatattttaacaatcccatcaaacaaaaattttcctcgccgcacgaacatttgctgcgtgcgtatatgtgacgttttgtcggactttgctatttgagtgttgttgtgtttgattcttactagagttgagcgggaccggggcgggaaatcccgggtttttcaggtcccgatcccggtcccggtttttggaaaaacagaaatcccggtcccggttttgccagtcccggtcccggcgggactaaataagcactggtaagaatggggtctgggtgagaaaagagaagggaattgggagggatcagaaatttttgataaaaataaattaaattatttattttcatttatagcatgttttcatatgcataagtggtcaagtggctaaacctttttactttcattatttgtctcttcggttcaattccctgatggaacagaaaatttttttatattttctttaccattattttaattgaatttaattaataaaaaatattttaatttaaaattattatttttttcgtttttaatagcctaaaaacccataaattaaccaaatatttggtcattttttgacaaattctgttaacaaatctcgctcaaaatttcaaaatttttccggcggcgcctatcggcaccgccggatcccgcgccctcccactgttccaaaaaagttttttgaaaaaacattgccacaaaaacagcgatttaaaagcaaaaaatttaaaagattgtaaatttattttaaaaatacagaattttgggactcagaaaattccaagaaccccccctgaaaacaaaatttttaaaaattttcctcgaactcgtcccccaaaacgtaaatacaaaattttattggtacatttttgaatattggcaattttcgtaacaaagtgcacttaaattttcaatttttttcaaaaaaattttcacttgggaaaagtcccggttggtcccggtctcgggtttttcgctgtcccggtcccggtcgaaaaacttggtcccggtcccgacttttctggtcccggtaagtcccggtcccggtttttgtcaaatttcccggtcccgctcaactctaattcttactcataaatatttgaaaaattaaaaacaacacaggaaattgtttatttaatgacagtttttatgattctcccatttttttcgtgatgcgacatgtgcgccgcagacacttgcgtcgcgacatttgcgccgcccagccaaatcgacacttgcgccgcagacacttgcgccgcgttttttgcgccacagacatttgcgccgcgatttttgcgccgcagacacttgcgccgcccagcaaaatcgacatttgcgccgcgacatttgcgccgcttttaaaaaattttaatttcaacaagatatttaatcaaattaaattgattaaattagttccattcttcaaatcccttcattcctgggcggtattgaagggcatgaatgtgtctgatcaaatcatcattgtttttgttctccttggcatcataggcaatgataagcctccttattgcctgatcatttttccgcatatttttt

SEQ ID NO: 9629 - DNA, 2948 bp, Heterodera glycines
cagcttgctgcctgaggtcttttggcactaattcttctgacattttggcgccctatccctaaataagcaaaaagatggcaccaccaaaaattcgattgaagcccgggcgagggatggacttatgctagggagcggggcgagggacgcaaagtcggccaagtgacaaatggcggatgggccaattagccagggatttcccagcggacaaatggttccattaaatttttgggtcgcgggtttggaaccggacgaatgaaagaatttccgattaactgaagaagggcgatttgctgtcagatttgaactgacaatggcatttttcaatttaaataatccgaattcataccgtcggtcattttcataaatattttccgctgtttttttcctaatttttaattgcccctaatttatttaatcgaaatttcgtccttaaaaagggaaaaagcatcaaaagagtctctcctgtgcatttcttctgccccgtcccttttcattccttcattcattcatggccaagtcagctttctcatgttcatttgactggataaattggaccctcccccaaaccgtgggtttctctgctttttctccgcttatcgcttccgtggaaaaataaacgaacgaatgccctccgatgcatttaatcggaaagccacacacattaacacacaaaatgggacgaatgaattgtaatgtgcaaaatcaatctcaaaggaaaagcggcggcgctcgaaaatcgatcgattgatgggccaaaggaatgaatcatttcgaaatgccatctccgaaaattaatttcaatgcctgaatactttctttcactcgtttgtcagcttcttctttgtcccttgtcacctcttcggacgtgagtaacctgctcacaagcgaagagtgccaaagtgttcaatggcacgcaatgcccgcccccacaatgacgggattaaaaatagacaatttttatttttaccaatttaatgccattcgaaaaatcaaaaaaacaatggcaaagaatgcctcgtaaaatccattatgtaaaaaggtgtttttagctttagatttggctaggtgtcagttcgccgttcaatggtttgtccgcccctccgtccgcttcttccgctcgtcggtctgctcaatgtttcgtccgcgtcgccctgccgctgccccgcgtcccctcccctctgccaatgaatgcgttcccttccgttttgcgcctccccttcgtcctcttcctctgcttcttcctcgttcttttctcccccctctctgctcctcttccctcttcctcctcttcttcttcctcttccgcagcgtcgctttccgttttttcgcgcgaggacgtcgccctcctttaccaaaggctcaaagcgacaggggaaaggacgaaaaataacggcacactaaatcgacggacaacggcaaaagttacgacagaagcggcaacggaagcaaaagcaaatgaagaaaaagggagcggcggacggaggcggacgacgccgacggggacgaagacgcggcacaagtggcgcaacagagagcagcagcggaacaacgctaaaatgagtgagaggggaggggggggggagacgacggatagccaaacgaactgaatagcacagggagtgaccagtgactgattaagcatcccatttgcctcttcataaagcatcccccccctttggtcaattggccactcactctctcttcccctctttccctctctcttcccctctttccctctctctctctctctcactcttcccctctctctctctcccttcctctctcgatttcaatatttgtttcggcacttttagccaccgtcgtccgcgcgggtgcttctgttccccgacagagtcttgcgccgccgtcgtcgtcgcccgtgccatcgtccactttgagcagagtctcttcccctttctcctcttcgtccacttcctttctgatcagttccgattccctcctcatatgtgccgatcctcggccgacgagcataaaacgggtcaaagaccaacgcattgcttttgtggcaccgcccgcctcccgaaaagcgtccgcgtcgctcacacaaattttatgggtggttttgatcattttgatcggagtgtttttcaccgtggccacgacaatcggaaatgccctcgtaatggtcagttggacggaaggaagggaagcaaaaaattgaacagctaaaattaatccctattgacaattaaattttaattagcgaaaggaccgttttggagacgggcatcacacgaacaatgctttttttcaaaattgtggcaattaatgcaattttaaagttggatgattgaatttccaatgttaaacaattgaattgcttgttttcctctgttttttttcatcccctcggggggggggggaaagtcccaaatttatcaattaaaattttataaaaatgatttatttttttccattacttcagctttccatttgcgtggacaaaaaactgcagaccatctcaaactactttctcttttccctggctgttgctgatctgacagttggtaatgttcaattgtccgtttttcagtgattaaatgtcctttctcccccataggtatcgtatccattccgttgatgactttgtatacggtgggttcttttcagaaaatttttttaataaaccaaaaaatagaagacactccaaaagtgagaaagaaatatgacaacagacaaaaaacacgagaattctaaatggcaataattatgttattctgagcctacccttttgtccgttcaggtggctcaaagttggggctttggttacgcattgtgccaatgtaagtggcaaatttgccaattgtttgctaactgttcgatcacttccattctcttttttctgtcaaatggtttgacatttcttttatgctgatcacttcttccgtcattttgccgggtttatccaacaaattcctcctcccccg

SEQ ID NO: 9630 - DNA, 2631 bp, Heterodera glycines
ataaaacgggtcaaagaccaacgcattgcttttgtggcaccgcccgcctcccaaaaagcgtccgcgtcgctcacacaaattttatgggtggttttgatcattttgatcggagtgtttttcaccgtggccacgacaatcggaaatgccctcgtaatggtcagttggacggaaggaagggaagcaaaaaattgaacagctaaaattaatccctattgacaattaaattttaattaaagaaaggaccgttttggagacgggcatcacacgaacaatgctttttttcaaaattgtggcaattaatgcaattttaaagttggatgattgaatttccaatattaaacaattgaattgcttgttttcctctgtttttttcatcccctcggggggggggggcgggggaaagtcccaaatttatcaattaaaattttataaaaatgatttattttttttccattacttcagctttccatttgcgtggacaaaaaactgcagaccatctcaaactactttctcttttccctggctgctgctgatctgacagttggtaatgttcaattgtccgtttttcagtgattaaatgtcctttctcccccataggtatcgtatccattccgttgatgactttgtatacggtgggttcttttcagaaaatttttttaataaaccaaaaaatagaagacactccaaaagtgagaaagaaatatgacaacagacaaaaaaacacgagaattctaaatggcaataattatgttattctgagcctacccttttgtccgttcaggtggctcaaagttggggctttggttacgcactgtgccaatgtaagtggcaaatttgccaattgtttgctaactgtccgatcacctccattctctttttttctgtcaaactgtctgatcacttcctttatgtctgatcacttcttccgctcattttgccgtgttttatctaaccaaattccctcctcccccgtcagtttggctttgtattgactatttaatgtgcaatgcttcggccctcaatttgttgctgatcagtttcgaccgttacttctccgtcacccgtccgctcacttaccgaccaaagttttcttccttttctgtccaattttcttcccctccgttcagacgaaccactcgcaaagctttgtcgatgatcgccggctcctatttgctgtctttgctgctgtggcccccatggattgttctgtggccttaccttgaggggcgtttcattgtcgaagagagtgcaatttgcgtggttcaggtggttataataaaagagcaaatcacttttttcatcaattatcaggttgtgttcaattctgatcctctttttcctattttcagttcctcgcccttggtagcagtcgcaattggctcagtcagttggtcactgtcgcaacggctgccgccgccttttacattccggttacggtaagttgggttactgtagattgattggttattgtcatggtacggtaggactttagatgatgattatcctctactacaaagtctatctggagacaaaacttcgccgaaaagagcttcgaaaactgcaggatgggcaggcaagtggctaattctgatcaaatcatcggcgtgtgttaaaaggctcaagacatttggcgaatcgagacaaaaaatgatataaaaagaacacggtagttggcgatttgtccgttgtgtcaatttgaatcccgatcagccgatgaattgtgctgatttgtgagtgggaaactctgtacatttggccaatttccccgttttgaatttgcccccacatttttccaactttttccctttttactgtactttctttccccaattgcttggataccgtaccctcgtttctaatcagtttgatcctaacagcattgacagtgcagttcctggcttatcattcaaacaattaatcaacggcactgtttcagcttttctcccccactcgtctcgccggcacaagtgccctccactcgctgatgctcccattggccccgctggtcttaactttttgtcattgtgccaacaaagctttttgtttaacttatgctagtttttgtttgattgtctttttcagtttttttcaacactgattaatttgagataaattgggcaaaaaaaaagaagaaaaattcaaccaaaaaatggcgagagacccaacgcccaaaaaatgggaaaatgggcaggagcttattctttttttgttggataaataattgaaaatatcggacaattcgaatactaatcggatattctctcccccccccccctccgaccgattgataattttttttcatttttcgccgtccttttgcttttccctccgttgcgtttgcctcttttttaaaatttatttaatttttatttctgtgcttttttaagatccgtggcctccactcggccccccaactctcttccaccgatctgagccttcctacgccccataaaacttcgctcggccaatcctcgccggtcactccatcgcccacgccaatcgctgcaaaatcggccaatctgtcaaaaagcggcctaaactttctcgagttggtcaacatctttcaccaactcagtcgacgttcggcaggtatttccaattcatccgcaatacatataacaaatcttacct

SEQ ID NO: 9631 - DNA, 1262 bp, Heterodera glycines
  unsure (1)..(1262): unsure at all n locations
ttgcacaatgaacgttaattgatgtctcctcataatttgctgtgatgagaatgagagaaaatgaccctaaatgttgcaatcaaagatttgtgttaattgataaatgaaaagtatgcttttgtttttttttagaaaaattgtcaaaatatcgattaccattgatatttagtaaactcgccaaaggattattttctaataaaaagaatagagagattttttcctctaatgagttaaaaaaatcgtcactcaaggggcaattaattaattttgttttgacaattcattagcaaaaaataaagattaattaaaatttgaagaaatgtattgtaattttgattaagaattacgtctcttttatgctttgtttttgtgaaacaccaatttttagttaaatattcttaattaattttaatcttccagcaataaaatcataaagaaattgaattttttcgtctattcatttaggttttgaatcgataggtaaaatggttggagaaaatgaaagcagtccaactgaacaacaataaaaagataaaatcattcaaaatatttgtatactatttaggacggcacccccacaaagtgtccaagccacgaaatgtccaaaagagtaaaaacccacgaaatgtccaaaatttttcaaaatttataaaaacaaaatgagtctaatttaggatttttagggttttcggggtcgctgaatacgaatataccctttatattaacccttgtctaaccttaggcccatctgaataacaaaaaactcaaattcgtttggacatttcgtgtgctggacattttgtgggtcagcgtttaggactaattaagaaagatgaagcatttatattaattaattaatttcagcagaatcttggttatataaaattggaaatcaatttatttttttaaataaaaaatttcacctttttttttgcacaaaaaaaaatttattaatcaaaataaatctaaatagaatggactgaattttgcctgaatattttaataatttttattttgtaaaaataaaatattttgttattttctatggttaaaggccataaatttttaaaactttaaaaaggtaataaaaatccaataaattcgactatacattcttttctttaaacatcacctcatgaattttcatttttttagacgaaaaaaatgaataaagtgaagaaaaattctctttgctcattcatttctaaattagccanaagaaaaaaatgaattttctccttttctctttctttttgagcatc

SEQ ID NO: 9632 - DNA, 1105 bp, Heterodera glycines
atgtgcggcgatcaatggccaatgatcttcttaatgccaatcaagcgtttgatcagttgcgaagtcaattggcgacggcaccggcaaatgatttgaacccaaaaattaatcatgcaaaaaatggtcttaatgatgatgaagaagatgaacgcttcagtctcattgaagaccaagaatttccaccacgggatggttttgatttggaccaattaagcgctgttgatcggggtttaatcaacattgcctctaaactattcaaatttctgccaagaattgctggcaaaattgggcagcttttttccaaaaatgttcattacatcgtcaactcggcgtccaatcttgtgattttcaaattgaatgaggaacaacaaaaaaagtacaatttgccggaacgattagaagtgccattgacaccgggcaagttttttattgcattattggcgaaatgttcaaaaataaatcaaaaaaagaaaattgaaaaaatagaaaaatatttttcaatgtttcaaaaaaaaaggaaatttgattctcttaagaattttgtgtttttaattattcaaaattatgacctaatttgaataaatcattcattttattagaaatgcaacaacaaattgaaaatggtcaaccattacaacctccgttagaagcgcaacaacaaggacaacaacaagtgcagcaacgttccttgcttccatctactgcggattatgaggaacatgatgatgatctgatgcgaaacaatgctgaacgttttttgtttctttttcagcaccgctgtggcaaaaattgcagaatgaccgttaattgatggcaattacataatttgctgtgatgagaataagagaacataacacaattaatgttgcaatcaaaatatttgtgttaattgataaatgaaaagtatgcttttgttttttagaaaaattgtcaaaatatccattatcattgatatttcgtaaaccaattaatggcacaatttttttccgtgaaaaagcaaaatagacaaattttcaccggttagctacatataaaagtcataactaggctgggaatttataatggtcataaagtattgaccaaaaaacatgaaatatggaaagta

SEQ ID NO: 9633 - DNA, 2962 bp, Heterodera glycines
  unsure (1)..(2962): unsure at all n locations
gaccaaactttgatgacatattnggcgacggatggacnaaagatgagagtgatcaaacagtaaaaagtgacaaaagaagcaaaataaaaattgaaattgttaatttcttcaaccaaacggtgatgaaatgggaaatgacccaattgatcaaatgaacggttcgaatgatcaaaacattctcaaaagtgttcagagttataaaaagaatgaaactgatcagcaaaagagagaaagaaaaagtgataaaaattgaactaaatgaacgaaatgagaactcacaatcagcagttgatcaaatgggtgaagaaatggaaaatgacccaaatgatcaacaaaaaacagaaatcattcaaaaatttgatgcaattaaagaaaagttgagggaaaagggaaaatttgaatggaaaaatcaaagcaaaattgagagaaaaattgcaaaattattaggaacaaatcggcaattaatacaaaaatggaaaaatgaattaaatctaaataaaaacaaaataaaaaaggaattttatgagatgaaaaagagtgaattcattgaacgatttgatgaatttaaagaattatatggccaaggcaaacagaaagaatttgcgaaggaattgggcatttgtgaaaggacatttcgaatatggaaaaaagaattggcacaaaaataccataaaagtcaaagtaagaattattttagtgaaattaaattgtactttttctttaagaacatcataccaataatgataaattgaaaaagatgaagcattatttgcaaataaaagaagcaaatccaaaaattagtgacgaattaattgccaacaaattggggattggatggacaactctgaaaagatggaaaaaggaatgctctcatccatttgatcaatgatttttagttggtcatgattgttgatgacttttatagtttgaaaatttacaaaaatatttagtcgaaactctaaaaagtcattttttattcttttaaaatgcaactaaattttttcctaattttacataaaaagatttttttcgaaagttggttcttatgagcaacagattgtgaaaccaaattaaacaaaactatttataaaataaatcttgattaaatcaattgactcttttaaaacagtctatgtttgtggacaagttcatcacttttttagaaaaaactttggggaaaatgggaaaggtccagtggtgggggacgggacataatttcgccgccgaaatttcgccggccgaaatttcgccgggacaaaatttcgccgcaaaagatccaaattaataaaaaaaaaaaaaattcgttcgcttcccagcaacaatacagagaagattagcatggcccctgcgcaaggatgacacgcaaattcgtgaagcgttccaaattttttgggcgcgtcctgcgctttgttcataggtttaattacccaagtttgagatcgcattgagtttgagaacacaaattattcaatgtcgcagtcctctgattctctattccccagaacttcttcactcttaaccaacccaaataagcgccttgccaacatcaccccgccacagacaaaaaaacaacatctctctgataaactggcggcggcacaaacaatcatcggtggacttcaacttggacagtcggacggtgcacctcaatgggccaactccctccttggcttctgtgctgagatggtgggaatctgccgcgagcttctctccatggtcaaagagcagcagaatgacaacatggacacgcgagagactagaggaagaacgccgactccactctgtcgtggtcgtgaacctgccggaaagtgaagaaactgtgccctctgctcgtgtcaactccgattttgtgaatgctcaatcaatgctcgacacttgtgagatcgaatgccggccatgtcaggtttaccgaatgggaaagaagtccgaccgcccccgtctcatgaaaatcgaattccccaccaaaaaacacgcccaaaattttctgcggaacaagacaaaactcaaaaatcacaataaatttaacaatgtcttggtccgcccatctctatccaaacagcaactcgctgaacgttcccgacttattggcatttgcaaaaatgaccatatgagtaatcccaattcgaattctctcatttgtgccggccatgttatgtttgcctctgacattccccgttacaaatccaaccccgactcttaaatgtatttgtcatgtgcataatgttgatgactcttaatgtgtaattggtgaccactgtaacacgaaatctcttaaaacgcaagctcttttacaaactaatagaaaatatgaaccccccataaaaaatccaattaccttaaacaaaaaacaaaatcttttatactcaacattgatcaatacgcaatccctaaataataagctagaagaattttctgctatcatagctctaaaagattttgaattggtttttgtaactgaaacttgggcaaaagaaaaaatacctttccaaccatatatcactaacaattacaaaatatatgaagctagcagaagcggtaaaaatggtggtggagtaatgatcttgataaaaactaacctaaattctttttctgttttatcctgttctaaattcaattgcgaaatccaaattatccagataaatggagcaaaaagattaagaatagctctactttacagaccaccaaacacttctgctagtctcactaaaaagattctgaacctcattggtaattatttagaagaaaattttatcattatgggagattttaacctaaatgcaaaagatataacctggaccagtggaacaccttttgctaaatcggaaaagggaaacattttttgtgaattttttaatgtatggcttattccttatgacgaacggaccaactcgaggcagtgcttggcttgatctgattttctcctctagtcctgattttgttaataatgttttaattgaggata

SEQ ID NO: 9634 - DNA, 3117 bp, Heterodera glycines
tttttcagttttgggctttcctatggtgaaatttaagcccgttttagcccggtcaaactgaccgggcctgggaccaggaccgggcttcgaaaattgaccgggacgggccgcccggtaaaagcccgccgggcccccgggcccgtccgggctctaatattcagtgcctattttttttcgctttttttttgccttttttttactttttaggtgctttttaggtacttaagtatttattaatttcttggaatcgtttgattcccacgcggcctcaaataattacaaacaaaaaatcttcaaaaatattgaaaaattttagtcccaccttttgctgtacttgggttaagtgcaaatcttttctttaaaatagttattaatcataacaattcaagacgacacaatttttaaaggatagaataaaaatttccatatcattaatctatgatataaaagatagaaagtgtgtgttaaaaaggtggaaattcgtaaaatggtaatatttgaaaaaagtttccctatttgtcgtcagcagatgatacttctcaaattcatctgttcaaatccaactggttctggtgcctatgaatcaggcatgaagtttttctggaattttgaaacaataattaaaattaatttttaattaaacacttttaaatgctcaaaatggcgttttttccattttatgttaaattaaaaaagggacgccataaaaaattcaacaatttatttaataattattccccaggccccacaaacgttcttctttttccgagtcggaagatgaatgatgatgaggtggtgattgcttcacttccgtttcatcctcagaagaatgatgtttgggtgatgaaggcaaagaagaatgtttgggggatgatggcatcactggtgatgatgaggaggaatgatgcggtgattgtggcttttcagcagggcacgcacatccatcggctattatcaattaaatttttaaaataaatatttaaaattttttaaagcaatttaaccaccaatgtttttatgtaattttttttaaatgattcattaggtttttgcttttccttttatgttgataaattgtaggttttttgcctatttattacgccctttttttttatctattttgtctaatgagcgaataatcgtaagaagaccctaattatattgaaaatttaattatttcgtcataaaaatatttaaagtatttttataaagattaaaaataaatcagaattaataaataacaaaaaaaaatcctaactctacttatttaaatatttaaattgataaaaaaaaactttctataaaaaaacctcgcaacaaactttcttcattatcagcgtcatcggaagaagatgaagaagaatgtttgggtgatgatggtttcactgctggtgatgatgaggagggatgttgcggtgattgtgctcgtccatggacttcaaatttttttattaaatataaaaagtagaaaaaataaattgtacaataatttacattgccattttatatttaaattttgaatttaagtaactgatttaaatattttttaattttatataaaaatgtaataataataataataataataaataccatagcgctcttcgagttttttcaattgtgaatgaattacgccggcatttcctaaattattattattaatttaattaatattgttttatctatttaaacaaaccgaagccaacgaaaacggcagccaaaaggaaaaacggcaaaaatgaaatggttttagtcattttaatttttttggacaaaaaaatagaaattgttttcgatttacaaattaaatgcttacaaattggcattctactgcccattttatatgtttttttcagacaaaaaataattacttttatttttatttttacataaaatgccaacaacttccgctgcaaaaccggaaatgaaattgttttttttaataacaaaatattacctaaacaagcccaatttttagccgcagaaatgtttgccaacatttttaaaaacaaataaacatattttgaaaagcatagattttacattatttgtataaaatattcacaataaaattttttcaattaaaatatccaaagatgataatttatgaatcttggttttattttttttaattttgcataaaaaatgacataaacaaacccgcgcttcaccaaagcaaaaccgcttcattaactaaagttaaataatttgataacaaatgtagaaaccataatttattttttattatttaattccattttcgtacaattttcgcaatgtcagctcgaatttttaattatacttcatgctgatttgaaattcgtaccaaattaacaaaatttgaattaattgttattttcccatttgctgaattaacggaattataccatgctaatttgttgatgacttttaattttgcagctaatccctcagcaaaattttagaattttttattcattcaaagttttaaatttgctacatacaaaaactgtctgttttcaatacaagtcatggagttttgaagaaaaaaaacggcagttttcgtaaaaaaaatttttacagtagttggcccctgtttcaatataaattcaaacgctgattttcaagtcgtctgtgcccgagatgattgcaaatattgtggtaaatggctttagcttctaattaatttatatcatggaaaaaaatacatggaattaattaccttcgcttatgattcaaatttattcctataattgatgatcacacagcttttatttttccggtactattgttttttttttttgtgaatcgttgacgaacaaaaagatgcttgttgatatcattggaaaaatttttagaaaattaaatactttatttcctctaatagagccaccatccgtcaatggacaatctgttaggaaattttatgttttgagtaatgatcaaaaatttcttgcgaactaaaacccgattaaatttattgcttggatttctgcaatattatagttaattaatttaatgaattttatcattttatagaaatttctttactttctttaaatatttttaaaatgacgaaaaatagcacaaattatttattatgtttttatcaatttaaattcaatttcgcgtaattat

SEQ ID NO: 9635 - DNA, 4069 bp, Heterodera glycines
atttaatgatgcattaaaataaaatgggactgaattggacgcgaggcaaaaaatcgtatagtatttttcatatgcttaaacaatcattgccatgtcttagtgttgtttgtcagatgcataagtgcaatcacatttttatacacacattggtgttggcataaatctcatttttatgcgaatttccccttattaggctgtcagcaataaattggcactctgccaaaagtgggcatgccaaaatgcttacaggcaaacaaagatttatggctatgccaaaattgggcgcatagttccatagcgtgtatagtgtgggctataatagtcatagaagtatattattatgagaaaaacagaaatctatttctctatatgaatattggcactgtattttgccgatctctttcactggtgtatctcataattgcaggaacattttacttatgtatgactgtgcatagatattttatgtatgtatggcttaacaatgtatattagacacatggccaaatcattgggggggggcaatgatttcgcaaatttggccctgcgcaatgtgccaacacatcgccaactttgtttgtttctctgcccactctcttcattggcatgtgctatctgatttttgtttgaccgtcttccatgtgctattgcttcgcatttgcatgccgtgcagtcttttcgctgaaagtgccaatataaaagcggtgccaaactcagccaatggcacttcattttcaaactactctctctcactaactgttgcacatcccaattttatttcttccttagtaagtagtattggtgcacaatgcgcacttttctgttcatagctgtagtcgggttggtgttggctgtcatcatggagagtggtaatcaaatatttaaaaaaaaagattttaatttgtcataaatttatttatattattttagtaaatgcgactgggaataattcgccgacaaagggtgatgacgataaattattatttactataattaatgtaaatttaataagcaaatcctagaggaacatttttgaaaatctaaattcttaggtgttagtgggagagtggtaattttttatttaaaataaaatttatttttcgttattttataaatgcaggtagtccgaaaaagccgacaaaacaaacgggctcagggaaattattattagaaatgcaatttttgaaaatcgttgggtcagaaaaatgggattttttttgaaaatgttcatataaatccaacaatcttggtatcatttgaaagctcttaacatgctctaaagtgatgttctttggttctttgatgcggaagagcaaaagatcaacccacggtgggactcgaacccacgaccccagctttccgtgctgtgctctaaccaactgagctacgcaggcatccgctccattgctctcttctctctcctatcttaggaggagaatcactctcttaatctccttcactgccgtcttggcacaaggggagagagtgaccgcatttatcacactattatccttacaaaaaacaaaaaattttattttcttgcaatttcttagaaaaagtttctaaaaagttatagtggaaaaacatgctggcgcacaaccgtacgcgcccaactgagctagaccgccccggggccatggcagtgatggctcagcaaaactgaatttagcggtgccccaaatgcctactataatcctgaccaattaaaataaatttttaaggatgttaaatgaattttcaaaaaaaaaaaaaattggttatacggaagcttatttttcacgattttaggacaaactccgcctggcagtccgaaaggtgggcacggcagcaacaaatcgccaacgacgccgcacagtgccggttcgccacacggcacgcagcatggtaaccaacagaaccatgctaccggtaacacatttattcagcaatcacaaaatttttatctaaaattaacatgaaaattagaaaattttataaatatatttaattattttatataacatatatatttatcagaatggcataacattttactcaaataaaagtgaaatttctgtttttttttgtttcgctccaaatgtgtccaggaccaaaatggcggtgcataaatggcaccgaatcattaaaataaaatgtttaacggtgttaattgaattttcaaaaaacaataaaaattggttgttagttagtaagcatatttttcacgattttaggacaaacgccgcctggcagtccgaaaggtgggcacggcaacaacaaatcgccaacgacgccgcacagtgccggttcgccacacggcacgcagcatggtaaccaacagaaaaatgctaccggtaacacatttattcagcaatcacaaaatttttatctaaaattaacatgaaaattagaaaattttataaatatatttaattattttatataacatatatatttattagagtgccacgggaccgggaatttttgccaaaaccgggaccgggacttgccggaacctgagaagccgggaccgggacctcgattttttttcgggaccgggaccgggaccgcaagaaaaaccgggaaccgggaccaaccgggaaattttaaaaattcaaaaaaattttaaaaattaaaaaaaaaattcaaattttaatttatatcaagtgaaaataatacaaaattatttggttttttataataaattaaattaatgaaaattttcaaacaaattttcttcaattatttcaaacaattaatcatttttggactaaatcatcgaatattaatagaaattcagatttgattttcacatcactttttttcggagcgctttttcaaaaaacttttgggaaagaaggggtccgggcggtgcggataggcgccgccgggggaaattttaaaaatttgggtgcaatttgttaacagattttcaacaaaaaaaggttggtttttgcgattattaagctcaattggtaggattttcatttaaaaaatgataaaatatgtatcaatttaaaaaaaaactatgaggaatcatattttctttataggaaacccacgagtatacaaaaaaaaaattgaaaataatctaatttctgtagagggattgaaccaggggaaagaataagggaaaagtcaaggagactagccactaggccatttgcacaattggttgctttggaagaatatatttatgattatttcttaattttttccctttaactctaattttcatcactaatttttcactcagaccccattcttaccagtgcttgtttttcccggttcccggttgccctaccgggaccgggaccgggacctgagcttttcaaaatccgggacagggaaccgggacctcggatgaccgggattcccggcccggtcccggtcccgctctactctactatataggatagaaattttgtaggacaataattgattggaatttatgttattgatctgggttgaaaaacaaaaaaatttttacattttaaagggttttcaaaaaatagaaaaggtgtttaaccgggattttgaaaaggggaatcagaaaacaaaattatataatgagctatggaattggtaataatttcttttaaaggaatctgatggacattggaaaaacgcttgtactcgtagagaaacatttgtgagatgtaccaacgttcgctggcaagtatgtaattcgatagacagcaattgtacctttcgacacttttacaacttctatgaagttccccaacgtcgtacaaatttgcattgaaaaaaaggaggaaaaaagaaaattgttgatggagcatgtataattaattaattgcttttctttttttgttgtgttgctgaatttatgtaaggaatgatcgggaccgatgcattgttgctacacatattattgatatgttgataaacatttgttgctacatatattttgacaacatcgtttttttttggtgctatgatgtcagtcaaaaaaccttcaaatgattttttttttttgatataactgcataaaaacaaccaaattttaaaatcttgatacaattcgatagctctaaatgtttttctattatcttgtaaaatttcaaaa

SEQ ID NO: 9636 - DNA, 1444 bp, Heterodera glycines
ctaacaaaaatttgtaacttttcccactcattcctcaaaaacagagtctggacacactgctcaacctgttcattcggcacgcaaatcgtaaagcggcaaaggaaccgagtgcagaagtgcatacaatgatttcgcgctttgtccgttccgttgcgcgactgtttgtgctggtggtactgatttcaccgaacgctgtccgcacattgttaggtaagtgggaaattaatggaataattttcatttttgttggtcattttttcaattattgaaaaagcgggaaaccggaagcaaattatgcagtacctaaatatattttttaatataggtaattaaaaaaccctctccttttggcgtactattttctctctctctctctctctctctcgatgttatagagaataagaaaatttcgcttcatcgatttttttttttgcacaaaaaataagtttaaaaatgttgctgttgtggagcggactcgaaccttcactcttttttttttcctttactatgtcttacaaaacccagtaattttgtaatccaaaaacatccattttttatcctgttcctcaccaaatacattgttttttaaaaaatgaaataaaatcctctttttctatacaatttaatctattttttgttacgcctttagccacttccacggagaacattggccgtgcatttgcgcccattgatcccacagcgatgtccgagtcaacaacaacaaccacaacagttgcaggagcacaacagcaactgcagcagcagaaattcgtcctcagcacatcggtgccatcgaccgccgtcggaggggccttcagcacgccttcatcaattcgtgaaagtctgcaaaactatcgagcggttgccatctcaggtggcaacgagtagttttggctgctgctttttgttgtgtggaagcggccaatttaggcgttttttcagcaattttgcttccccattgcataaattaaagaaaaaaaaatgggatgcgaattccgtccaacctaacccattaaaacaaaaaaaattgcccggctacgcggtgcaaaaaaaacgaaatttttaccattttttaaaaattttaaacaaactttttttctaggtgtgctttcgcttgtccgtgccagtttgcctgggctgagcggactgggcagtgccagcgacaaaaaggacaacaaaaagaagagcgcaattgcctttgtgttgaagtgtcgtcgcgtgtttcaggcgagttgccaccgaatgaaaataaatttttttttttgaaaaatattatgttttccgggattgtttcgacttttcgaatccacatatttaaattgtcaggatcaaaaatttattcattaaataaaaaaatttaaaataataaaaaattaaaaaaataattttttttacgactagaaaatcatctaaatttaactagctgatgaacgggagcatcatc

SEQ ID NO: 9637 - DNA, 1333 bp, Heterodera glycines
cctattttatgaattttttttcggggataaccttctttatttttttagacgaagaagacgaggaggatgacgagatggaaaacggtggcggtgcgggcagccaggcggcctcttcattgtaccaccatcgcgcgcgcgagaacagcagcacttccatggaccggttgcagcgtgagcggaccgcgtccggcggtggaagcggacggcgtggcggcgttggcagcagtgccgcggaacggtcgacacaggcggcttcagcggttgcagcggcgtcagccgctggcgacgatgacgacgaggaagaggaggcgatgggcaccaacaacgaggaggaacaggagcaacagcatgacattggggcggttgaggatgaacatgacgaggaggacgaggacgccaggcaagggggggggggaaggggcgactggggtggtagggaggaggaagagcaagcagttcatttgttttgcaaatcgttgttttcctcccgaaaatttggtatttctgaaatttttgggggaaatccggaaacttataaaaataaaaaaagatttaacttggttgaaatcatgaaatttcacattatctggaaaggggaacctagaaatttgggcgaatttttatacattaaattccaaggaaaaaatagacaaaaaaaggagtttggaaacatggcattatcacacccgtctccattgaaagaataagtaaaaatgcttaagtcttggggcggactcgaacttccactcttttttttcaaaacccaccgagccaaatagaattttgttttgaactcgcgcaattttttttttttctttatgacaatttttaattattttttcgacaattttgcagtgaacatgaaatggaggaggatgaagaggatgagccctattttgacgtccacgatgatgaggatgacgacgacgatgatgatgatgatgaggacgatgacgacgatgacgcgtcatcggtaaaaattttccaaccctcggaaaaaaattttcatatttatgtttttttctaaaaaaaaacttttttttaccctccccatttttttattcattgtccttttccacccctcatcccatacacatagaatccatcggatgcggaggcgggcgattccaacgacactgttccggtgatgcgaacgggtggcggtggagcacaatcgacaccatccgccgctgctgctgctgctgcagctgctgcagcaacgacggggaatggtggtggcacgagcggcgccggagatgtacgcattgaacttgcccagtcggcggcggacgctgcggcggtggacaatttcttggccaccgttgatgacgac

SEQ ID NO: 9638 - DNA, 1457 bp, Heterodera glycines
  unsure (1)..(1457): unsure at all n locations
gacgacgacggcaccgtcaagtggaagcagtacnaacacnaatanccattttttggctggcggcaatgaccaatttgatgtcactaacanaccaccacgtcaacaacgaccggcactggcagtgccacaaacagcaccaacaatgccaacgcaaacagcggtggtggtgctgcaggccgaactgctccaaccggtgaccgggcgtcggccattgacagtgcattccgtgaaccggcgctggaggggtaataattgaaaatttgaaagacaatatggagaggtgtggcttactaagaaaattggtattacattttgtgggtgccttggtgttagtttttatcaatggaaaggatcgattttgtaccattatttttgctaaaaattaaccatttttcaaaaactttcgaaaaattagaaatgttaatgttcgccttttttgtgtggcggttgtgtcttggtgtttttttcatgtaccaagtgtacttgttgaacttttattatgggaccattccccgccccttgcaattagccctgacacataaagaaaaagaaaattcgatttctttcccccttatcttggtatcgatttaaaaaaaaattttgttcctcaatttccttacgcaattccgcagttttttcttggtgatacaattttcatttttttttttgggtacttaattttctctgtgttttcccttatttttcgtttattttatactatttttgtctcatttctccaaaaaacagcagggcgttgacccatcgcctttggcgcacctccgctttggctggtgcaccgccgccaacagcaacaaatggtactggcggcggcacaccatcggcaacaacaccgagtgccatcacaacatcaacaacaaacgcagcagcagtcaatggcattggcgcgccgccggaggcattcattgcggaggactaccagtacatgcagagcaacaccagcacacaggcaaacacaaaaaaattattgattttaagcatttaaaaatggatttcttaaagaaattttctctaaaatattcaatgtaaattaaaatatgcgttttttttctttgtcattacttttttaatttgggatttcattcttccaaaaaattgtaattccattgttggtacaaaatttgtcaaaaaaatactttctagttaaaaagttcctcgaattttccactctacagcaaaaataaatatgaaatcacgctttatttaagttaaatgaaatttgaaaattaaaaaaaaaataattaaaaaaaaaatgtgcggcgttttaaaaaaaaagaattatcatttttcgtaaaaaatgttttgcagttggccttatgcttctcaattcttgtcaaactgtgcgatgaattgctcgtccagctgatgtgccatgccaaatggaaggagcaaatgagccgtgtgaagggcatttacacattccctggacattgatacgg

SEQ ID NO: 9639 - DNA, 1793 bp, Heterodera glycines
tcataattatgggttaactgcatagcaagcgcaaaaattttccaatttttttttgcaattaaatatttttgggttatcttttggcaaaaaaagcgcaaaatttttcttaattattaaataattatatatttttaatctttttaaagaaccgaggcgcagctgaagtacagccaggcgatcagtcagtcaattgttggcccaatggtttccccgtgggcgggcactgaacgtgacgaaatcggcggtgcacaaccatccgcaacaggaacaggcggtgcacttggcagcaccagcacatcgaccacaacgaacgcaattgatgctcaacaacaatttccgggcggaggagtgagtttttattgggaatgttttttagattggcatttttgaaataaaaatttaaaaaaaaacaaagaaaaaattcgccatcagtcgggcagattcggacctaatccatgacaaaaaaaattattagtttactttcaagaaaaataggcaatttttttttttgtaaattcaaattgtaagcaattttcttaacaaattgcattaaaatttacaaaaaaaaaaataataatctttttttttgcaattttttatggcaaataactggtcattttttggcgaaaacgctacaagcttctgcttttcctcgactttcctcctccaattttttttattttttggctacggcccgtgtcccgacatttgcgcctttttccaaaattgagttcaaaattatgtttttttgattcctgatcgcataaacagctttaaataagcgattgaaagtgattgttttattggtcctaatgaaccaaaaagatcgtgttttcttaattttatgctgttaggttatcagggcttgaaaaaattcaactttgagtccgatttggacataggcgcaaatgtcggggctccctacggccttgatcggttataatattgccctaaaactttgcaccaaaataaataaatctataattttccatcccaaaaaattcagcaacaccgtccgatcagtcgtcatcctggcacagggcccggcgcaggcgtcgcaggaggcaccggggcgacaaacagttcaattgcggctgcagcgattgcggccgcgactggcgcggatacagctgcggcccagcagcgacgcttccgcaagaaaggggacgcgggcggcggtggtggcggcggacgcaaaccgccgggtgccagcggttcggcagacagtgacgtggcggaacacggcgcggcccgtgccgacttctttgcctacttcatgtcgttgatgcgcagctattccgcagaaagtggttggtatttttttttttggttttttttgcgtggattgaagtgtgacaaaataaatgttttggcactaattgcaaaactgacaaaaaaaaaaaaaaaactttattttattttattttttgtatcaattactgtaaaaggtgcttttcctgctgaattgttgaaaggattcattcacattcgggttctggggtcccaaaaaataatgaaaaataataatccgactcctggcgggtttgaacttgtaccccttcctcactcacaaaaaaaaaaaaaattgacaagcccaaggccgccacgggatttgagaatttattttttttatattttcaaaattttgctcattttttcactcaaaggtgacgattcgccagtgcttgagtacaccgctttgcgcaatgttgcatttgtggccgaagcgtatttcttccacatgatttttggtgaaaaactcaaacaattggagttggagcatggcattggta

SEQ ID NO: 9640 - DNA, 2834 bp, Heterodera glycines
tttgaagatattttggcccttttttaggttttcccctactttttttgtgattttagtaatattatctgtacttacttggcgttttttagcaaatataaatccctttccctgataattatgatgccaaaaaataataatattttgaatatttttcataaactcaacgacagcacacaataccattggtaaggttcaaattgaattctatatgttcaaaaaaattcgcatctatcgtattgttgctgaattcatgcattattctaaaaaacaaacattaattaagggaaaatgaattttttctcattttcgtcgctttttcaaaaaaaaaatatacaaaaaccaaaagaatgaatttccatgttgtaaaaaccaaatattaaatttgtcttccgactatattttcgtcaaatgttcgggtcggaagatctcaagtttttgaaattttattttaaatattaacttttattttttaaattaaatagataatgaaaaataaagcaagttttttaaattttgtattatttttttcaaatctctcaccgttccactgtgcacaattcagtcgaataccgaataaaaaaatgctcaatattttcatcatttttttgcaaatattccactacattggccttttccaataaatttttcacaaaatttgccaagctgcaataattttctttcaccgaaatttgcgtttcttccgtaaattgctcatttcgattggtcaaaagcaataaaactgaaagtaaaattttggggtccgatgggcgcacaaaaattttggcgttttgcatttcgccaagaatttttgccatttttaagctttcatataatgtcgtagaacaattttcaggcagtagtggttgcatagaaattgaaaatccgacaaaaattaaaaataattaaaagaaataaatcttttgttcgcattttttctgaaattatgttatgctgttttaattttaaatcagtctgccaatttgagtttttaaactcattctgtgatcttttttaattggtcgaagagaaatgagttgttgagtttttgtgggtttttcaaaaaaaattacaaaatttaattattttttgaatgattttaatgcttcggcatatctcgatttcaattttctttgtaactttagttatagataattcaatttcaaaattcctatagtcaaaattctatccaaaaattggccatttttgtgaaaatctgttaaagataaggaaaaattccaattttttccaactccttaattttcataaaaaatgagtaaaataccgaaaaaccatttcattatgaattttttaatgctcggatgcgttttacaaaatttagagatttagccttgttttaaataaacaggtttttctaaattaaatttaattttcctaccctatttttggctgtttattaagaaataatttaagatttttaacatgaaaaaaacagatttacaccaaaaaaatgacaaagttttgcgatttcaactcaatttttaagaaaataaggatttttatgggcccggcgtaagaatttgtataaatttttacattcatattaagtaattttccccaaaaatgctatgttagatctaattttgaatattttaggtggattttatgatctttttaacagtttaaatcgtatgtagaaaacccaaattccatcttcaaaattttaaataaaagacctttcgccaaaaataattattaaatttttcacatttggggcagtttcactggtgaaatttagtcccgtttttccgacccaaatggccgggaccgggacttggaaaatggacccgggcggggccccgggaccgggactcccgtttttccgggactcccggtcccggtggtttgtccaaaaaaaccgggaccggggccgggggtcccggcaaaatcccggcgggcccccggtcccgtccgggctctaataagcatcttttatttactttacgacgaaaaaaatgctgaagaattctgccaatttttcttttttatatttatatagcagggatgttactcatctcgtgtttcgtattctcgtttctagttctcgtgtctcgtattttggcacgagatacgagatctttatgcactggtaagaataaggggggagggaattaagagaaaatatcactccatccaatttgtgtctcacaaatttaagcaacaaaaagcggatgcttaaagaatttttttcattatttattcaccaaatttttattttgagaaaatgactcatccattaattttttatttaaaatgccaaaaaacaaacattgacatggtctttcaaaattttatagaagggcagagctttaggcaaaaaaaaaacaaacagccaaattttaattttttaaattttaattccggtaaaaaaatttccgctaaattcatcactgtttgctgttggcatcctccactttaagaagacgcttcaaattgtcctccagcgtttcaacatgcgacatggcctccatttctgcgcgaatgtccgagtaaagggcggaagtactggaaaatttaggaaaatgtggaaccttaagggcagctaattcaggcaatcatacaaaaaacaatctttggaatactgtaaaaatgtacagtaaaatgaaaaaatcaaaaatatcaataaaattttcatgaaatctgtcatttatcttttaaatggatgattaattaatagctcacagatagcgctcgcccgagctgggcaacacggtgacgatcagtttgccggccatttccggcttttgcgcaacgcgaagcgcagccaccacattggcaccacttgaaatgcctgagggggagaaaagtgccaaaaa

SEQ ID NO: 9641 - DNA, 2594 bp, Heterodera glycines
ataatgcagataactaaagttggtcacatatttaatgacgtactctgaattatgttttaaataaaataaattcatttttatatatatgtattttacaaaaataattaattttcaaaaagttttaagtattaccgctcaaaaggccctcttcgcgtgccaatcgtttggccatagcaatggcctcgtccgagtgcaccaaaacgacttcctcgtacatttttgtgtccaaaatgggcggcacaatgccagcaccgattccttaaaattaaataaaaaagatattattattaaaatacttaaaaaaaaaattattttgatttaataaaatttataatttatgaaccattttggtttttgtttccgctgaaattcaccttgaattttgtgaggatttggcttgcctccactgagaaccggactttccaccggttcaaccgcataaaactttaaaaaacaacaacatttatccaattaaattataaaaatttttgttcattgccatattaaaagaaattttagttcattctcaaattttcacttttattgctgggttcttctcacgcagaaaacggcctgacccagtgatcttaactaattaacttaaagaaaattagtaattttttttttcaccgttccgccggtgcctatgccaaaaacgcatgcgtcaacctgaaaaaacaaatttaattatttttattaaataaaaaatgaaacatttattcaaagccgatttgagtagataaataaatgaaaaagcatcaaaaatttcaaaaatgccagaattcttccaccttgccatgagtttgacgccaaatttcgggcccagttgtgcgataatggatttcggggtttgcttcgttggcgaactgaaaataatacattttaatcagtatcgaaacctaattaagatgaaaaggaaaacgaaaaaaatcaacaaattaattaatgctttgactgactattattaattagggaattgaaagattattagcgcctattttaattttcaaatttttaatttaaatttatttaaaaaatgtctttcgctttgcctgcattggaatgaatgagttaggaatggcggcagctaattgttcggcacgctccacagagcctttgacgccaagtgccggatcggtgagcaccaactcggcattgaaagcacgcaaaagtgtacgctttaacaaaaacaatttaatttaaaaaaattttgatgaaaaaatagtactgattttattattataattataattggtatttcgaattttatgcttcttataccaaggttatcctcatgggcaaaatgccaatgaggatatcatccatacaaattttctaattttatttttgttcgagttcgggtcaggggttcgaaattggcaaaaatggatgccggattcgtgatcagcgatcctaaaaaccccttaaaacttattttcattaatttcaaaaacacatttataggcatctgaaaatgtatgttaaaagtctcccgtaaacccaataaataccaattataattttaaattttttgttgggagattcttaaatcattttccggcacccccacaaagtgtccaagccacgaaatgtccaaaagagtaaaaacccacgaaatgtccaaaatttttcaaatttataaaaacaaaatgagtctaatttaggatttttagggttttcggggtcgctgaatacgaatataccctttatattaccccttgcctaaccttaggcccatctgaataataaaaaactcaaattcgagacttggacatttgggaggtaaggggcgtggggaaatcattttaaaacggggaccaaaaatataaatattaaacaaaagttatttctttaatcattttcaatttccattaataaagtcagctttggatgggttttgttttgtcggtccttccatttgttcttccttttctcctcttcttatcacaaatgtcctccattcgttttgttttttgtttgggctttcccccaaattcccttttttcggggggtcgaattgataaaatgcactcaaaagataagcttatcacaaaagtgttcttcttagaaaattaaaaaacaaaaaataacgatgaaaaaagaaaattttgtctgaattttaaccgggcactgattggacagtaaggatgaaatgccgaatcactcactcattggaaatcataaatcgtctcccccctcccgccaaattcgtcgccaaatggcgcactttgcgccgctcttttgcttcggtgccattcttttgtcggagattcgaatggactgataaagcaaataaagaaatggcattgaatgaactgatggtaaagcagataaattctgtcaaatatggaaattgaaattgaaacaattcgccaatttcggtgactttcgcaacctttccctcccttggcagggcatttcttattcttctgatttaattgatcagataatttccatttcagtctttgcttcgatcacatcaattttctagatttcttatcgatttgtaaacacaaaaataagaagaaaagtgaatgattggttgctgttttgagcacggcggaagtgttttgttagctgacagattgtcgcag

SEQ ID NO: 9642 - DNA, 4394 bp, Heterodera glycines
  unsure (1)..(4394): unsure at all n locations
gatcagatcagctgatcagttaaaaactgatataatcggtcacntgatcaatttcaaattgatttantgtaccgcttccatcagtgtgcgcccccttcaaattcactttcagccaaatgttcggctttttctgcgaatgcttcggaagagccggtaaattcggcaagtctaatggagctgttgtcatcgcgaagcatcaaaagacgagacaaccaatggtcaccttcttcagttggaagcattaggacgaaaacatcgcttaaatggaataaaattaattattaaattattggagcaaatttggttcaaaggctttaaattattttgacaatttaaaaaaggttttctaccatttgacataatttcttattaatatgaaaaaattaaggaacattttaatgcttaattaaatgatttgaaaatttaattgatttaattaatataattagttaaccgatttcttaattaattcaaatgccaaattttaactgacttttcaatacggaaaagcaatgaaagacgtttggccaatgcctggatttccttctccaaatctgccaatttgaattctccatcaatgagctcttcttttacaacaggaggaactgaaaataaaaaataaatattaattatttaaaataattttatttttattttttgcactttttggggtcatcgaatggttgtgcttgcgcaaaccgtacaccaatccctggcggttcagccaaagtgcgcggaaggggcagccgctctgtgaaaattaaaaattgaaacttcggtgtagtgaatttaaaaatattttttatcgttattatttttaatttataaaaaatattatatttaaacatttttaggcataaaaatggcaaaaataaaaagcagaaaattgtaaaaaaggcattgaataagcaactttttattaactcttttttgggagcaaagcccataaaatataaaattttagttatatttcaattgtaaacgaaattgtttaaatacatatttggaagattttcgtaggacaattaaatttggcaattctaaggtggtaggtatatttttggatttttatttactttatgctaagaaattttccgaaaaccctgaattacggccacaaataggcattataaaaatcgaaattgcattttccgtgcttaacgaagccggattaaaatataaaaaattaatttattaagaaactattttaaaaaataagcaattttgcgccactcacccgcacacaaagcaggcgattacggtaagtgttggtgatgatgccgcccgcaactcggagcatgttctccttgcaaaagtcggtcagcgactttttgttccaaatgctgtccgtcaaaaagtgccaatttttgctggcaaatttgtaaacggacggactctgtaaatttgaaatacccccaaaactgataggaatggctttatttaaactgtgctgatcagctgaaagtctgatcagctgaatcgatcaacttaccccttcgtctgtcttggtcacaatcttcagctccggctgttggtccgcttgaactccgctcgaaattgaggcgcgtgccttgacaaaagcactgcgcttgatccgaacttcaaaattgttgccaaaggcggtccgcttggttcgtggtcgatatgcagcggagtgatcggagtcataggcggattgatcagtgtctggagagaaaaaaaacaaataaaaaattgtgcagaatgaaaagcgatcaatcagtcaaaaaccaatcagattggttttgaatgatagatgaagaagtgatcagattagaaaatgatcaaaaatatttgattgaaccataaaaaattgctgacatatcactcaaaaaaagttgataagtgataaacaaaataatttgggcagatcagcccgtaaatatttgagttattcaatttgatcattttttcgatccgatgacagtcaattaattaatgcgccgatcattaattaattatctcccctccccaagaactcattagcaaaacgacctgtggatgataatgatgttatttcttcgtcgatgccgtccacctcctcctcctccccataatggcggtttgccccctcctcattttgccgctgtgctcccgtttcgaacattgcggcacgcgctttgacaaatgcctgccgacgcatgtgccgtcggcgggcggcagtgccaatggaccggacatttttagccaattttttggcgattgaacgcgtctcgggccgtcgtctgctgatcggcgaaggcggtgatgaaaagctttttgaaacggcggatgagcatcgatttgcgtttgtgttgttgttttcgttggcattgtgcccattttggttatgatctctttctggcgataaatctgaatgtcgacgcttttagtgattggaaattcaaaaatgagcagaaattaaaggggatcaacgatcccaaatgatcagaagagaaatctcggaccctcagaaatgtttcagtttcattagaccatcctgactagggaccgaaattttgaaaatttcttgatcgggattcgagaaatttgacctggaccggattccaacattaaatagttttaaacatgatcagggagggtctgagaaaccctaggccctgttctggtctctaatcctgaccccagccgactgatcagtagatcatgcataggtcacatatcacgccaaaattttccgggcctatgaatgtgcatattcaaatttaccgtccagttgggtaagcggtttgttcaagagtgtcggaatgtttcgagagttaaatcacgaatagcccctccctcatgctattggtttagctttcagtgtgcttactgtaaggcactgggtggttgtgctgcaggcgatggtacacggtgccctccggcatgtgaacaactacgcggtatgggcacgccacgtccggctgacgctgctgcgcgcaatggagccaaatacgcgttgcgctggaggaaagacgactacgcgacaggtgccgctcggcacacaactgctccaactgttgttccagcggaattggcactgccgctctgggtggtgcaaacgacggcggcgatgtttgtgccaatgccgcggggggtgccgaggcggccgctgctgacatacttcgtgtgcttctgctgccaccactggtgttgaagtttggtggcggtgatgcggaggatccgccgccggcggcgccgccgaagacggccaatttggccaaaaaggtccaccgtttgccaagtttgtccacaaaggatgccgacggagaagcagcggcgacagtttcatcggagactgaagtgaccacggagtcgctgctgctgctgacgcccaatggcattttgccaactgtaaaatttaaagcgatttgttgaaattaatagataattaattagggaggaagcgggaaacacctgctgctggggaaatatggtgtaatgcaaaaaataattataaattaaataatcttcgggttttaagaatttttttccttattttcgcattttttcatcgaatatttaattaaattaaattaaaacataaaaatagcaggtgcaataatgttgaaaaagttcagtgttcgccgatgaacactttcttttgaaaatgtaaatcttttattttgtgtactttgatctcactaaataaaactttccaattatttccgtctcttaatcttcacccaatcatttttcggcattttttgtaaatgtttatttaaatatttcgggatttttaataaatataaatcccatccctaatcatttcttatgtaattttcccaaaaattgaaaatccgagacttttgtcgagtcgagatgagattcttgaacatagctattttcctccgacttaattttaaataaatattgaataatttgaagtgattttgggattgggtcggaggctgattgggagctcaaaccggagtgattaaaaccccggaaaacttccaaacaatttgagaacggaacagtgcagcagaaagagtgaattaaaaacaaacaaagaaaacccttttaagaagccgcttttcctaggccttttaaaaagcttcggtcgataaaaaagtaaagaaaatattttaaaaagacaaaagttaaatggaaataaaacaaaagaaaataaagtgaccgatccgacccaccgatgagaacaaaaaggggcactgattctgacaaaacattcgttcatttgtacaaaacaaaacaaaaaaaatgcaaatgaatttttttgtctgacggcggccaatcacaggcacaaatttccaattgcaatggatgagaatgattaacacacaaacagcaagccataaagctcaccagtagcagcagaaaaagtatccccccccccccatatccattcatattcataatgtacatttatttat

SEQ ID NO: 9643 - DNA, 1809 bp, Heterodera glycines
  unsure (1)..(1809): unsure at all n locations
ttttcggaggaaaattaaaatcaataaaaacaaaaaaatataaacacgaaaaatgacaaaataattgtgagttttggtgctttgtttatgttttttttttgttccgtttcgtcccccttttcggcactttttgagtttttcgtgtttcgtttttgcccttcaaaaaatttcctttcgtttcggattataattcgtttcgtttttgtttccgatttttttcgtttttcgtgcagttcccctggggctccccgtggtcaaattctttccttatcagccttgtcacaaaatcattagcatggcttactaattctgttgaatatacaaagtgattgatcactgatcgaaataggtcccttgtgattggaaatttatggtctcaattcaaacaatttcccnccccccccctcccgcgctctgatcaccgattgttttggcaacaaaaattgatcagataactctctctctctctctcaatttgaggtcttcccaaaacccacttgtaattgcacttcacatttgagcatctgaagtagaatttgccgttttttgcaatgccactcttgtgcacgtaatgcaattggcacacctcgcggcacacctcgtcaatggcgccactgatttttcccaacggaagccaataccgaaaatggccatttcgctgaaattttctttcaagtttttttgttttagagatctcattaaaatgctagttgggcattttgaatttcaattttttgttttttttagagaagaacccgccggtttcgagcagcagcaataattttccatgcttaaagtagaaccggaccaaaattttattttgaaaaatggcatgaatgccatatccaggacaaaatttgcaaaaatttacttcaattttttaaatttctcaaactgtgagccccgggaaaatgccattaaattaaaaaaatatattcatactgtgtttcttttaaattttaaaatattttgcaccgcttttttaaatagtgatttaaatggaaaattcacttttttgccgcgcacagccccctttggagtccgttgtcgtgccgtcgaattcggccgaatttgctccttggcattgtcctcctcctcctccattctttcctcttcctcttccatgtcctcctccaacattgtcctctcttcctcctcctcttcttccctctcttttcctccattctcttccatttcaaatttttcgtcctcggaacttttatggcacaaatcactgaatcgcacccgtgccattgtcatctgttgctgcgcattgtcaacattggcactgctgctgctgaagttagcatcgtcctgcggtttcggaaagcgtcgaattaatggccaaataaaattaaaaagcaaatttaaaattggaccaaaatcggtactaagaaatctcataaaaatgcaaaattttcgaaaatttgtgccgagaaaaactcgagaacactgaaaaattgggggggtttttgaaaatagtagtccatcaaaacaaaaggctcatcgacaggagataaaagaacggaaaatgcaccccaagggaaaggccgagattttttttggcttcctctcaccccgaaatttgtgaccccccggggtgatgaaccgactgatcagtaatgatcacaccattcttctcccgtcggcaccggtcgtgcccttctcgccactccgtctgctgatgcccacaattggcacaattgcgtcatggctgtgcgcgtgccgaatgtaaatggcactttggcgatggtaaaatatcatacggtagggacggtgggccgagccgcgacacctggcaaatttatt

SEQ ID NO: 9644 - DNA, 2640 bp, Heterodera glycines
atcaaaacgaataaattcactagcgagcccgaactttattatttgcgtttgccaaaaaatatttgcaaatacaaaatctttctgatggatgccattgtttcttctggtgtgttttaatcattttttaaataacattgacgccaacaaaatttggcattttaggagccgcggcaatgatggctattcgcattctgttggaccacgacgtgttggaggaggacatcgttttgctttctttgctgatggccgagcgcggagttcattcgttggcttacgcttttcctcgagtccaattgttgacgatttccgtggacaaacagatcaacgagcattaccgaacagtgcttggagtggacgattttggtgtggtttttcgcatttcaatttgagcctctttctatgccagatgagaattgtgttgggcctgattgtgaggtggttcagttggttgcttcggacgacgacccggacgaagacggcgatgacgactcgtcctcttcctgaactgacactttttgttgtacgcaaatgcgtccccacattttgcttgttttcattttcctggttctttcaccactagtaattagagcagctgtttcctacgaaacccattcaggtttttcaactgtttttttatttgtttgtaattgtgagacacggttcattattattaattaatacggtttcaccacacttcgtttgttcttcttcccgaaatattcatcttcattaccactaagtgtttatcatattccttctttgaactgtccaaacactaatttattctgttgtctgttattgaatgtctatctgttatacctaattccatttgctgttaaatacaaacccatttcattgttgccaatttaccaaattacactttcctttagtacggtaaattctttcggttgttgcattgtattgttaaagttactgttgccttaatatccattcgaaaatgtggagaataaagacaatgcgcgaatttctttttttcgattctttgccgtcgatttccttcgatttaatattatttttttaaatttgattcttttttcaacacaaataactttgttaagcaatgtcggacattcaaaaagcgattcaggcactggaacgagaatacgccgaacagaaagagctgttcgaaaaatggaagggttcgctttgcttttggcactttgctttttgggtttgcattggacgcagtctctcctcccgtcctttccccttacgtccatttgtatttgtcattcgtttctttaattagtccttggagattcacacatttcctttacttacatattctgtgctttagaagaaaatgcatccgaagctgatactgaaccatacaatgcatatgtagagcagttccgaggatgggagaaggatgtgatggacaatttgaaggaactgcgggcatccatcgcccgacagcccgtggcgccggagcccgagttgcccatggtcgacctggacactcagctgaacaagtgctgcacttcctgcatcgattttacattgtttttattttcaaatagcttgttggaccgtgtcgatactccgcaattcatcatggcttttatgagtatgagccaacaggacccaacgtttttggcaaaggcatttgaggtcattcatttgcgacaaataaatttttatttgggttctgtttggattagaccctgggacaatgtcaaggattttgttttcacaatattttattaggttgtgatggaagagtgtcgtaccaccggcttctccaatccgattttgccccaaagtgccaccattccatctcttcggcctgtccaccgtctgcccactccgctccaccaacaaccgcccggcgtcccttccgcttcgtcgtcagcgcggcatcaatcggcgagaagtcctggctctttgtacctgccgcctccgctgcagcccaaagcgtatgtgcaaggctcatccctgctggggccatctcggccaacttccaccgtttcttacacgcaaattacgccgtacgccgccatccccgaaagtgagtttatagtgagtgggtattccaatcattttccttttcttaggttgggttgtcgacgcaccgatacgaaaacagccgaagccgagttcaccggcccgggaatatcgcaccccagtgaatttaccgttcaaagacttcagtcaatcatgatgaaaggtatttttattttttcattgccttgacaaaaaatgtttgtttattgtgtctattatgtgttaattatttcaatcagaatttgcatcttttctgcttacttatccatttagtcacatttgattaatgaccatttttaaccgatcagcccaatgttcgacttccatcaattcatgggtttgggcggtggtgctgtcgccacttattcagtgcaattgcgtgccttttctgcgccatttttccagcgacacgatgaacgaagaatcaacgaactcaattacggcggaaaggtgggggatggaaccacctttttttgcggtgcgctttttccaaataccttttaatgaacggggggggggggacggtagtatttacaaccggtttttttcagtacttatgtactttacagatcatcaaaataaaaattgataataaaccttttctaggggaatgtg

SEQ ID NO: 9645 - DNA, 3134 bp, Heterodera glycines
accttttaaagatcgcggggggggggacggcggtgccgataggcgccgccggggaaattttgaaaatttgagtgctttgttgacaaattttcatcaaacggtgctatttttgcgactttaagtcaagttctttaggaaaaattaaggctttttataggcgacgcaagggaaattttttttggaattatttaaaaaataggcaaaattttagggtttttttaccccctctcctcttacgatcgacaattttcctcacaaatcggaattagtcgatcgtaaaaatttggaatttttaatgaagtttgttaaaaaaataaggcaatttttctttataaaatttcttttttcacattaacgatcgactttttcgtggatttttttctctctctcatttttcttttctccctccctcccttcacccccctcccaactttcctcaccccacctcttacgatcgactgtcctgaacccttacgatcgactatgagaccccccccctgaccccccctgtgcacaggtattgggggagaggttcttcttaatgtataaattgggtttctcgttttcagattctgttgccaaattcgtgtctcgacaatttgatgcgtcgcaacattcagtacccgatgctcttcaaattgactaatgtcggcccggcccttcagaggggcacccatgccggtgtgctggagtttctggcggaagaaggccgctgctatttaccttcctgggtgagttctcggaacagaaacaattaaaatttcctgttttaattgcattggatcaatttctctattcagatgatggcccaactcgctctgagggagggcgacctcatcaccgtggagtacaaagcgctcccgaatgccacttacgccaagttcaagccgatgtccaccgacttttacaacatttcaaatccccgtgccatgctcgaggtttgactaacatttatcgagcggttgataaatcctttttccacaggtcgaactgcgcaagttttcctgtctgaccaaaggcgatgtcatcgcagtgcaggcaagcaatcacgagaattgttttttaaattgttttttgatgtcctgccattccctcccacaattgttcatttgttcatttcagtacaacgaacaagtgtacgaattccaagtgaaggcactgaagccggaaaatgcggtgaccatcgtcgagtgtgacataaacattgaatttgacgctgcggaaggctacgtggagccgaacagaacgcatcaacaacggaatgagatggtcgcagcggaggaagaggtgaacaattagcgtaccaaaagaaaaggcaaataaattgactaattttgtagcagcagtcgcatccacccaacgtgttcaaaccgttctccgggtcagggtttcgtgtcgatgggaagaagccgcgatcggtctcaacaagttcacagcaggaggcgacgagcagctcatcctcttcggcatcttccgggcgacaggtaaatggcatcggcatttcagaaatggttgccttgccttcatccaagtctaatcacttcctttaagccttcctctgggattgcttcgactgcgtccactgcgcgtgacgctttggaggcaattgctgtggacgaaaattacatccctggggagttgcgttttgtgcgtcgtccgtacaaaagcaaggcacaaagggacaaagaggcgcgcgaaaaggacaacggagggacgatgaagccattcggaggcgaagggaacacaatccgaccgacgcgaggcggacaatgaacgggggatggacaaaagaatgacttgtggagaaaaagactattgacgaacggatgagtaatgataaaagtccttttgacggttgcattggcatctaaaacaataaatgattttggatctatccgatctatacaattgtcccgtaaaaataatattggtgaatgttatatttaaaaatgttgccgaaatgcatgctaaattcatcaaataaatttgggacaaattgaattttgttcagtattgggtagtgttgtgcacatcagcgataatatcgcacaggaaattgttgaaagccaagcgcaattcttccccctctttgtcaatgttcgatggaattacctcaaaagaatagtcaaaaactttcactaaaaattgacattctttgagtttttttaccgaaattccgcccatttcggccggtagtcgaaatgcagcaatggccgaatgattggtgctttcgtttgtgtggtggagaagcacaagcaaatttttggaactgatttcggaacgtaaagcaaattcggaatacctaagaaaaggcattcattccaaaggacaaaaaatgcattggcacaacaccaaatgagcaggtcgtctccggaggatatttcgggattgcagacaaaaatgatctgaacggttctgatcatttgttggtcaccgcgaatgatttgtgccctttagtcctttctgtgattgattccaacagttttggtcggtttcactcatctccttggaccatttaaaagtcattgctgatcgctccccttcataattcggcactccctcccacattttcggcatcccttcctcggctgtgctgtctttccctcgcccaccccattgcatcggtgtcgtatcgccggccaacagccttcgaactttttgtctccgctgcagtcccacaattccacctgcaattggtggactctcggctaattcgagtcttgagcttcccccccccccccccatttgcttttcccacctccgcgttcactcggtccccatccaattccaactgattgctttcgaattcgacgatgcgcaccccttcccattaatggcaattaccatttgactggtcatttgtgctcttttttcaccttgggttggtctgtactccttggagacggcgtcttgcgaatcggccaaataattggcaattgatgttttgccgctcttgaaaacgaattctcgaaagttaattgggtaattgccaacccgtgggggtccaagcacgagtattttgatgttaatttgttgctccgttcgctcttccgtcattcccctgctcattcgttttgttttttcgttttgttacccttaaaaacaaaaaatactttactttccgttaattttgg

SEQ ID NO: 9646 - DNA, 1459 bp, Heterodera glycines
  unsure (1)..(1459): unsure at all n locations
cgaattgtcaccagtgaacgacggagggcaatggggcgatgtgagttaccgacccccgggggataaaaaccgcaaaatcatttgccaatttatagtggcaaccgtgctcagtgagttgcggcatcggatttcagttcagagaaagactttgcgcagacggaccatgtgccaacagcgggaagcaggcgaggacatgcaacgttcaggtgaattccaaagccaaagccttggccacttgcctcttaggactgttcccgcgtcctcggcatgcccgtgtggagtgggtggtccctgtggagcgtttgttcccggacctgtggccaaggcattcagcaacgctttcgacgatgcttgaacggactttgtcctcccggggaagctttgagagagcaaaagcgatgcgttcttggcccatgcccgcaggcagttcacacaaacgacacacacacacacacaaaacccttttattttcagtggtcaaattggtcccaatggaccaattgtgcgtcttgcagtgtttttgagacacgcaaaagacacaggcaatgtgtagtgaaagtggcaacagcgaacggccaacaggaagagactgagttaggacaggaggcatgcaattcggcaggtggacaaagcgaaagcacggaaatttgaaaatgccgaacaggaacagggttgaaaatagtgccgaatagtaaccagcggaaaaagatgtttttactggatttattttctgcaaattcccctcaaaaatgcggcaataggaccgggattcctggaaaatcctgcacggctcatgttcctgtccgggctctacaaatgaataaacgagcgtaaggggcagaagaaataaatggacaaatgaaaattagggaaagggaaaagaatgacagaccaaacactgaccatcaccaattcaccacaggtgctccaattgaattcgacaattgtgaaaggttttgcgcggagaatgaatttgccaaagtgcgtggagaaatgcgaagccaatcaaacggaaatgaatcgttggcagaaaaagggacagaatggggcgagtggtcgccgtgttctgtgagttgcggggagggaatccgtcggagagagcgaaaatgtgagatgggagagacgggagaatgcaaaacgggaggaggggacggcacggcggaggaaaagtgccgggggcaaaagtgtgcggaagagacagcggaaaaagcggagggagaaggtaaagcggacacaaacaatcaacacaggacaccagcagctcaaattcagcatcttcaagctcagtccgtcgcttcccgacttggtccgattggtccgaatggtccgcttgttcctgcttctctctcacgcgctacagacggcgcttctgccgagtccatgacccacangttgaggtgatgctccgggaaaagaaaatccaacaaattcttctcagggattctgtgtggggtctatc

SEQ ID NO: 9647 - DNA, 1275 bp, Heterodera glycines
cccgatcgatggtcgttggactgagtggtcggagtggtcgcagtgttcgaatccgtgtgccaatggcaaaggtcgcgaacgcggcactgctccgacccgcgccctgaaaatggcggcaaacaatgctcaggaacagacttcgaaatgcaggttgttgttgttgttgttgttctttgaagctccatcccaatggacatccttcaggcttgctccgaacccgtgctgtgccttctctgtgagttttccaaatgctttttctctctctccacgcactgccattcactccttagcccagtcgcctccgctcactctttcggccaatgcttcttcccccgccccttccgacttttcctccactctctcacgcctctccccccagtggggcccctggtccccctggtcaaattgcacttccacttgtggtttttccctccggcgaaggtttcgcttctgcgaattgtctcacgaatcgcaactgtcagagcagaaatgtgaagggattgcccaaatgacggcgatgtgcgacacgcctttttcttgtccgaatggtgccaacagaagccaaaattgaaacactgacaaagaaacgaactaacaaagcacagatactgcggtgacggacggacgatggtcggaatggggcgaatggtcgaacaattgcgaatgggacacctgtaaagagagtgagccgaaggaaggcgacggaatggcgcagaaaggagcaaaagcggaaaaggaagaggaaaagcaggaggacataaagcaggaggagaacactccgacggaggagggcgaggagagggagggggagcaattcgagggtcacccgatgacattggcacgcgaacttcgcattcggacgaggtccggtaatagtgaagctggtgcctccccccccctatttttatttatatttttaatattctaaaaacatggttcttagggttttcggggtcactgatcatgaatataacatccgttaaatgtagtcaaaaacaattggaacatcaaaaaatggtaattttgtacagatacgaatataaaagtgagtttcgagattttgagtttacgactttttggtagagttagggtcaggggttcgaaattggtcgaagtggatgtcatattcgtgatcagtgacctcaaaagcccaaacatgtttttagaattttttaaaattttataaaatttaaaaaacgggggggggggggggcgggcacctgcttcactattacaaatgccccttttatgaggggttgaacaatacaatgcccg

SEQ ID NO: 9648 - DNA, 3067 bp, Heterodera glycines
ccccctcctcaggacccgcttctgttctgcgccttctgccggcggcagtccctgcttcggcccttactcacagcgcttttattgttcatccccaattaaatgcgacagcttctcccatttccatttccagttgatttacaagatttggcaaatggacgccacaatcattcatcggatgataaatttctgagtccctcatggacgataaaaaaaaggaaaagcggtaaaaaaatcgttggcgtaaaaacaaaatgccaatgtatttaaatataaaacaaattgtcttaaccgtgctactaatcactaatcaagcgtggacgcccccaaatccatttctttttctatagatatgcaagatatgaagtggatttaacgtgtaggataaaacttacgtcacgaaataaatgttgttttacattgttaaaaatgaagagatagcacgaaagatgagagggaaaagggaaaaaaagattttatgtaatggttggcattttgttttttcgtcatttttttgccgcttttttttaccgaccattccttgttcggtttgaagatctcatttttagaattacactttcacaatttattgatacaatgttaaaagtaattcgtagagatgatggttctcgtgtttctttttacgcatctaatatgtaatcagacaaggttttgcctcaagaagtaacaacaaacacaaacctgtgaaaacaaatatattgacaccctgaatattttgatttcaaatgatgcaattctcattcgtgatcagtgatcagcgccgcctgaagcccttcgaagaatattttcatgatttttggaaacaaatttttcgaaaaatgttcgagttcggattcgggtccggattggccaaattattttcctcttatataaatcatttaatttagcaataaatcctcttattttttccggagagctgctaagccgcaaataaattgccatgactcaggaaagcacaatgatttggtttaacattggaaagtgctaacaatatctgtgtttgatcttgatttttttagtattgacaattcggaatggatgcgaaatggagaccttccaccaacgagattcaattgccaacaggaggccgttcgcgcacttgtccttcttaaattgagaaataaccctgaaaatgctgtcgggcttctttcgttggcggagtattaactttaaagaattttaaaaatttaatttccctttcatttagtatcaaaagaaattcgtcattattttttcaatttgttttttagtcgtattgatgtgctcaattcacttactaccgaagatcgcaagttgatggtccgtcttcacagtcttgaaattcttgtaatttttttctttttttcatttccacttctttttcctaattagggcgtttcgaaagttttcgatggaatcagaaccgcatacttggcactcaaacacaggaagaatcgcaaccatcgtcagcgtattgtcgtattcgtgggcagtccattagacccgttgcttgaagaaaaggaaacggtaaacgttttaaaaaataaaatattgtatttaagaaagtgttttaagtttataaaattcgctaaaaagctaaaaaaggaaaaagtgagtgtcgattttgtcttgtttggggaggccaccgccgagaataacaaaatcattgccgattttgtcgaccttcttaacggggctgaagagggaaattcgcatttgttggtcgtgatggttggagacaccaaactgtatgatgttttgctccgttcgcccatttttgcgggttcgggggctgcattaggcgcaggcggagaatttggcatcaacgaggaggacgacccggaattggccatggcattgcgcatttcattggaggagcagcgtctccgtcaacaacagcagcaaggcggcgaaggaacgggtgaggggagggcatttgtttaaagtcaaacagtaatatttgagaggggttcattgaccacgtaagcagggacggtccaaaggggtatcccccttcctacccaaggggcctccgcacccgaaatttttaaggaaaaatagtatttttgctgaaaattttagattttccttggtggtacccccccccccccctccccagacctagcctctcacccaaattttacaaaaaatcgacaatttttggtgagtctcctaaaaatggctcaaactcgcaaaattcgtcactttttttggacaagattcgttaacaaatcgcattaaaaatgcaaaagttttcccggcggcgcctatcggcactgccggaccccttgttccccaaaagtcttctaaaaacttaaacaaaaagtggaaatatttttcttcaaattcacatttacacaacaatattttaaaaactagggggaaggaacaactgcgagtagagttcagtttgttttaagtattaatattcaaaaatttagactgaaagattgaggcgcattcaaccccaatttacaccatcctagacaattctgaaacattggacggagggaaggatgatggtataccaaacgatcatgttgttgggaagtttcggactcactttattttgtgtacgaataaacaaaaattgaaataatgtgttcgtggaagtattatgcacaaaacagatggaattttgggttttgttttgaaaaatacattatgcagtttgtggtggacgcagagggggagggggtgggtcatagtcttgtcgcttcattaattctttttcaactgtattaatgttccatgggagaaagtctgcaaattgtgctgtcgtttcttcttttgttgacgactgaaagtaatttcgtgtatcactacttatacagtttgacccacatgacaattttaagattagattaggggtcctaagagtcggagaatccgaatctgacattaatttcgaacccgaattcgagcaaaaagtcgaaaattcaaattttcgattttttatttttggtctaaaaatggcttacgtatcgagaagcaaactaaaattggataattcactaataaaaattattcaaccatttctagacaaaaataaaaaattagaaaatttgaa

SEQ ID NO: 9649 - DNA, 1108 bp, Heterodera glycines
tttgatatttgaaagcaggataaattggaatgagctcactaattctcctcaggcataagtaatttaaaatgttttaatttgttaattttataggttcttgtcctgaaggcgcatttattgagcaattaatgggacttgaaagaaacataaatattataccaagttttcagtccactttttggttgatcattagtcatttagattttctaattagagaggattttgaaaaaaggaccgagcccccgcccccaagtcccagaacggggacaaactctaggatttcggttttttggcattttggagcggcaaaaagcttttcctcacatgtgatctgttcagccccgcgtgttggactgtctgcattcgatgtgcgaggactgtgtgattgcgcagctcggcggggacattgaaaatgccaacaaacaccagcgccaccatcctcactttggtcgtgcatccaccgactttgagcttgaacaacacatgaacaatttgcgtccaacaccaccaggcgtaatccgatgcccagtgtgcagccaagtacggcatgcccatgataaattttggggaaagcgatagacggactcttaattaaagtttgagactcgccggagaggcaagcagtacggatgcatttgtggcactgatttaactgccggccggccctttaaaaatgaccgggcgcaaaatgccggattatttatattttctctgagcaatgaaactgttaaaacaatgactatttcttaatttagtcaattaggaaatgaactgtccaattagtgtttaaatcgaagaaaaaaaaatattatgtttctcttcctgcttaaggaaacgcacattggcaatgacatcatgttcgtcaatctgatgttagtttttttgtatttattaggcggagttccgtcaatattacgcatgaaagtatcaggcaaaaaaaaaagtgacgaatttagacattttgttacttagggccaccgatttgagtgccgttaatgttgaaattcgggtgaaccacccagctaaaattatgaatgtaaaacaaatcaaatgagtttaattagaaaatttgatgaattgtccaataaattatatttgccacaaaatc

SEQ ID NO: 9650 - DNA, 2338 bp, Heterodera glycines
  unsure (1)..(2338): unsure at all n locations
tttatattgagacattttcaaaaaatacaaataaaaaatcatggtccagggtccacttagtttttggttttcttacccccatttttaccaaatttttgaggcatatggtagtccctatgttgttgtttcgaaatcactgcaactgttagggaatagaggtgatgggtgtaaacaaaatggtgatgactcacttgcatctaatgataggggagcgtgataaacaagcattgattacgctttccgccccttttttgtttcattgttgccaccacccactcactcaccaccacctttccaggttatgatgttttctgacttgaatcaaccatccgacgaattcacgaaaagcgaggccgagttcaagctggtcgcctgcaccaaacaccgggccgatttcatcgccgtttgtttctcctgcgacgaattgttgtgcaaggactgtgtggacagcggggaacactacgcgcacaaatggtcatttctgaacagcgaagtggacattctctgccgacagacactgcaggagttgggccaacaggcggagcaaaaggtctgctgcttcccgccattttctgacatttttcaatattttccgtttccttacgcctgccgcctaaggggtttttgagtttttcaacatttttttttgtgccaatcactcaaaaaaaaagatgttcagccaattggcatttgcgcaaggcaggcgccgggccttgcccaaaccggaaaaagctctgaaattgggattggccggcccgactcggggcgtcaaaaaagtccgtttatatgggctgccaggccctcgccatttgatgacatgttcagaatgtcaaacaatttttttgttgttataaaaggctgataaaaaagaaatcagtccattttatttcgtcgcgcaacccaatttccgaattatcttaaagtttaactaattcgaattcattcaccggaaatcgaccttaaaacgttttgtccctttcagaccccccactccaaaattttttttctttttattgtaaaattgtgaatctcagggtaaagcgacgctcgatgcacgggagtccattccggaccggaaagagttgctgcatttgtcgtccaacaaatgtcgcgagaaaattgaggaggcattcgtgtattatgtgcacgtgttgagcgaggtgaagaaccaactgttggccgaattggagaagaaccgggacgagaaggaggagtacttggacagtctgtacaagaagatcgacatgcaaacgtcgaagttgcaggacgcactcaggttcacaaacatggatggcattaggaataaaaatggaattttttgggggttcggtaggaccgataacggcattttctatggctctactgccgtttaaaatgtttactagactattcactgcaaaaacgggcagtttaaaaagcgtttttaaaggcaaaaaagggcaatctatttttattcactgattttattgctccgacataatactaaaacgctcgaattaatttctaaaaatgttcgaattttgatttttgcattttttaaattactaacagcattcattggattcatttttttagatacacaaactgtttgctggagaagggcactgtgacggagctgtgcctgaacaagaacaaagtgcgtcagcagttgaagctgttgattcattcgatgccggacgcaaacgcggaagtcgacttggactttgactcgcccaccaaggcggagttcaagaagaaattggagagcattgtcggcgccatcaaatgtacattattaacacttttttattgctctttgaatttgcaaaaattttttgtagtattggctttatttttgcatttaaaaatgcaggcaaacattttgggttttgttaaaacattgtgctactataattatatgaaaaaaatagggtccaattttttgaaaccgtttttctgccataggctaattgtaagatatccattttgatgaaactttgattcaggccgtgtcacgggactgccaaaggatgcgaaagggctaaaccttttgacaaacgagcaacagccgcaccagcagccgaccaaaattgagggcctgtcgctgtcggacatgaaatatggcactggtgctggcgggcatttgtccgccgttgcgtcgcccatttgggacagtgccaacaagtcgacgtccatgattcagcaacagcaggttttgtattactaaacaatgacaaacaaatgccttgaatacacgntcaaagcggtttttctccaaaatgacaatttttgcccgttttgnggtcaaattttcaaaanataatgatgtactggagtctgccggtgatatcgataggcg

SEQ ID NO: 9651 - DNA, 1552 bp, Heterodera glycines
ctcccttatggagtgggcgggaggggaggggtcggacgaaattgttagtcttttcacacattgggcaaattaacaccggagcagcagctcgttcccaccgaacatgtgttaaaggaagagaaattttttcttgaaaaattcgctgcggtatagaaatatgaagtatacccaatgacactgttccatgtttaagagtcgctttggcgccgactctttcccgggcttccgaactccgactggcggtggtctgacttcgccagacgcgatggtgatgggtggccaacaattctgtgacccgacaaatccaatgtttccggacaccaacaattatttgtccggttcacaatccaaactatgggcaggggtcagtttttgggggttttatgcatttaaattaaaaaaaaaatttgggaaacacaaatttctgttccttcgactcattcattaccaattcagcagttcaattcgccctccatgttctcacaatttgactccacgcccgcccaccagcggccccgtgagctaatggagtcgcgcttcaccatgggagagttcggcgcgggcggttacggcaacagcagctgcgacctgtcggccggcatgcgctcgcgttcgtcgctgtgcaacacgccgtccatggaccaatttgtgaccgcgtcgagcatcgcttcgcaacaggtggtgttaaaaaggcgaaaccatgagttaaagtgtacaatttgaccaggacttccttgcacttggcaatggggccggtggtagtggaggtggtcgtgctcatcaacagtttggtagcggctcgcccgcaaacgatgtgcgtttttagagggggggggggtgaattttgaaaattttgcattaattttaacattttatttatttataaaccatttgctccatcttctaacatctgccacctctttaaaatcaagaattttttttatggaatattgcaagaattgtaaaaatattttgagcaaaataagcaaaacaaaagtttttccgactgcttcgatataggcacaatgcgaattttgttttttgattttcaataataaattattttgtcctacgtatacactataaaacttatttatatctaattttctttgtgccatttttggcatttttcatatggcattcattcatcactttcagatgactctctgcaaacatttcaatgccgacaaaaacaacggggcggacactttcaacacgccgcagggcatttgcttgggcttggattccgaaattgccatcgccgataccaacaaccaccgctgtattgtggtcaacttcaacgatggtttgtactgggcgtagacacaaaaacaaaaatataatcttcacattttctccatttaaaggcacttttgtgcgcagtatcggaagttccggaactgaagaagggtccgtttactacccgaaaaaggtaattggaaaataaaatgttaaaaaaaacttacaattcggcaagaagaaatgtagctgcacccggtttcgggaggggatggggggggaaggcgaaatcgaagcaattttgacaaaaatt

SEQ ID NO: 9652 - DNA, 5957 bp, Heterodera glycines
  unsure (1)..(5957): unsure at all n locations
catggaacaagcaaacagtttgatcagttgcatctcggagagtcaaaaacaaattctttctcctttctgctggtgttgtacaaaagtcgccgactctgcccgaaatacaattcatcacctccgctatcacctaatcatcatcaccatcatcattaatggcccattagcggtggttgggttggatgatgatgatgacctttccctgtcaccgcaatcggcaggccctaaaggggcgcgtttatctgattcatcgtccaccatcgtcgatccccccccccacccctccgatcgttacgccccattcgctgcttccccctccaattgcgctgatcagccaaagggtcccttctcccacccattcgtttcgctgcaaattcagttgttgtcgtttctgcccttttttctttgtacttaatttattcaaatgacccatcggaaagtcaaatcccaattgatcagtccgttccccgccattctctccccaaattcttccgccccactaattttgctctgatcatccgcattagccactcccacgaagctaattaatgatccttgtccctctctcgtaacataaatccaatccgaaccattccataaatctgccgggatcagcgaccatcttcttcctctactccttctcctctcacagtcagtcatttgttggttctgcaaattccaattcaatcagccaattgaccaacaatcagtaatgactctgctaattatcctccttttgcataatttgctaattggacggcttcttcccacttaaaaccttttccttttctgaacatctttcaaatttggcttttttgcacgatcactgatcagagtgagttatcgctgtgcaatcattcccctcgactcccctctaaagtttgaattttgtccctttattttgtccattaacgacatttgcgctccattgaccagcaagcgccgattgagtgaataggcgcgtcaattcgttgcttgtttcgcttcatttgactttattccctccctttttgctgctctcccaacaaatgttagtccaaagaagcagagattagtgacaattttaaagaattgaaatacttggctttatttattatatagcttatactgtgtgatacttttttattcatttatgtatgctaaatgtgacggcgtttgtttttgtccataatttaatgggtgagagaccacccaaattgggaggaggggggggggggacgaggggggaataagcgaatgcgatttactgattcacaccccaacagcacggacagtgttttggaaacgtcattttccaacgaaacaagccaattctcatatgcagaaaaatgcatttgtggattttgcttaaatggctgtttttgtgatctgatcagttggaccagtttattcatgagttgatcattcgaacagattctttttgggtattgggaaatgtttagctgatcatccggggggactgtttttgttgtgttggtctctgctgctggtgaattgttttttacgagctgatcaattgtcccgctttttcgtgtggtgttgaattgtctgttcatttgcttttttgtctttcagacattcgtaacggtcatcttggtgtcattctgtttttgctttaccatttgtcatgccatcactccgtttgccaacatcgcttggcccaacaacgcgctgccgttgaccaacaaaaacgccttgccaatcaccagcagcgagttttgctcattaattcttctccaatccgtccgatcggtcgtctttcccccgctttctctgctcactcttcgccttttgctgcccatcggccccgttccaattgcgcaacaacgctcagttcgcattcgtctgggtacagcagcacatgccaaacaaccgccagctcatcgacgacgccaagcagtaacagaaacaacagcaacagggggaaggagaaagagcagttcggaacaaaagaagaagaggaggagagattggtgggagatgattgattgactcacatggcatatttaagaggattttaaataaaattaatttgccgaagaaaaaatgtactaaaaaagaaaggagcaaaaaagcttcatggtaaatgttttctgttcatttccatttatcttttttctttacttttctcttataattagtgccaaattttccccatttctccaattttcttacgcacattttttcgagttaagaaagaccagcagcaacccaaaagttcgcatcgcgaaaagcgtcatcaccagccgttggaaactcattatcattcaacagttgccgactcattggcacataaaagtgccgggaggaaaatgccacccgactcatcggtggcaccgacggaaggcatcgaaaagggggacgggggagaagaagccaatcagcgactgatcagcggaaacacgcgaattacgaggtgagggaaacactcgaagaaagaaatacattttgttctctccgttttaattgatttccgggaattttaattaattccctctcggagaaataatggccaattgcccacccattcattcccttgggcaacccgcggcgctttctcattttatcggtcacttcggattccaatggccattggattacccgacaatgaaattcaagtctcggcaccgtaccttagctcttcccttctgcttgcgttttatgtaaatgccattcccattttaagggttgggtttcaattaaaatttttctttctttttttttgaaaattttacttaattttccgtccgattcttcaaattcctaagaattgctgcttccccccatcggagtgcccttagcgtgccccaaatttccgccgtgtcttccaaacgttgctccattgtctccacaaggcccccgagtgaagcggcacagccaaaggcagtgggcacaaacggaagccgattggtgccaccagcagcgagtcgaagaagcacaacggcacaaagtgccaatggttcagcggatgatccaatcggcggaggtgacatgacgtccctttccatgccacttaccttccttccttacactcttcctccttttccctctccaattcttccaatcgctctgtctctttctctctcaccctctttgttttttcaatccatcccactctttctctctcccctctccaattcttacaattcctccctctctttctctctcgccctctttgtttttccaatccctcctcttccttacactttcgtccctccctctctccttttttcattgcttctttccctcatttttacatgtttccctcttccgattaatgacgcgcaacgaattcgtgtccccgtctgtctatgctttctcatcccttcctttggctcccttcctcatcatcaccaccaacatcattcacatcattcattcattcattcattcatcctcggcctgttaatggggcgatcattcatccaaaaagtaaagcccccccccccacttcatattacttctctctctctctctctcccactntctctctgcctctgccccttgntttcttnnccntcccccccctttctctctctcctctttctctcttcctttttctctctacnccttctcccccccccctaatttctctccccttttctctctccccttttctctctccccttttctctctttccctctcccccctttgtccaatgtccttggaatgaatgcgcctcgggggaattagtgcgaattccctttattattttgctaagctgcgatggatattattcattcactcacttactcatccgctcttcttctcacctttatttgtcccctgctgatccctttgaatgattctctcctaatcatctcaaaatcggcttatgcaaatgaattcagcaacagatcgtgcattcattgcctttggcattggcatttctcaatcacttgtctgatcactcccacccttccatttcttcatcattttcttttccatgccattcattatctcccctatccccccttttagttgactttgtgtccccaactttgactgccagtcgcatttgtccgcaattttcgactgttttgccaccagcgaggcgacaccttcgcgcacctgaggggataaacaaaagaagcagcatcagcagaaacaacgagcaaaacgatgacggaaagaaaggagaaacgccggaggggtaaaaagaggggaaaaaggggggaaattaatggacaaatgggaaaaagggagaggggagggggatgataatgagggtgtacttttatttgaaattgtcatcttttaatttgcaggtactcattccctcatcttttgcccccccccccccaattcaaaccaaaattcaagccaattacccccctccccacactttttcctttccctttggcccattccattttcacacagatgttatcttcgaacatccctttctcgagcaaaagtgaaaaaatgtggcctcacatttgtcaatgcaaagcgatggttttttggcattttcccggggatcggtcggcggtctctcccccgtcgtttatctgttccgatcattggctaatccatcagcagaaacacctccacaaattgcccctttaagcacacccgtggaagcgcccgtcccccgcaatttgtttttgccctctcaacgggactcatccgtcccgccgagtgcccttcagcaatttgagcctcaaaagtccattctgagacagccttcgacggtcaaaggacgatcaaagtcggcggcactccgagctccgatcaattcgattagcagcagccgaccaattaacgaacagagcgaacaatcgccaaaagtcagtgccgaattcgattgataaaaaaccatccaaatttcaatcggattgtttcagcagtcggatcagtgcctttcgtcttcctccatacctcaaccctctcagcagcagcaatcaaatcagcaagcttctcccccctctgacgctcttcccgccactctctcctcccctccgattctttcgtcccttcctccgatcagtgcctcgtcgtcccaccgaaattctcagcttagacttccatttgtgaccaaaccggcacccccaaaacggcattgctcaacagttatcagaacaacggcagaaagcaaggaaacggaagaagcagagaaagaggagagcgagatgcggttattatttggagggagagaaaaagagaggaaaaaggaaacggtaagagaaaaagagaaagaaattaattaaagcaaattaaaatttaattgggttatttaaccaatgaaagccaaagggaacgaaacattagccattaaatacacaacacaaaatggacatgaaaagaaaaaaaggagagaaaatggaggacaaagtgaaagtgtggacaaacggcggagggaattagcgaaaaaaagggggaaaagagtggacaaaaggggcgaaaagcttaaaaaacaaatgaattgggcggagagggacaatagacagacacttgagcaggcgaaaataacggaacaattaaaataatgattcaattttatcctttgctaattgtctgtccatcggcaaaatgcttttcgttttacgtttattacttttgacacgagtgagtctgcttttcgctgtttttgttttgaacctgccaaattttcgcaaattaaaaaatctcaaaattcctccgacgcttccctcgagtcggtcggttgtcacaaagactgccccccgcccacaataatctctcctcaaacaccaactgctgcctcggcttttgctggtcccccaaagggattttcgcccgattccattcgattgggcattttggacacggcttatgagcagcacagcacaaaacagttggtcagaggcaattcaaagtgatcagacgacgagtaaaacgggcagcagcagcagaagaagggaagggaaaggaaggggagagattgtcggatgaccaacccatcccccgggggctgttttgatattcaaatgattga

SEQ ID NO: 9653 - DNA, 1250 bp, Heterodera glycines
  unsure (1)..(1250): unsure at all n locations
ttttcgagcttttgcagatcgatttttcgatggttgtcacttcagtcccgcgcttgattttacattgtgacagtttacagtggtgttcgtagcactttcggcatttgaatgtttaaaataattaatttaaaaatacaacggattcattgctttacttttgaacatcncaggcaggtctcgaaaaaattatcgttggagtcaatgcaatttcccctgaagtccgatcaaacacgctggcagttgtgacactaccatttgcatttagaattgtgctggttttggtggctgtatggcatttcacactaaaaaatttttattatcattttttcctttgtttttaatattactccaaaacagtagttcctcgttccaaagacttttccaattgattttatagggtcgtagtgaccggcgccgccatcttctccttctgtaaagagcacgcatagctctttttggtagttgttcacgtccgctttccacaaaggcttcatttttccagatgtcccaaaacagaacagacgaaatgtgtccgggtgaagccggtcataataagccttaattattatattattattattttatgttaaaattggtgtttttttcctgaaaatacctgaattctctctccgtattcctcaatcgagtagaatggcagtctcatattaatttcacaggtttggcacaaagtcgtaatatcattcagctgccactgactgtttcgtttgtattcagtaaatcgctgatgtcgatcccgtagctcatgtttcacacgtagaaactcaaacgcccggaagagacaaaagttgtcattgtttgtcagctcgaaagttgtcccatcgcagatgctgtacgggatgttgaagtcgggtctcctccctttgccagccagcttcttcctctgctttccgctctcgatcgccgtgatgtcgatgacgaaagattcttcgcagattgaaggccgttccttcgccttgttgctctggtcaacaatctcaaagcgggtcaaaatcgtctcagccattgacccatcgatcttcttgacgtttttgaagtgtacggctatctcgtagtcaaggtgtcgtgccgtcagaaggaagatgaaatgattagcaacgatgttcatagcttccgctcctttcgcagcgtangtgaggcacatcaagaataggctcttncacacatgctccgggtaatcagagttccatatgtaatccagcataaagcgacccaagaaacgatatgctaaa

SEQ ID NO: 9654 - DNA, 4061 bp, Heterodera glycines
acggtgtacggacatttcgcctactcgacatctcgcgtcccgacatctcgcctactgacatttcgcctactaagccaaaacctttcatttcgcctactaagccaaaaacattcattttgcctactaattagtaggcgaaatgaatgtttttggcttggtaggcgaaatgaaaagtaggcgaaatgtcagtaggcgaaatgaatagtaggcgaaatgacagtaggcgaaatgaccgattttgggttagtaggcaaaatgaatgtttttagcttagtaggcgaaatgtcgagtaggcgaaatgtcatgtagcccacaccacatgcattgcaacgttttgaggtgttgcagatgcacctctcgattgtttttgtctcttttccctttttcactttgcacggcgtaattttcttgtgatggtcgtagcactccttgctttggaaagtctaaaaaaataatgtagcaatacaaattttaaaagtttactttatggcatcccaagcatgactcaaagaaattgtcatcaaagtttttgcaattttctcgaaatctattgcccacacgctggcagttgtgacacttccatttacagcttgaattatgtcggttttgttggaagtatggaactttgcacttaaacaaaaggataattatttatttatttttatataccccgaaacagtaattctttgagccgaaaatttttccaattgatttgattgcgtcatagtgtccaacagctccatcatctccctccttgtaaagaacacagagctcataccggtaatcactcatggcggacttccaaacgggtttcatcttgccaaatgtgtcaaagcagaagagacggaacatcccagggtgcatttcgttgtagtattccttaaatgtaattttaatcttaaatttatttattttaaattacctgaatttggtttccatattcctcaatggaataaaactgcaaccccatttggatgtcgcactctcggaataaagaagtcacgttgttaagttgttgtccttcatcacgtttatattcagaaaatctcggatgtggcatcacatgcttcatgcgaaggaattcgaaggcgcggaacaagcaatacgcatcgttgttctccaatccgtatgttgcaccctccagaaggtcgtacggaacattgaagtcacggcgacgtccacctttccccgccatcttctgtctctttcctccactgtcgatggccgtgatgtcaataacaaacgattcctcaagaagtgatggccgctctttggccttgttgctttgatcaacaatttcaaagcgtgttaaaactgtttcagccattttgtcgtcaattttcttgaaattcttgaagtgcactgctatttcgtagtcaagatgccgtgatgttaagaggaaaatcagatggtttgccgtgatgttcatagccgaagctcccttcaaagcgtatgacaggcacatcaaaaagaggctcttcaaaacagcttcggggtagtcggcattccaaatgtagtccagcataaatcgtccaagaaaacggtaggcttaaatgaaaacaaaaaataaatgtaaattgtttaattgctcgaagaaaattaatcaacctttaaatcttccactctccgcttgtgcggcatctaggcatttgaaatgctcgccattaaattcttccaagtttaatcgctccttgatcccgtgttcattttttcctttaacatcctccaaaatctaaatcattgattaataatattattttatttcaaataattttcacccgttgattaggcaattggttaattacttccacaaggggcggagcctcctcaaagggctcatcgccatctcgcacgggcgtgtatggcccgtcgaggacaggaggcatttcgtcatcggacgacatgtttcaatacagtaggaataaatgattgctgaagtaagaatgacggtaggattacggtgggggtcagaaaacagagaaaagggggcgtggcctatcagacgcgtacgccacgattatcgattaggcgagagagtacacgaaagaaagagagttaggtcagagaagcagaggaaaaggggcgtggcctatcaggcgcgtacgccaacaatatcgattaggtgagagagcacgcagataagagaggttagagatgcagagacaagggtgtgcagagaagcagaaagtcagagacgcagagtggcgtccttttttatcgattggcgagagagcacgcaaagaagagaggttagagatgcagagaggaaatgagtggcggccatggttatcgattggtgagatagtacgcagagaggagaggttagagatgcatagagcgtagtgagcacatacaaagtgtacattgcgaaataaaaatatgaggacatattgcaaaaaaatggggctgccttataaaggcattgcgcatcaggttcttttataatattattttcctgattgggattgcgcagggaaggaaattgatttattaatatcaaccaatcttggcctgatgagcagcacaccgccacccatgaagcacaagacaacagggcatctgaaatgtctagaatcttagcaaaataatatgagaaacctcatggtctaaaatacaaattgaaattgctgccaggataaacggagctcattaactagaactaccgccctggttaacagcaaacgtggaataattgtcaaaatgtaaccaatcttggcctgaagagcagcgcaccgccacccatggagcacaagacgacagggcatctgaaatgtctcgtgagattagtaatgtatgaataatcacctcaagacctaaaaacaaaataattttgttgccaggataaacagagttcattaactagaactaccgccctggttaacaacaaaacaaaaaaaaacaattaaaaacaatatagaagcatgaaaaaatgaaggaaagtgtgtgacgcatccttttatatgcggcccgtcctcaaatataggtcaagtgttactatttatagaatatatatacaagccatatttgaatttcccgccaattttttgaatttgaatttcccgccatttttttaaatttgaatttagtgccaaaatgttttcgtttcaataaatttaagtgtattatatcatctttgcagcatatagtggacaattatcctttttctggcaagtggtctcgtggcagagtggtagtgtgttgggtttggtggcagagcaaaagttcgaatccgcttgcctgcgacttatttattgcgattttccctgggctaccgtacctctcgcagtggtgacgtcatcatctttacagcatatagtggacaattatccttttttggcaagtggtctcatggcagagtggtagtgtgttggtttggtggcagaccaaaagttcgtgtccggttgcctgcggcagaatttttcgaataaaaatttgaaaaaaaaataaaaattattatttaaaaataaaaaaataataataaataattttcagaaaaaattttacaaaaaaatgtcgcgcacccctgcaataggtttaggcttgcagaaaaaagtcgcgcaccccccctcaataggtttgggttttcaaaaaaagtcgcgcaataggttttggtttcagtactgaaaaagttggcgctcagttggcccgcgctcacccggcggcgctcagttggccgtgcacccctcccataggtatgggctgctaccgtacccgggggaatcttcgcccctaactactaaaaagtatttagaaatttgaaactttaattaattcttagagcattcacggtttttgatgattcaatttaaaaataaaatggaattttgttttgtgcctttttggaccaaaaatttaaaaacattaagcggattacaaggaaaaaatcgtcttgcttttttagatgttgatttaactaaaaaaaaataataacggaattgttaatttgcagtgaatttcctttcgaaaaaggcaataattttgaagaattagaagaaaaacaaatattggatgggaagtgatccaaagcacaaagaaggaacagaaccaagagcgtaaccgac

SEQ ID NO: 9655 - DNA, 4476 bp, Heterodera glycines
taaaggcaaaaattgatttttttttttttcttcaaattttcgcccttttcagagccaaattttttaatttacttttttttctaaatcattctgatattttatgaatggcacaattgctgatcaaagctttttctatggaataaaaaataaaatatatttttgaattattcgaatgttttcacagcgttgaaattcaaaattcaaagtgatcggccgatggcccattaaaatgaagcgtaaaaatggggaaatgaaatgcgtcaaatccttcagcagatcagcccccccccttctccgccatcagtcatttcacatctgttcattattcactcagagagtaaaattattagaaaaataaattttgttttatccccaaaatcccccggggggagaaaaagcacacgtcgttttggcggtttcagcagagcgatggtgggctaatgaaaaagcaattgttgtttcaccacacctttcatcaatcaaaaaagtggaaaataaaaccaattattcttttttttaaagaatcgaaaaataagctattttttgaaaaatttgctttttcttcaataaaaaaatttatgcttttttttaatattttgccacccattgtccgtttacgttaagggacggcatttggaaatttaataagtgccaaaaaaaacaaatgccttcaggcaaaattaaattgacacaggacaataatgcatgccgataatgaactttcaagctatatatggattttctattgcaaaatttcaaaaattataataatttttttaattagggtaattttttacaaaatataatttttatgctttgatttatttttcacttttaaatttctccctaataaagtcaatccgtccatgaatttatagtccaataaaaggacacaaatttttccttttcttttttttttttgcccaattgcacttaattaatgccctccctcggccggcgacgggtcaaagtgccaaaatggccaatttcgtccgcttctccgcctttccctccgctttttctccccgcttttcctatggcatttcattctttctttttatgaaatgttctcttctctctctttctctgcaggaggccaattaaaaatgtcgtgaataattttctcgccgccttttgttaatttttggagtgaaatattttccgataaattctcacaattttttgtccttttccgaattagtactgttccaaaaataatttatttacccattagccaaaactcaaattttccgttcaaaaacccatcgaagtccctcaaaatccatcaaaaacaaaaaatggtttctctttttttcgcgaattcacacgcttctcaaatttttgatgcataaattcacttttttcttgaaaaaaattgattttcacatttttaaaatgccaaacaaaaaatcagcatcttttccaaataaaattgaatttaatttgaaacattttatgtattaatattttcaattttctgtcccattttgaaacatttccccccttaccccaaaagtttcccccttttttttcttttttccattctttccagtcacaacatttcttttgtttgtttttagctcaattttcactttttcgttttattttttctcaaattgtctcacgacacctccgccccaattccttcgacttgcaaaattaaattgaattgtcatcacagtccgtccatctctcatcagtgtcaatgtcatcacatttctcttttttctgtctaatcgtttttcaaactaaaaaaaactttgttcgactttcgaaatgcccccccccccctaatattccctcgggcacattcgccgagttccccttgattaccttatttttgtttggggcgtttttgctgaatttttgactttaattggcacctgctgcgaatgcccgcgagaaatgggtcattaaaaattaatttattattttcatgatgcaatcggtaattgccaattagttttttttgccaattcactttttttacatctgtatgcccgcagcaaatgaatccccctcaaataatgttgcattttgcaattatttcaggccacgaaaaagtgatttcgccgagtccgtccggcacttcgctgtctccctcaatgcttcgctcacaaacacagcaacaaccgactacggcaacaccactggcatcagcgacggcaccaggtaaaggctgatgagaagcagcaattgatatggcttacttatcggcttttaagggcgagtgccattcgctcttcccccccccccccccccccgtgggtttcaggagccacccaagacaaggcaaatcaatttaatcttggggttcatgattaagaaccaaattaatcacattaaatttatttatttttttcaaaattgcctaaggcactatgccattgcgcagcgcggcgtttgcgcgtaccgccaaagcattgcagcaaaatgcgaagcagcagcatacacattcggcgccggccgacgctgggattagcagcgagcacaaaaagcgaattgaactgtgggcacagacgccgtcgacggcattccatcaggtgggccggcgctgaagaacgaatgctccacaaatttgggccaaaaatgccgaacaaataaatttgggaacggggggggggggataggatgaatgagcaaatctagcaaaaaaaaaaaaacgatgatcaagcccagtcaggaagtgcgtaattaatttgttgaacgaaagattcctcccctcccccctttcggcaccccccgttaatccctcggggcttttccaaaatgtttggggcgcaaacacttaacgcctgagctgtagggaatgcacaaaaacacacattttgacgagtattttaacttagggggaatttggacgaaagacttccgcattcaaagggcaaaacctttgaaagtgatagttatttaagctgtgccgtgtcaaatttcactgatcaaaattttggaaattggtctgagcattagcaaaagtttctttcataacctttgctttttttgtccctttcaattttttaaaatttttttatcacacttttctttctaaatttgtcctttttctgatcatttttccgagtgatcaaccgtcacttttttttagccttttcaaccctcaaaagagaagaagacaaatcacacacaaactcctcattttaaacaacccattgagaacacaaattgccgctttgattgattgtttgttgcccgaagcattccttcccccccccccggcattccctcaaagcctttttttgcctttccccccgggggatacctaatggacaaaacatttgccgtttgatttattgagtctgtgcatttaattttgaaattgaaactttcggcgccttttccgccgattggcaaattaccggcaaatccgacttttttgtgccttcctccccttcccaccaccaatcggtcattttcctgcccaagtccatcgacatgcgcgtctccgcgtcggacaccgcctgcgcactgtccaactcgtgcggacacatcggcgcggacgaagcggcggcatgcgcaagcggcggcagaagcggcagcatcaacgaaggcgggggtggaccgacgaacggcggagagctggcggcggcaagcggttaccactcggaacggcggagcgcaatctgttcgggcggcaccagccgcgaccaccacgggcgtcaccagcagcacgggacggccagcggcacgggaagcacccaccaaatgctaatgttctgcacggcatccggtaaaaagtggaaaatggccaaaatatatttttaaattattttttcataggcttcaataaaacataaaattaaatcatttgacaaaaccaacataagacacgacagcacggcacaatctcttacaaattagtcgatcaaatttcaaatatttattagtttaaattcggttggctttttgttcattttttatagaattaattggtttatctctccttttaaattatttcggtacttttctgttcttgactacagaatttaatttcgcgcagttttgcaaaatctttatgaattatgcccctttcttgaaccaataaatcagcttgggattcattttggattttgctaaaggcttatgaagttaagagccatttatttaaaaagagggggatttaaaaaataataattaattctgtgttcacagaacaggaaggtgccattatttcttcccaccctttttgcctttttctttcgtgttgagccgaagtgacaaattgaggttttggataaggccgaggatgggccatttcagtcccaaaaataatttaacaaataaaattattattttaaagtaaaaaatattaaaaaactatctttaggattatttatatttatgtgaaaatgttttttaaaataaataaccataaaatcactaacagtaaattttttcctcttttaataaatttttgctaaaatgaaaaataacaataataaaaataaaagtgcaatttat

SEQ ID NO: 9656 - DNA, 1666 bp, Heterodera glycines
atataattataatagaaatgaattcttttttctttatctcatttttttagttccaaccgatgtgttaacagagaaagaattgctcgccatttatcagttccatgcccttccaaattgtatttgcatttccaatggattttttccaatgcaatttccgactaatggacgaatttctgatcggaaagaaggcacacttttgctggacattgaaaatgtgtccgaatttgctcgagaggcggttgggaacagtcggcacagcgaaaaagtgtacataaatgcatttccatggaaaatcttggcacagataaaaacgaaaaatggaagcactgacaatgagaaatggttcggatttttcttttcgttcgatactacgaaaaaaggtgctaattaactgttaattaatgctaattaacagctacaattaatcaccacttagattcgcattggcgctgctgcgttcgctccgcaacatttcgaattatttcacatagaaaaaaagcggagaattccaatggcacattttgtgaccgtgtttttgacaacaaatcgacaggctggggatttgaaaatttcatttcttttgcagtgagtgccaatttaattatgttcccttaattgtccaattatgacaaattaaggaattgttggacccgaggaacggcttttacagcgaagaagattacaaagtaacattggcaattgatgtcattcttaaagatgaaaaaatggaaaaattcattttgaatcaaagcgaagcgaaagggaaacttttcatggacattgaaaaagtgtcggaatttgcacgagaaattaaagggagtgaacggaaaagcaaaattgtgcacattaaaggatttccatggaaattatggacaaaaatagaaaagaaaaatgaaagcgctgacaataaagagttgggcatttatcttttgtacgatggtccaaacgaaggtgcaaattagttgctaattaatgttaattgtgtaattaattgccattaagacaaaaattggagttgcaaatgttcgacaacttttctaattgtctctcaaaagagcgatgtgccggatttcagaagagaattaagcgaagaaagaacttttaacagcaaatcgaacaattggggatttccgaattttatttcatttacggtgagtgccaattcagttatattcccttaattgctcaattatggcaaattaaggaattaatggacccgaacaaaggcttttacgacaaaagcgaggacaaagtgacattggccattgatgtcactgtgaaagaagcaaaaacagcggaaaaatcataaatatccaatatgatctgctgatctctacatttaattatcaccctattgacctatttttttatactttttctttttttactgctttttacaaaactgatttatggaataaataataaatggttggagttgctttaattagagtctgaatttcaatgagaaactttttctttttagtctgaagccaaaactgaatttaatttcttaggtcaaaaaaaatgaattaaaatattacaattaagaaaacaaattattatcataaaattcaatcaattacttgaaaattatgattcattcgggtttcgatataaaaatgaaaaaaagaacaactgaaaggccatgtacaaaagtaaaagcaca

SEQ ID NO: 9657 - DNA, 1058 bp, Heterodera glycines
  unsure (1)..(1058): unsure at all n locations
taattaatttgaaaactcataaaattntgatggaatcaaaaattccattggtctcataaaagacaattggatattgttataaagtgcatagagtcagaatttaaattaggcaatttatacggaaagattttgaaatttaaataaatttgctatatgttatgtgcctttgttttatgtaagaaaattaataagggtcacataattgattaaaattacataaaatttctttaaaaatgaaaataatatttttcattagaggtacaaataactttgtcgctgtcgcatattatttttgatcatttattgaagaaacttttatattaaacaaaaaaaaacatttgaacaatcaatcaattagctatttttctgctaattgcttttcaacaaatgtgccatatttggtacaaaaacggacttcaagttgagtcccatctgttggaattggtcattattgtcattgccgccggatttgttagacaatttgccgttaaatttaaggaaatctctttttatggcccaatcgaaattgagcaatttgccattaatcagtcgtttttcattggcattcactaactgctgatcagtgccaatcagccatactttgcaatggtggaaatcggagctgaaaaaattggagaaattaaaaaattgcaaaaaaaaaaaatttgcgaaattaaaataaaacgtaaaatattttcgataatttctataaatttttttgtattgtctaccggtttttagttggaatttcctccaatttttgagcgattttgcatgtttcttcgaacagtgccggataaatgtgccaattcgttgtcgtccctctgttgttaatgtcaaattccaactgaagtcgaatacgagtttcaacaaattggcaaaaattttggacagaaattttctcatggccaatgcaattaattgcaataaaattctcatactgaaaaaatattaattaattaatttaatttttatcgaattttataccttttcaacaaaatcaattgaatttggtgacaaaggagacgaccaatcaaataaatgaccgtcaaaattga

SEQ ID NO: 9658 - DNA, 1602 bp, Heterodera glycines
tttattttgtttcgttttgcataatataattttaaaatcccttttttgaaatttatataatataaaattaattaaaattattttaataatttacttcacataagtgacaataaaatgcttttggtgttgacaaattttgcttttcgccttcttctccgttttggcattttttctcaacacaaatttcgttttgttcacccaaaaagttttcctttttgatcacatttcccggcacaacacaaatcaaatcaatgtccgaatcagttgtattcaatccgaacataaatgagccggaaattaaaagtttggccttatccgttgactgaaaagatgggatttactgccaaaattaatttaaaatttttttgtaatttgtaaacccagaggatgtgcttattttttcatggaaaacaaaattgcttataccgagagcccagcattttgaaaaaaaagcctggacctggattccatgtttaaccaggtttgacctgggcctggatttcttggttaaaaatccaggaaaatgtgatccaggtccaggccaagctattcttatgccaaaaggataaaaagttttcttctcccatttaattttctcacccattttgccgccattcctttgattgtgttcaccgccgctttgatttgtttgtcgcgcttttttcgcgaaattccatccgccgttttaccgttaattgccatttcctccacaaattgttcaagctaaacattgtcaattaaattaaattaatttgctaattaaggccagttagctactatttgagagttttgttcgtcgaattcgtcccgaattaattgctgcgaaattttggggaaggaggggcttaaacaacaggcgaattcatttgttaaaccatttgccattatttggtttaataaattttggtctaaaaataatttaatttatttaaattgttatttcttattttatttaaatatttccaatttatcgcaccaatttcaatctgtgccatcattttttgcgcattaattgcatgtttttccaatttcgagataataaaaatattatttttgaataaatgaattaatttttcttccttatctccagtggccattccgtgccatttttgtttaaattcgtccttttttatggcatttgccaaatttttttgatgaattctgcccaataatttttgattttcattttcttctgaattttcttcacaattctgaataaagtgtcctctcatttcggaatgaattaaaatttcatttaaaaatttgaacatttttcgttttaatttttcataattttcattttcttttattttttgccatttttcttttaaattttccaataattttccctccataaaatcataatttacaaagttcaattttccaatttgctcaatgacttttaatttgtcttctatttcgttggcaattgccatgatgtcaacccaaatgattgcattttccgatttttccgtttccataaaatattttttatacactccaaaaatgaaattttcatcatcaaattcttaattaattgatttaatttaatttcaattaaagcccattaaataaacaccttttgtttttagcaattcgttt

SEQ ID NO: 9659 - DNA, 4767 bp, Heterodera glycines
cgacccaattacataaacaatttcggtatcattcaatttcatcaattttttgtatcattcgaaagcccattgaatatgctttcgatatttacatacataacagctgctccttgtatgcaaaagatttttgggtcaattttttaaaattttagcaaattcaaatgaaattctgtttcatagggtccatcacccgctaatttgctgggatttgatgaggaaagtttggataggggctcttcttgtacaaattattacataattaaaaagcgaaataggtacatatgtatatcgtcgtcgtgtctttaaaaatattaagaatcggcaaacggcggaaaaggggggggggggattttatttgtttgtcattgaaggaaaaagggggacaaaatcgatgaatgtaaaacggaaagaaacaacaaaaatagcaagacgagaagagagagaaaagacagggaaattatgttgatgatggggtaacgaaaaagaaaaatggaaaaattgtttccattttttgtaaaaatgcatttgagaaaaggggacataggtagttggagtcggagcatacctaattcgagacggacggtgggataatacggtaagtccgaaaatggaaaatttcgtttttcaattttgcagattttcttcattttaactgtactgaaagcataggagagcagcagaaattcgatgcgacctctgacttaaattcccagccctattgataatgctgcattaaattttgtttactccaaatgaatacatagaaaactccgattaaacgaaatgtatttcaaattgatcgctctgaatgaaaaacaataaataacacaaacttttcaaatttgtcaatgaaattctctcggtttttattttttttattcatcaacacatcattaatactaatgaacatacatacaaatgaatatacacatacgataatatacacatacatacatatacaacaacaattatacacatatatacaacaatgtttatcctctcatttcatctcatttggcagcgactgaatttgcgcgttggtagaacacaatgtatgcatttcgcgtgtccacattgcagctttcagtggcctaaaaagaatggatgaaaagccggcattaattgattcgaaattgttttcttacgagagttttgtcgtcgttgcagaaaacccaattgtcagtgaagccgtcacgcacaaacgagcagtaatggccagagttcaagtggccatgatgagtctaaggaaaagaaagaggggaagaatgattaatgatgtcattcaaattgccactgatcaaaatcactcaactcaccacaattgcaatgcaggaatagagaggaagttgggccaccagcgcagccggcacatcgggcgaaaagtatttgctcaggctgaagttgtccaacgggaacgaaacgggcacgtgctgtttgatgtatcggcgctcaaatggttcatagatgaagcgcttgaagcaaatgatctgtgaagggcaaaaaaggggagcaatcaatcgatgatcaattaatcaatgattaattaatcaccaaaatgtcgggcaatcgcgtgaacatcagctgcttgacaagcgttggtggcgcagacggcggtggcgttgcgttgctgcactgtgcacagcgtgagccttcaatgtcttccggtttgatgaaatccgcgagacaatggttgatggagatcagcggcacatccatgggcagttgaccagcgtccgacgctcccataatgcaatgcgattcatcagtgaagcgctaaaaaaagcggcaaaatgtcaaatggggttagggttgtcctcctggtactgcttgaactccccacctgggccaggctgatacaaatcaggcggtcgccctgtccatcttcgtccttgtccttgaacaaccgcatgaagcaccaaatgtcaattttgtcgagcggaatgtcgcgcagcgtctcctcgtcggatggttcatcatcgtcgtcctcgtcgaaatcgtcttcatcctcgtcatcattttcttcttcgttttcggaggaatcggcgtttcttgtcgttgcgtcgttgaacatttgtgaaaattcttcctgtaaaaaaaggggtgggaattaattgcatatatcaattaaaaaatgaaaattcgctattttaattgaatttgggtccgcgcttttttcataaattgtcatttaaattttccgctttcaaaatggactcaaaaaaacggacaaaatctcaacaaaaatttgtgccgaaaattgaattgggttggtgatggctgtacattgtagtctttgttgttcttgttgagcgtgatgaacatggccttgctgacgctgatgtaagctcgtctgcagatgatcttcttcactttgctcagtttcatggcgagtggaaggcgtatttcatgggacgaacatttgatggggtctccttctcgagagatgactgaaaaaaggggagaaaatttatttgaaaatgccaatgtttgtttgttttttgcatgccgttgaatgtaattgcggtgttctccggaattgggatttgcaacgacagcattgtgaacagctcgaacgtcttggacgaatatgaacacactgggcatctgagctcggagacggactgtccggcgaacaagtcgaaaatctgaaaaaatgccattgtttaatgccttcagaattgagtgttctcctctttcttaccacgctgcctttctttggtgcgagcacttcgtttctccaatgctgaaaatgccaaattaaacggtacaaaaaaatcacaaaatttggcattacgtcgattgcattgcgccaaatttggtcgtcacgttgagcagcaccagcagaagcagtcccgcgccgtcatttctgtacatgtcacagctgacgccttgcgtaacaccgcgcagaatgcccttcatcaactcgtgcagcgcgtccacaaagaattggatgaactcctggctgtcatgttggaacgaatcagcgaacaatttggtaaggctggagatgacttcctgaaaaaactgcgagtcatgaaacgcaacaccaccatcaccacggcacactgttcaccacaccttcagttcgaatggcgccgccggttgtcgcaacaccaaaatgcttttgatcatttgcacatattccatgacgagtttgatgttggacagtcggttttcgctgaaagaggggtgaaaacataaattgatggcattggacattggcattattggcacccactttttcatcagaaaattgctgagtgccgtcacgttggccaatgcttggagtgcagcgcccatgcagcatgtgttgccgatgttcagaattccgcccacttccttctttttgtcgtctgcttttgatggtgtgctcattttttgcttaataaaaagaaagcaattaatttattttatttttttgtttgaaaattagtcagacaaaaaggaaagggagagattggtttgagttaggggctggcggattaaccaaaatcgggttgacctaagaatcaaaaaacatggggcagtcagagaatgaaaatataacgaggagttgttgtgggataaattataatttagggaccggatttataagtttttactgattttttctgcgaccttgccgtttttaatttaaaaattacgcttaaacaaaacagaattgaaaaactgtaaggaaacctaacatataatacttattgtttgtatatttggttcccaaattctgaagggttctcgggaggcactaaccagggatctgacatccattatatccaattttgaatgtctaacctaaattcaagcaaaaaagcaaactccgaaaaacttagttttctatttcactcgagttcgggtaagagatttgtcaaaattggtataagattcgtgattagctactcccgaaaacccataaaacaagttttcacgaaaaaaagggccctcaccctgtggtttttttcggagtgccccaacagcaaaaaatgcagatatgaattcccagggaaagaacaaattgaaaaattttttaatgggtatttttaaattaaatttgtcacttttttaatctggcataatgttaatagttaaaaaatttgaacgaaatatgactacttctggtagataaaaatcagtgctatcacttcaaaatcacaaattccttttcaaatatacagacagaccagaaataatcttttgaactttcctttttgataattgtaatggttaagatgcaattggtccctgatggcacttttcgcaaagtccgtaacaacattgaccgattgtttgacaaaaatttgaccgatttaatccgtggcattcggaacaacaaggaaaatgaggtgatgattgattgactgaatgcaaaagccatttgtacatttacaatttgggcacttttgctgggcctctgaaaaaaaaaattcaagggctcaaccaattacaaatccttacaaaaaagcccccctttggaattttctctcgtgggcctccaacaacagccaaagtgccataatttatttacccaaaatgttctaggcccgttatattgcggcatgcattgacgagatcaaagtggagctacgccaggactccatttttgtgaaggcaaatgccatcgaaaagttggcatatgtaagttttttaaatggacttttttatatccattaacacaaaacggagtcgggaggggtggggcagtgaaatttcgagggaggaacgagtgaaattatgaaaaaaaatttttttttaatttcctcatttgttagt

SEQ ID NO: 9660 - DNA, 4880 bp, Heterodera glycines
tgcttcctaattagtggtagtaataaatcctccttttcccccattctcacttttaggatgggatgttggatcggtacgagttcgtcaacgacctttgtgatttgctgcccgaattcgcaaatttctccatggaacagccacaaactttccgcgcgttgctcattctgatctcccaattcctcgacgttgtcacccaaaaccttttcattgctcgtaaagttgcccacattttgtgtgctcggctgaatcagtataaaaaggaccacgagcgcatcagagagtcgggaatttagagcgtttttgactccgttctcaacccttttcagtaccacgctcaaagaatctgcaaacgaatgtttcgaggacttggtcaattgtcaccatcacagatcgactgtcctcacaatctttggcattcttcatgcgattgtcatcgactgtccttcggcattggtttggactccatttgagtcgaacgaactggccgaggggcttcagtcaaagtttaagccggacagaaatggaaattccaaatccatggagagagaaagcgtacaaaatagcgttgcctgggtaagttatgcggggtaatagtccagtttagctcttcccctatttttcaaaaaataaaaagttttgtaaaatgcctttcctggccgcattttgtgattgctgttttgtgtatttgaatctgaatcattaacttgtaccgttatgtctgaatgttaaatttgccttttgcttttccttagctttgtaagtcgcctttggacaatcttccatgcgaattgagcgtgaccactcagcatttggcggcacacgccaaggccgaactcgaccaacttctgagcatccgaagtgaagagattaaacagcggagtatggccatcgaacagcggtggctgcacatcagtccgacgaacacgcggtccggactcggtgagccatggattattgcattaaacggaggacatttatttcatttaattgacttttctcttttttaatgtgccttaagattcggtcgtcgagaattgtctggacgttctctcctttatggacaccgtcgacctcggggcagtcgatgcgctattagtcctttacaataacatttttagcgaagaggtaaggtattcgggtctctgctattcatccaacttttaacttaaaaatggtcgtgctttatccttgtttatacaaagcaaaccatgataaacagcaaattaatgggtgattttcagaatgactgtttggatattaccattcgcgtcctcatcaattgggctgttaccagtgagcgtgaaggcactcaccgcggacttatcgtcgctcatttgctcaaaatgcacgtcaactttgctcaaaatgataacaaaaagcctccgtttggccatggcttttcgtctctgcaggaacttttggtggactgtttgaacagagagtgggcaaatccgaatggaaaggcaattgcaaattcggcggttagggcggcagaatttgccaatttgatgctgctcttctacgaattgcaacgtttcggtaccaatttgcattattttaaatttgttgctactaaatttgctttttaggtcttttcagccacgacaaatacgtcaaaggttatacagttcatcaggaccgtcttcgcattttatttacattatttatttagcactgatgcgcgacgggactctcgacagtcgtggccttttccttcgtctgaatttgcgttcgatgtccgttgccgcccctaatgtcggtaaatcggcgcctcattccgtcgacgaacgcacaaatcgacgtcaaaacgtaccgaatgcatcgcaaaatgcacaattagcagccgtacaaagtcaacccgagccgaacataaaacaggcgagaaaactgataaagaaccaatggacgatggctaatttaagttgttattggtttaggagcctcaaatgattatttcattcattccgatgtccaaaccaaccacgacgcactcatcactcaccagcactaccgttgaacatcagtttaacggcactttaccaccaccaagtcaacatgtaccaaattctcaaacaccaaaaccagtggaagaatttgcaaaacttgctcctcaatttgaaactgatagtcatccctttttggaggaaccgtccgcattgaggtagagattagttgtcctctatgacgggctttttggaaactttgggtttgatcgttttagcaattaacttaacagaaaaattaataaaaatagaaattttggatataaatggaaaagacccggtataatgtcatataaccttctggggccgaggtgaactaaccgaccgacccattttccgttaccactctataattttcttcgttttttcagttttcatgaacgttttatcgtccatttgcccgttgaacagattgaagccaatagggacgtgtgcaaccaacgcgccattgttctctacggcatttccgaacatcgtgatagtgcacggcaggaactgaggaaaattgctagagaaatctgcaaaatttgggtttttaaatggggggggggattatctataaattatacttcagaagaaaatgactttcgaattgaccatttctctccaaccgaactccgtcgtccattcggaagttcgctacaaaaggcgatgttcttccgaacaactcaacgaactgatgggacggttcaatgcacagacgtactacgaccaattggtcatctgcggatggtgcgcagaaagttttttggactcaatcgaagagtttgtcaaacaagcggaggaattggcacaagagagcatcaaaggcggggcaccaactgccaatgtttcggtgccaacgcacgagtgcttggacatgttgtgcacaatgatcacggtaaatgaaggcggggacgcacatcggcaaacgaccaaatttgaggcctaactatgtcgatttctgttgtttttggcatttaccactcacttttacagtactaatcagttggtcctttcctatgtgtgtgttacttttattttctttagatttgccggtccttcaacaacatcgtctctcttgcgcatgagttgttgccccttctcgtccatttgcgtttcattctccgaaaccaattgaacaccgatctcttttctgcctctatttctgctcaagtatcatttacctatttttatgatttttaatttgtcaattattattcgtcattaattcccccttccctttgtttagtatgcttttgtccttgcgtcgcatttggctgaacatttcttttattttttgtattccccggaagcgtgctcaataataaacgatttttaccgtctcgttgaaactgaattgaccgtccgaaggaaggaaggcggcgagggttcggggtggggcagggccgtggcgatgttcgtctaccacgcccgtcaccttttgctcgtctccaaattgaacgtgcgtggggccggccctgacgacgttgtccaacttctcggccaaagtgaagagtttgaagcgcttttccctccgagtggtgccggttcagtgggcaccaacatcgaataccgccaacaatttgcggacgatgtcagcgcactgtcactcaccgacctgtgggttcccacttttcacttggcatttgcccattgtttttagacgcgctttcttcaacaatcattacaaacgtttggcccttctgatgagaaatgactttgtgcggtacaggtgccgttttgggtgtcctttcggttggccaattgtcccccgtctttttgcatttccttttcctttggcttctccatcgtttcccatcctatcgataatcattcccgtttaagctttgttatcgatgcattcaaagcggctgtcagctgtggtcgcaactacgatcgtcttgtcgaattggccaacttttgtgcgaatatttctgccaattggggccttgccatcgaatggtgcaatgccatccaggagttgtgttacccatctgcaagtagtgacaattggaaggagttgatccaggacatcgatgtgggcattcacttttcatttgcaaatgtcctttggtccgtcttttaggtgaccaaattcgccactcactaccctctcgctacgttcactctcctgctggcttccaaatactgcttctcatcccacgggctcatctgccggctcatgtccaacgttctatttcccctgcttgcgaagcaaggggaacgcaacgaaagcgcaacggtggcacatcgcaaagcggacggtgattcattcatttgttggcattgcgagaaaatggggcactgctttatctcatcctcgtttttccagatttcgggggtcatgacaacaatttctgcctaactttgtacatttgcgcctgtttaatctgtggcaccgacgagccattccaatgtgccgactcttttcatgttttggttatttcttactttattttctcagattgtgacagcaattcaaagtcctcctccacttttgcttctgtgttcagtagggacgccaacagaatggcactcagaattgtccatctcgctgaactcgaaacttccattttcccgttgctttgcgttttggttcaattggtcgacggcctgaaaagaaaagtcgaggccagaaaggacgcggtagttgatgaacatgcattccattcatgcaaatgcatttgccacacaaaggtcaactttcgcattgctcaaaattactttgttgctcgctgtgcccttctctccatttgcgaacaggaatgggttgtccaaagggtaagaaatggggaaacacgaataaggggtggggaatggtccggagcaggacataactccgccggccgaaactccgccaaaatttttttttaatttttcaaacttagaaatttt

SEQ ID NO: 9661 - DNA, 1474 bp, Heterodera glycines
tagcggtctctgttctcgagtcacggagaatttcgactctcggtcagtcctagtgtaacgggctaccacctttttatgcatttattatacagtggagtcattttcggtattcttttaattatataatgtcatctcccattttagctactgtacctctgcatcaagatgctgtacctagtcaatgtagccacccaattcttcgtgctcaacaccttcataggtcgaaacaacagaatgtggggtttcgaagtactcgaaaatctttttaacggagagaagtggcaggtgaattaattgagtgttttgtcggttaaaaatttagttctttatttagcaacaaaaaattaattatattaaatagctgtattactataaatgtttggcttaccatgctggtttatatctaattcttcaattttgaagggattagttaaaaatgggaaaacttttaatgtttagtttttttataatattgaatgttttttaataaaaattacagtaattttcattaaataatttaaaaaataaaataaaaatcctatttgcttatttccttccaccctttttgtgtgcttttaggactcgccgatttttccacgacagacgatgtgtgacgtgaaaattcatcgcttgtcgggcacaacacgctacactgtccaatgtcatctccgcattaacgagtatttcgagacaatctacctgttcatttggtgattttaaaatttattttacgggttttaaatatcgacttatcatgaataagatatttattttgacaacttacgtcaaatctgaccaaagattagtcaaatttagaagaattttttcatttttaatagttttgcagtttgcccatgatttttaaaataagattcctcttacttatttattttttaaaatattaattataaaaacgtgtcaaaacaattgttcaatatgcttaatacaaactcatttttttggagcagggagagtaaccatatgaagtgccaaaaaatcctgttccttttctccaggtatggccttggcctgatcgtagtgcttactgcagtaaattttgcctactatgtttttgttctgctgctgcttccgtcgacgcaggagagctcggtccgcgacatgttgatgcaggacaagcatcttgaaattttctacaacaacaaacaccatgaacacccacttttcagccgcttttcccagcacgcactgcgcaaggacggagtgagtatgtggcatggtggtgttgtacagtttggatgcatgtgtattaaattttttgcacggcgatgagaaaaaagctattaatgattctgtttccctaaaaattaaatggttcgaccaacaccaccgagtgctgcagtcttttttgcaaattttactcaaaaattttttttttaatatacaaattaaatttaaaaattatataattttccaaaaaaggcaaatctttctcttttttaactcccaatttttt

SEQ ID NO: 9662 - DNA, 1457 bp, Heterodera glycines
gatagggccagtatgtttaaaacaagcttcatcatgatatacataaaaaatttcagatgatcctacaactttgttttctcaacgaaagaaaacacggaaaaccgatagtgatgcgcgagttgtgtctaattaatttaatttttgaaaatttcacaaaaaattcttttataaatatttttctttagtttgatgaagcatatgaaagtgaatgtggaccgaaattgaaaaaggcgtttttaatttacggcttttgtttttgattttgattatcatttttatttctaatttacaataaagaaaattgaaaaaattaatttcttgtttgataaaattgaaaaatgaacattaaaataaaaatagcttctttttaaagtttagcaggcgggaattttaggcaaaaaatcaatgccaaaatatggggcaaagcatatttagctgtgaaaaaatgatgaaataattttgtacattcttttaaatatacggactacaaattatatgtagatttcacaaattttaatttagcaatttttttgtctgaaccaggagaaattaaatatatgggttcatttttataaatataataggttaaaacatttttaaatttccttttattaaattttaatctccgtccttcctttggtcaaatcactcaaaaaagtaaggatatggacgaagatgggtcatttcattccaaaaatgcttttaataagtaaaataattattttaattgataacttccaccagctataaataaatattttatatattgatcagaaaagcgtaataattaaaacaaatttcgaacaattttaatcttttgaatccgtaacggataatggagtaccttaccatctgtctagtcttcattaataatgaaaatggtcattttaaaaattactttgaatccaagattttctcagaaaacgatttttataaaaaaaataatgcaaatttgttaaaaaagtaaaatttttgattaatattggtattttggttagtaatttttaaaaacttattataagtcacatatgtacactggtataaaaaagtctttaccaaatccccgaaatttgttcaatgctgattatgtaattaataagttgccaatatacatagctgtataacctttttttttaaaaattcctagggggttgggaaattttgtttcaaaattttaaatatgctcattgtattgagaatatatttggctatcaacgtattcaaaattaaaaaaaaatttcccaaccccacaggaatttttccgaaaatttcccaattttcagtgtattttagtttgtcacgttcactatgaaggaatggtctgatcaaattggtgcaaaagccctttttgttcagtatcaaaagataagcctgcatgattttttttccagatttttatgagtattttgaaataattttttaagttgtaaaagatttttttccgttcaaaagtgatc

SEQ ID NO: 9663 - DNA, 2022 bp, Heterodera glycines
cccccccccccgcccccgccccccccccccccctagtaattttatgaaaaagcacattaaatgctaatctcgaggaaaagaaaaatactattttgaaatttttgcacgagaaaaattattttaagatactattgtttgcttttgtttgatttttttaaaaaataatttaattgatctatttttaaatatttgctgattggtgatctcgattgtgcgaatttttgcttttcaaaataaaattaagattttatcaaacttttaggattttaaattgctatcaaaatggatttagctttgattaatattggcggaattgaaaatgtgcttgacgaagatgggaaaaaaattttgaaaaaaattgagacgaaagaaatagaaagagacgtaattgaagatttaaatttatatgcataatatttaaaattacattaggttgatccatttgtgccatttgctgcggcgacaattgggcatacgccacaatcatacaatgtgttacgaaaccattgtcttgaggcaatttttatttaattaaattagggttgcgactccgaccgtcggggttggaaaactcggggttcgcggttgtcggggtcaccaagatcggggtcaggatcggggtttttcaatttgtcttatgccatacatatagtcaaaagactttctagtattttggcttaaaaaatatttattaattttcataataataataataataataataataattttatttgcatttatttttttaacataaatattttgtatagaattaattataaaacgcctatttagtgcatagaaaaaaaggtcataattcaaaagcggtctctagttataaattaaaaaatttattatattaaaatattactgtggaaaaaaggcaatttctagaaattaccttttaaaaaataaattatatcaataaaaatagtagtattttattcaaaaaaaaaaatttcttttagatcactttttttttgctttccaaagcaacttttttaatttttttaataagatttacgaatttttgggtacggcgatgccgataggcagcgccaggcgaattttataatttaagctcaattttctaacatatttttaccaaaaaatttataaatttccaagaattttttgttttttcttggtatttttcaaaaatatttttaaatatatatgaaattttctggattttgtcaagaaaattgaattttttaatttcaacgaatggaaaattggcttcaattcgtcaatgaattatgccaaggatgttttatagttatgggttggttaaaattcaaattcgtgtaaattttttgcattttctcccgcgaaaatgcaattcttaggggtatatttagccccgacccgagtcggggttaaggatcggggccggggttgtaagcgtaggggtcggggttaaccccgaaaaatggccaaatatgtcggtgttcggggtcggggcggggttaaaaccctaaattaaataataacaattcaaagtaatgttacagcgcggaattttgtacgaggacccggattacggtccgaatcaaatccaattgcacttcaccaacaacattgaagtgccaatccaatggttgcgccctcaacaaatagttgatcacccgcaatttataaaccaaatgccggagccacgtgatgtcaaccagggcagtctgggagactgttggatgttggcagctgcatcaatcctggcgcagcatgggcacctgttttacagggttgttccgcccgaccaaggattcgcgatgggatatgccggtaaaaatttcgttttaaataaaaataaaaattagatatatatgaattgcgaaaagcaaatttattgtttcaaaattttacaattcgttatttgtaaaaatattttaaaatgaatggaattgctcaactttaaaattaatatttgaaatagcaattaatatgctttttttaaatttaacagtttaataatttttttttactactcaattattatatattatttataggtgcatactt

SEQ ID NO: 9664 - DNA, 2987 bp, Heterodera glycines
tttgtttttcagatccattgttgtgcagatatttaaattgcatacaaaaatatccttggaatttggttttcgttttaatgcacatttttttgcctttgtttttctcctcataagtcccccttaagattcggctggtcaatcaaatggtagaagaaactgaaattcaatttatttatgaattagaattgccactgaccaatcgcgaattttgttgaaatcgttcaggcaaaacaaatagcggaagtagtcagttggcactccgtttgtcgtctcgcagtaggacatacagcccggttgaattcctcaaaaagtgccattggtcccctctctgccgcccccctcccccacttctccgacctttgattctgcagcattcgcggtgatcggcgcgacttgacgcgcagtcccacatttggccaacggttggaccacgcgcgacgcacgtggagaggaaaatcagaatctttaatggatggtggccggcaattaagcggaagtgccattccaaaaatgccctttttaatgacggaaccaatggggctgtaataatttatacaggaaaaattcctaccgaactccctactaattgagactaattgctgctgtctatcccttttttgttcccttcccaattaattaatcaactaattaattagttcactgtgttcgaactgagcgcattccaatcgcagaaacggtttttgcagtcggcgtccgcctgatccaacttggcacaacacattttcatcttttcgtgcggcgtgtgccctcgcggcgttttctgcggcaattgctcttgcggttggggcggagcttggaaaagcattgggagcagcgcattttgacaaaaagcaaagggagccagcagaagaagcagcacggaagggaggacgaacatgggaaagtgaccacagggaagggaaggcacaaagtgatcagcggacggaaattcaaatgagataaagtgatcaatggggaaaatgatcaaaaaagggaaagagtggactgatcaaaggggccaggcaaagtgatcgaaacggaagtgatgagagggaagggatcggagagtgaatgattaaaaggttaaataaaaagtgcttatgaacggaagtgatcggaagaaatgatcgaatggattcagagggatgagagaaaatgatcagggagaaaaatgatcgaaagatgagaggaaagtgatcgaaagggtgctgatcaattgaagagaacaattcgttttgctttatgttcaaatttggtctctttgctgagtgtttggtacgtccatcctccaatgtgtaaatccataaacttcccaaaccaaaccctcggctccctcccaattccccccccccctctttctttcgattcgttcatttcccaaatggtcggcgcatttctccaatggatcggatggacttgttctccccccccctcgaaactccgcttattcgtatttacaagtgcttccccctctgtattattattacatggattaccgttattcgttcatccttttgctttgccccccccccctcccgaaacccgtcgtccctttcctcgccgtccattcatttattagtcaactgtcgagtttcaaatatgtgatcaccgattgctttgcattgttttcggttgggaaattacgcatcatttccatgggatttattcaaatggcaaataaattaaaaagggtcatttaaaattggcaaataataaaatggcactgtccgtttttttgggcactttccctcggcggcgtttcgctccattcatttttcctctttcttattctccaaatgtgccttgaaacaatcgcggatatggtcaaaataatccacacaagccctgaaaattgggtggtcaattaatttgcgtgtcaattagaggggtaattagtcggaaatgcgtacacatagtccacgtaattttctggcactccgtcctgggcactacagtactccatgcacttgtcggacacgcctttgccctgtgaatttggttcaacattgtaaacaagcaaaatcactgaggcaaaccctgcagcagtgcgtgtggtcaaatcggctcgacgcgcagtcccacatgtggccgacctagaggggatactgtatcacagggttaaccgtagtcataaagtggtgagcgattgagtgagaaaaacacgggaattaactccattacacaatcatttgagcaatgtttgatcagtaataatgaatgaaggctaataattcatgtcattgctatcgtatacttttgttggaattaccgtatcgcctttgtctttgcactttgacatgaagttcaacaccttaaattcatttcgaatttaattggcgaaacgaattcattgctttctccgcttacattcgcctgcgaaatcgcatcaaaatcacaaaatcgggccacacagtctttgtcgtccttttcgctggtcagtgttaaacaacacttcttgagtttggcattggcatcggcggaagagacaaaggaaaagtgggggaggacaaaaaggaagaggaagaagcaaaggagggaggaggaggaggagaaagaggaggaggagaaaggcatggtaaaggcacagagagagagaaactgaaaaaggaagaacggaaacaaattaaaataaaaaaataaaattattaatttagaaataaaattggggaagggagggggcggggaacagagaatggcggcggtgttctgacgaagatgcgccattcgcctgacactttaaatgggaggggcaaaaggcaaaatggggacagcggacgatgaaaaacggaaaatgatgaagcagtgattggagggggaggagcagcagaaaaagtgatcagaagacggatcaatgggggggggggagagaaataacaaaaaatggggggcaaatgagcgaatgaataaaggaagtggcagaagacgccgccggactgggtcactgtgtgggagcagacagaaagtgatcagagcgatgaacagaaagg

SEQ ID NO: 9665 - DNA, 2564 bp, Heterodera glycines
tttatttttcggttttttctttgccggcttttcctcccatctctttatccctcggctttccctttgtcggattttgctctttatttttcggcttttcctttctcttgtgaaaagctaactaaaactttggtctttttcgtcccgctttaaaggatgtgctcattttgggcactgaacgtggctccgtttactttgttgactctcaagcgtacaccgttctccaacggaatgccattggcggcgcagtgcccgtcaaaatgctccccgtcggttggtgggctttttctcaacaaagcaattagcttccccccccccccccttaggccatttcgatctcgaatttcggctcattgtgtgcactcgagagcacgacgtgtttgtgttgagaaggtccgcgaagggcgaattcagcgtcaattcgttttatatccgtgaacacccatttgacgtggtcctttgtgctaatcaggtgcgcattaatgagaggtcattcactgttattacactgcgttttgcatcatttctgtgaacacaataatggacaagtgatctccgataattacgcgtgattagccataattagcactaatttcccccaatggtcgatggtaatgatcagtttcccatccctcctctgcttaagttggcatttgccacccgtaaacgttgtctcgtcttcttcagcctgaagggtcgtcgtcaaaactcgatgaaattcgacgagaacatcgccgacatcgagcagttttattatgagccaaaacagtgagtaatgagtggccatttttcattttttacatttaattcggaaaatctgttgggcgaaaaaggaggaagaaatatgcggataatgatggggcgattttgaaattgatggggctaattagatcaattaatggccaatcactggaaaaagcatggacaaataaaacacgagaacagcagaaggaattgaaattgccaaactatgtttcttcttcttccttcgtccccctgcagatacagcggcgttttggtggcggttgccaaagaaattcatttgttcgtggatcagttgcgcgtggacacaattcgcatggaccaatcaatcgaatggatgcgatacggacgcatgggacgcgaggagggcgttttggtcatcgccacttttggtggggaaatgggcgggggacgggggggggcgaagggtgtgacggacaaaaacatcactcaattaggaggtggtctgtgcgtgaaaatcttccgccgtgtggccaattttgaggagaaccgacagacaatggcacaacgaaaggcgacaaagggcagcatcgaattgccgaaaaagtcgcgcactttcatcgatcagagtctgagggagcggcaaaatgcgcaacttttgcatcaggtggacaaaaaagcggggacgggggggactcatttttgatggattttggcaaatgccgtgtcattcattcattgactgtccgaagcattaatggcaccacttcatgtagatttaccaacgtgattggttcatgatcaaatggcacgcaaccaaaacatttgccgagctgaagtcgggcaaccacggcgcgttgccaaccgccgactcggacgaaccggtccaagtgcagttcgacctgctcggcttcggccccctcttccgtctcaaaattcgcctcgtggcgagcaagtgagagcagaaagggcacaaaagccgaataattggttgaatgatgggaaacgttgagaaaattggacggccagcagaagcggtggattacttttgtgtacaacgcggaggagtaccaattcgccgatcagtgcgtccaaaattaaattccgatcgaatgattccccaatttcttcctaagaatgcttccaatccctcgtccactgatgccaaaccgtccggtgaccttttgcacgaacattcgttgccttcacccagagaaacaactcgtggaggaggaagtgaaattagtgttgtgccgagaggacaggtcgagaccaatttggacggccaacttccaaatgccattgagtgaagcggagattgtttagggtggcaaattcaacaagtggtagaattggcatacattttaccatttaccatttatatgaaaggaagccaaaatattcccagacttttttaaattgtcatatttttattttattaatgaatttcatatacatatttgaatgatttagttgaataaatgtgaattctgctgaagtgaattttcgacttcttattcgagttcccaaatgcctaattttttttaaattttattatttttaaaaaattttctttccgatgaattaagggtaaaaaatacgctgatcatgaatctgagctcggattttccaaaatcaatctttttatctatggtttttcatcaagtatcataaaaaaaataaactgcagccaagcgggctcgaaccccagtatgccaaattggtccccggtgactgtgcgggtcagcagcaacaaaacgccaataaaaaaccaagcggaacatcattaaaataattttaatggtataaattgctaattagaaaaataacttaaaaattaaggt

SEQ ID NO: 9666 - DNA, 1756 bp, Heterodera glycines
aaaatatataccgtatttattgaattagacccccccccctctttttcgagggggttgaaaacaagtttgggtttttaccatatgtatcagggatggaattccgaggcaccgaaaattttcggaggtcggaattccgtgccatccctggtatgtatataacaactacgtattttaattaaattttaattttaataaaggcctctaaatgaaagcgaaactttccattgtttattttttacacaaatttaccaattttttaatgaaatgcaaaaatgcgcttgagatttaatttaaatgaagcatagattgcgacaatccctgatatgttgtatgactagaaagaatgaaaaagtggtgtgattgatgatcatttcgtttcgttttccgttcgtctgtgatcactgctcagtccttcggtggggatgtggacgacctcagaagcgatcgctgctcagaagagcccgccacagatgccacgctgttcatctcctcctcgcgctcctccgtttctcttcgctctttctcttccttttcgccactttttgtcgactttctccgcttctcctcctccgtctcgccattgttcatcatcgtctgcccatttccctcctcttcaatgcgccgcaacagtgccatgcgttgttcattctgttgaccaaattcaccattgtcatggtgttgtacaaggtgtttttgttgttgaggttggacaacaacgacggggtcggcgaccgagttgctgttggtgtcgggcggagagcaaagggactgtgtggagaagggtttccatttgcggagagattcaatcaacaatttgacgagagtccaatcgcccaatggcacctcaaaatggacaacgaatgaacaaaacaaattggcatatttagaaatcaaaagacggataaatcaatcactttcagtatttgcttcagttcgttgaggtcgcaaatgtgaaggacgagcccattcaaattgttctcataaaaagcattgatgagctgcgcctccctttccttaattggttaaacaatttgcattaaaagggaattcccgtgatatttaagcgaaacgtttgctaatgtgccgaccttaacaatccccaagtgtcgtatgagtgccacaaattcagcgacggacattttggccaaagctttccgcaccgatgcccacaccatcgggtcctgaaacacaaattccgcctctgggccgatggtctccttcagtggtccaaatggatcctgctgctgtgctacgtcgtcgtcctcctgcgactcggaaaggtcaatgatcggttcaccgccgcgctgctcgcgaatcgttttgcgcaggtacgggtccaaattggaggtgcaaggcgcaaacgccttcacatgcgcgaccaggagctgaacaactaacgaatattatggttttcgtgatttgaccatgggggaaacgggcctggtcagtgcgggaggcacacattttacgaaaaagtggctcaaactcctgtccattccggtccaaatcctccattcccgaagccacggttatgcgatttctgatttgcgtgtacaattcgtggatgggcattgactcgtcctttgacaaaggcaacaataattgaaaataaagccaaaaagttgggccaacctgaagactcagtgcaatgtcaatgacccaacacatgcgcctgaaaagacattgggggattaatctggatatattaaatataccaaggccactgctcaatcatgctacaccaagcgtacaattg

SEQ ID NO: 9667 - DNA, 1842 bp, Heterodera glycines
cttttgtcctaataattcaaagaattgagaaagggcagatacatacattgtcacgatgtttttcagatagtctcttcctgtgattccgcctccctccgggcccgcatttgtccgcaaattctgctgaatggtcgacacgacaatgttcgggtcgatggcgagcagaacaatgaacggcgcattttgacgtgaacagaaaaacaacgaaagtgccttaaaaaggaaataaattacccatggaatttggtaattttaatatccaaactgacttacgtccaacatttggaccattttgttcgattcgcaactgtcaagtccatccaccattatgaccagccgtgtctgactcgaagtgaattcatccaaagcgaacacctaaattgatgaacaaaagatcaaacaaaaaatggggaaaataatggcgaaaaaatcaccaatgagacaagaaggtcgacctccttctgcagcttttggatcattcgttcgaatggcatcaaatgcaaccgatcagaaattcgcgtaattcgtctttttggcttaaaaataagggataacttcgaagacttatacaacttccggaaccccaaccaaattgacgaaaatgcgagcactgaaaatgtaaagaatgaaggcgcccgagacgagtgccaaggcgagaaaaacggaggcgagccaatgccgagtttggatgaacagcaaagaagcggagaccagtgagcagggaaatgccaaagtcagcaccaacacgggcacaccgcagtaactcttcaatttggaggaacgatcggcgagaagggaaggcgaggacgaacggagagtggtgaacagatggacagccaaagtgccgaaatgctctgagggcatttcccttttatttgatttataataataaatttgtacaccttcggcagcggtgaaaaacgattggataatgttggccaaagagtgttcgccgccaatgaaagaaaggcggtggtcatcggcaaagagaaaactcaccggcgaaataattctgaatttttttaggtttgcttcgttaagggacagagtgccaatttcatcactttcgactcttttcccttctgacgggcgcattcagaaacaaaacattgagcatcaatttgaaacgggcaattgaacgaccaatcagtcgagcggtggcgattgacccgttccaaaatttgacctaaacgagggcaatttaaaggaaaactgctataaaataggcaattaaaacagaaaggtatcgctaaacatttttaaaattatgatatcacctcactgccgtagtaaataaatccgtagagaagaagaaagagcaaaaaaatgccaactccgacgccaagggaaatgagaaaatgtgaattttgaagaataagtgccgaaagtgcggagatgaacaacgaaagagagacggaggaaaggaggacggacagcacgagggaccaggaccagtacagctcgaccccgtccagccaagtgcgggagaaggcgctcatcgaatcgcgaatccgaggcaaaagcagcgacttaaagagaagttggagagggatattagcaaattttatagaaacggaaggaagcaatgagacaagtcatgaaaatggttagcccacctttcctgaaccccatttggcgtaaagtccaatggtcaatggcaatggcaaatttgggtcacaaacaacatcagccaacacctgaaatggaagagttacaaaagcaaaatttaaaaaaaaggtacatcgctgtaagaatcaaagccgaacaaactcttcatgccaacgtcacttccaattgggccaaaaatggtcgggagaattggattgccattctcttggtctg

SEQ ID NO: 9668 - DNA, 2381 bp, Heterodera glycines
  unsure (1)..(2381): unsure at all n locations
ccgagtttgtntggggcgataaagcagcttcgaatcccctgggttcaccaaaaggacctgggcaagtcgtcgggaacggtaacgaagtgccaaatgaagcgctaaaacagtaaattcatcagagacaaaaggaagatgacataatttatgattacaaatggcaattgccttttttcttctcccaaaagtaccgttgtctccgttattgtctgtcgcactcagtttggagcccatattcaccaacagctgaacaatctggacatccttgttcttcacctaatagttgatgaaacataattaggcacaattaaatgcaaaagtttaaaaacccactgctctgatcagtgccgtttcaccgtcccggtttttcaactccaaatttggttttttgtcgagcaaagcgaggagaacatctgaaaacggtttattctaaattgtgtaaccaattgttgttctggcgtttcgacgtttccttctccgaccctcattagtaattaaggcttgaaattttttgggcaaaatttgtttgcttttttctttggaggttgggatgggtttgttgcctcgtttctgacctgaatatgccttgtcaatggccaaatgcagcggagtgcgcccctccgagtctttcgcgttcacatcggcatgtttttccaacaacatacgcaccttgaattggtcacatctgaaacagccttaacaccttcggcgcatccccaccaaacgaaggtttcccgagcggacggcactcgccagaatggaattgccaaaacggtcaaccgtgttcacataggcaccggattggagcagcattgaagcaatttcggtataacctgacaatgcaaatggcattttacaattagcaaaacaccgatgaatttggaaacggagatataaaagtagcatggcgcagttgacaactcattgttagtgccaacaattttcactcaccttcccttgaagcaattccaagcgcggaaagtccattgtagtcaacaacgttcacatttgggtcccttgacagcaacatctccacaacatgggcatggtttcccctcgtggcaagcatcagagcagttgaacctggcaaagggatcaaataaacctactaaaatcactaaattcctttgctcccgtccctttcatttgtcgtaaaggtttctcaccatacattcccactgcgtctaattcagcgcccgaattcaacagttgttccacaatttgacgaaatcccttccgagcggcccaaatcagcgcagtgcttccgaatttgtcgctggtgttcacttgcgcgccggaagccaacaaaagccgggccacttcagtaaagccacggcctaaacagaacacgcaatatcgaaaaaaactcgaaataataatttaaaactttatgtaaatgaatagtaatttgctgacccgaagcaatgattagcggcgtcagcccgtcttcttcgccgactctaaaaaaagaattgaatttaaattagttataggaattttaaaatggatattacaaacatatttatatgcgcattgaactctagcagcacatcgaccacttgcggtctgtttttataacatgcccacattaaagaggtccatcccatctaaacaaagaatgaattgtccaattgaatttgtcttcatacccaataaaattttaaataacccaccctgaaaataggtatattagttggatcatcaccaggtccgggttgtccaccgatgcccccgctgtgagcagtgcgcgtgcgacggccgcgtgcccatggtgggctgcattgagcagtgccgtccacccgtcgttgtccgtctcctccacgtcaatgtccgcaaccagtcgcgccacaatttcggcatgtccaagtcgtgatgcggttataagtaatgtttcgccattgaggttccgcatggcggagacgtgcacgtgggtgttgttgaagaaaggaaaccggccattttcaatggactggaaatactcgtagacatttgacgggacagccacagaatccgattcatcattcgagtagaaaattttgacattttcgctgattggttcattattgccagctacagccggccccatgaggtcctaatttgcgaagccagctaaaaaaaggatgaaagattatacacattagatttgttaatggatattaatgcagaggtacacaaagcaatggcgaataaattgtcgaaaagttcgaacttaaacctaaccctaaccgtttttttaaattggcgcaatgtacataggtatatgtgtaggtttttctttctcttcatttttgattagtttgcttaggagaagcaatcgattaattgttagtncctctgccaagtgaggtattgtgagtaaacaaggttttcagttcagattt

SEQ ID NO: 9669 - DNA, 4684 bp, Heterodera glycines
  unsure (1)..(4684): unsure at all n locations
tctcaacacataatatgtagatgtttttcattttcaaaccaatttttaggattacaggaacatctctcaaattagttgcaatttaaaacttaattaagaaattcaatcaccgccaagctttttgctaatttttcttaaaaacaaatcagaataaattttttttgccgaatttataaaagtttacataaatatttgactggagaatatgaattttgtgttctgttcaactagagttgattattttgactaatctgtagtgcatcagttcaatgctaactttccaattcatcaaccgtaatgaaatcacctgtctctccacgggtccattctactcttcgtcaagtgtgaccgttgctacgaccgtttctgccgactccttgttttgcccgttggttgtgacgtgggcatttccctctgatgaaccaaccgtatccaccacgcttccgctcggctgttgtccttcatccttgaccaccgttatttcatcccctttcccttcttcacccagcattggttttgcggataccaaagctttacttccgctaggcgttgctttttgctcattgggaattccgctgtcactcaaagtgtagacttggattttgtgagttgcagcggggtccgactcatttgtaatgatgaaggcatcttcatcgactatttcttcttcatttatagtcgcttcatttttttgttgttgaccattctcaatgggagcatcagaactggccgaatcctttgcctgtgactgctcctgaacaatgccatgaagtttttcagtcttcactgtgtgctcaactgaaaattaataataactttaatttttgatatgcttaagttctgtaattttattctttcatctaatgagtttaccgtaaatttccagcggttgctccaccgcgggcccaacttcttcttgcttcttttccggagtggtctttttttcgtccactattgatttttcctcatcctctgttgataattctggctctgtttcggtgactggttccagcttcttttcctcttccatttttcccttcgattttaattaaattttttgacatttacatttcttactgtttcttgagccttctcgggtgaagaattcgacggcttctttgagtcgctaatagccgtttccgaaggtttcgacttccccgccacgctgccctcacgtgaccccttagcagcagatgaacgacgacttgaacgacgggtactcatagaggttgagggagaagtgacgtctaaacggtaatccctggttaaactaattcaatcactctataccagaaatattgtctttttttgcgcggttaggtgatttattggtgcgtcgccctcgcttcgggtgtggcggaccaaacacaacagccgaagtcgcaagcgctaatggatcctttccaccgctactactcggtggagcacccactgctcgacgcttcggtgctcgagtgcccacacgctgttcaaactcttgaataagacgctcatccaatatattggccctcggctcccatgtattatgcttgctgttccatcctttccatttaacaaggaattcctgttggccccttcgagttcgtgtctgcaacaagcgctcagctgcgtacacctggtctccgtcaattggatcaggatccatcaatttcggaataaataatatgcaaattcctaagtaaaatcacttttggaagtaaaataatcaattttaaaaaaagcaatgaaaatgacaacagtgaggagagaaaagaatggaaaaggcggcttaggcgaaatgttggtgagtgagtagatgaattgagagaaaacaacaactgttggaagagaaagaaaaatggatgaaagtgcacaaagcagagaaatgcagaaaagcaaagggcgccattccaaaataaagcagcactatgggtcaactccactgtgcagagaaaagcctagtactatctcgtcgtttctctttttctttgtaatttgtctcactttggcgtactatctcttcattttaattatgtaaaaaacaacattcacttcgtgatgtttaactttttttctgcatgttaaatccacaccaaattttgcatatcgatagagaaaaaaattctgcatcgaacgtatcaaatatttttttaggttatacatcccattttttcaataaaattcattttatagcttttaatatattcttttttgttctatgggtaaaagaaatttaccacgcaagcttaattgcaaaaaggcgttgaaagagcgtgagaagaagcgggaggagaggaaagcgcagacggccaaggcgatacaagctcgcctggccaagaaaagtgagtttttccattcatttttaataaaatcctaattttccaaatttttagccgctccccagccgaacactgatgcagaaacgccacaaccatccgaagaagagccgtcgacatcagaggcaccggcgcgggacaacgacggacgaccaccatcaactccaacaccgatgacaccgcaggaaatggacgtgccgtcggtggagatggtggacaccgatgtgcaaatcccttcaacgcctgccgatgaagaccaacaagccgagcccgtgccgtcaacatccacggcacgctgtgacttcatggcgacaccatcgacttcaaagtgcgccggtgcctttggtcttgacgatggtgagtgcgaaattccatcaaaaattttgttttttaaattcatttcattattatttttaagtccacatgtttgacgagctgcgacggcgccacgtttggatcgaggaggaactgcagcgacagcgccggtcaaacgccgtcctccgaaaacagctcaaggcacagcgcgatcgttcgacgagcctcgagcgttcggcttcgtcatgtcgtcagcggaaggccctttcagacgtgaccaacaacccgcaggaggacaaaaggctgagcgcggcgaacgatctgctcatcacattggacgcaggcatctccttcaaagcccgtgaagcgttgaagcggtcgttcgccggccagggacatgacgtttgggcaccgacgtgggcagtgaagcgtctgaagagggagctggccgagggggcaaattttgagtgggtgggcgaggaacagactcgcgcacttgtctgcaccgacgtgcgtgcccttgttgagggtcgacttcaagcgttggcaaaaagtggtgagaggaaaataaataatttttcaaatttataacaaaggccgtctgcaactccatcaggaatttgtctcccaaatcgtgttggtgctgacgggtgacaagggggcgccgtcgtggcagcaacaacaaaattggtattactcatccacaacgttgatccaccaaactccccaaaaaatctctccactttcgccatgatcgccgacacgtagacagacagtcagtacagtgtactatttctccctttctccagtggctatgcggaagaaaagaaggaaatagtacactgtctgactgtctggttacactttagaaaaaattgaccacaaaccgggacccaaactganatgcgacgatgaagtttgggcaccgggaagtttgggcaccgggaagtttgggcaccagaaatttgggcaccgggaagtttgggcaccagaggggggatttcaaaaaaataaaacaaaataaataaataaaatgttatataaatcattaaaatttagtaaattttagcaacccttttttcttaaaatttatatgttcttgaaaatcaaaaaatttatgtatgggaacctggcaatcttattatttaatcaattcttacggttgtttaaacgtataattaaacgtgtgctagtttctgtttggacttatacctgaataccggcttagttgggtcctgaaatatcaagagtcccgtttaattctgtttaagctcataaaattttaagtctttgcacagatcgagccttgtaatgttataagttataaataatacatatgtatggcattgatattgaattaattgtaatgagtttagcaaaataagcatgcttaatcgaatgaatattcgttaaagaactttctatttcctaacttgattaaattttctatgcttttaaattagatggttgcaattcatagacaattaaaaatatttttattttttaactctttaagttggtgcccaaacttcccggtgcccaaatttctggtgcccaaacttcctggtgcccaaacttcccggtgcccaaacttccgccccccagatgaagtacttccttcgttgttatgcacgacagatgcggtttgttttaatgacaataatatgagttacgcataaagtgaaattacacgcaatgagtaatgtgaggaaaaaaatggtgcgaagcgaatgagaaattcagtgggaaaatatgcacttttatgcaattggttccaaattagagcgccaaaaagcgaatttttgaaaatttggattttcgatcgactttcttttgctaaaatatttaattcattgcccacatattattatgggttgcacccactcgggagtggcatctgaccttgagcaaggagatggctgccagacggcttcctggacgcgatcatcacaaaggtcaaccgcgcgccgtccgagcgcttcacggacgaggtgaccacactcgatggagacgatcatcctcctcttctgctacaaggtgtggttttttgggga

SEQ ID NO: 9670 - DNA, 2226 bp, Heterodera glycines
gtcgccaccggcttcatttcgccactgtccgccgtttcgtttaatttccgccgttctcggcacgggccattccctcccctcctcccctccctcctccccccgccctttctccattttttccaatttcaaaaaattatttttcaatgattttgattcattcacttcgtttggtttctgtcagctgttgtttgttggtcattatctctcattatccatctcattatccatcattatctctcattatccatcattatctctcattatccatctcattatccatcattatctctcattatccatcattatctctcattatccatctcattatccatcattatctctcattatccatcattatctctcattatcctttctctttctttctctctctgctcatttatttccctttggcctctcttccatctctctgctgagctttgttttatccatttccttctcaatccctttcactttctttggttcatttatctcattatttacttctttttcccaactttgtccctttttctgtcatttgtcgtcgtccactgattttgttgccagtaatttcattcattaattcatttttattgtttatttttcagtgttatttaatatattttgaaaatgaaaaaaaatcttaattttagtggctttttcttataaaaaaaaatgctcattgtttctttattttttgttttctgtcaaattttgctgctgttgacagtaaaaggcgatggaaattacagtcgacaaagcgattacggtagtgccggtgtttccgacggttctccgccgcccatttcttcgggtacagatctgtacaataagcaaaaactgatccaaaataattgaattgtattaaataatctcgttacattaaaacttacaaaaaaaataaaaattttatttaggggctgaaaaaacggtagacgaatttctgtccaaattcgaagcgttgtccgcccgaactgattccgatgatgtcggcgttctcatggcacaactttcccaaaatatttcctccttttttgaattggctcttcccgtcggttctctcatcgcgggggcccttcaaattagcgacaaagtaattcataattatcattcaacggaatatacggtagttcggcgtaatgcatactgtaattgattagaaaagcaattaattaataattgtgccaaaaaatattttgctttgttagcccgaatctgaacaatacaaagcgatggagaaactgcacgataaatttgatgcaaaacttaaagaattggacacgaaaattgtgagatcttggcaaaagattgacgtgagcacgcgaatattcaacagttacgaagatgtaattagctaattatagtaattaaaggcaattaaacactcatcaaaaggctaaacacccaaattaattattattttattttttatgaaattattattaatttgttcaacttttctttttttgcttttattaatttgctttattttaagaacatcgaaatgccattaacacattttcgttatcacttgagttttttaatgaatccgaaattggaaaaaaatgccaatgaagtgacacaatttcgggaactttgtgattcaccagcgattcgtcagagcccatactcattactgaacgtaataattaattctattaaatattagcttaattaccatcattgatatttgttattgtgtttattcagtcaaattaattcgtgctgagccgaacctaaaaaagtatcaatgataataatattttatttaattattattttaaatttatttgctaaataatgaatcataacttagcttaaacttagtcaaattaatgaagcttggtattgggcgacagctctatgaattctcttcaatcttatgtaataacaaaactagcaaaatttttacaaaaagttgtaactaaaaaatttcgtcaaaatttatactcaatattttgtccataactgtttttaaactcttttaaaacatttcagatttatcgtaatcagacgaaattcgttcgggatatcattagtaccacacccactcatatatcccgccatgatacaataaaccccaactcccccaccatagtgtcgaaacaatatcaattaacaacaaccaatcaccacctcaaagtcgcgcatgaacaccctggtgccgcatgttcatcgcgttgatcaccattttgcggtcggatgtaccggtgatttccacccgtcggt

SEQ ID NO: 9671 - DNA, 1804 bp, Heterodera glycines
cctaaaaaagtatcaatgataattatattttatttaattattattttaaatttattgacttaataattaatcatatacttagcttaaacttagtcaaattaatgaagcttggtattgggcgacagctctatgtattctcttcaatcttatgtaataaaaacactagcaaaatttttacaaaaagttgtaactaaaaaagttcgtcaaaatttagactcaatattttgtccataacttttttaaaacccttttaaaaaattttaaatttaacagaattataagaaatctttgggctatcttattatacaaataaaattgttttggttatttcttaaaaaagtgactaaggaaataaatgtgtcatatttttttacgaaattttttagttacaactttttgcaaaaaaattttgctagattttttattacataagattgaagagaatacatagagctgtcgcccaataccaagcttcattaatttgactaagtttaagctaagttatgattcattatttagcaaataaatttaaaataataattaaataaaatattattatcattgatactttttaggttcaacctagcagcaaattaattaatccttttcattcacagtacatttatttttacactgcccgttactgtaagaatgaatacggattgtcgaaggaacaactttcaatgttggcacattttgtgccattgttgcgcaaagttcgattgcaattggacagcgattattccaaagaaaagttcgatgaaatggaaccgggtcgaaaattattaattaattataattaataaataataaaaataattaattgttactttccagggaatttaaactttttcatacatataaatcaaataaattatataaataagttagatagattttaagggcttatcctttggttctcttcgcttgaggattctggcgccagaaatgttctgagaaaaatggaaagtgccattggtacgattgtttgttttttcttaaaaatcaaatttaaattttctcattttccactgattcggctttttctttttcgataatttaccaaaattttactcggttcacgcggcacttagcaaagtcaaatcgtttttgtttgaaacgggcaccgaaaagtacagaagcggcggaacattgtgagcaaaaaagaaaaatgctaattagggacaaataaataaatccaattaatctgtgtgaaaggtgcatgttgcgagacgtaattattgggacaaattaccaacgaaaagcaatcgaagaaatggaaaatgtcattcgattggaagtgctgcaattggtaagccatcaaagtgctaattgccctactaatgtgtttccctttgatgatttccgcagatggcttttgagtcaatttgtgccaatttaacttttaccaataaatcttcttcgtacatggattggcatctcaattatttcaaaaacagaacgatacaaattcttgacggagtgtcgcaattcgtctggacggaacttgtgagtggggacagaaaaagtgaagtcaaaacgatctaagaaacaaaaagcaaagcgaaaggaatggacagaaaagcacaaaaataaggaatacggtagagaaagtcccaggaagatactgtaatgggtaaaacgaaagaagcggagaaagtgaagctgaagggggggggggggaatcgaactcaaaatgcaaatagacaaatatccaaatatgagcaatgaatgcgcaggagaattcgttcccggaaattgaaattggcgtagtgaaatccaaaatcgacgaaatgcgatggat

SEQ ID NO: 9672 - DNA, 1403 bp, Heterodera glycines
ccccccccccccccggtaatttgttaatttttcccaaatattccctcaatttgctttttcttagattcgttcgccgcggtttcgtctccgccagtctccgaaatgaaacaaatttcgttgtccgttgtgctgttgagaattgctttctgttgtccgattacgagggacttgacgtaatggtcacgcgatttgacgccgaaagggacgaaaagcgggcggaaaaagcgaacgagtggcttaaaaagtgccaagaaaacggaacgaagaacaaaacggccgaaaggacaatgagacaattcatcgagtaagctgaaaaacgaatggactaataaaaaaaactggttttggaatttaacttttttaaataatccgcgaatcattcggcacatttcagccaaaattataacattggcaaagtgtctgagctgctggacaactttgagaagcagcactttaacctcaccaacgatgctttgtaccgtaacatcgccattctgcgcgattacggtagcattgaccgatgtgggattacggtctcttcaaatgaccgtccatcggacaatcacacggcaaacgctgctgctatggtggactattacttcgcggggtccttttggcgcgcctgcgaaagttatgccatctatttttacacttgacaaattcggcaccttggcggaggacggaacgccaaaaatttcgattggattatgccatttaaaaaaataataaatttaatgttccaactctcttactcttaatattttttctctaatgcgccataaaattgtcttcgcattgccgtaagaataaattgcgctttgtccgactcgggcgaccactcattcattattcgtttttattgctcacttaaagacaatttgttgccgcttatgggcaaaataatcaccgacaaccgacggacggccaaaaaaccgtggggatttatttgggaattgcaaatggcattttctgatttattagtgtcggccgttttcctttgtcatgcaaatgccaaacaaacctttcagttttgaatatttattttaaaatttgcctccgattgagtgagtgccttttccttttgccatttttcgtattcataaatttcaatttccatttggccatccttttccaattagaattgcacctcatcccttcgttgttttggccaaccttggcccattatcccccccccccccgtttttgtctcccctttttagctacgcccggaggacattaatttcgttttccatttcatcccttttcggccaaatgttccgggtttaacccgggtggccccgaaaggccgggcaaaaggtccaacccccgggggatggccttgctgatggaacattacgaaataattaagccgggaagaatggcctgcacaagcccattccggc

SEQ ID NO: 9673 - DNA, 2458 bp, Heterodera glycines
  unsure (1)..(2458): unsure at all n locations
atacantttgtcatatttatttttcacaatcccttttcctcccattctttcgttcatccgtctttttggtcgattaccgtcgtcatcactttgtcgtcgtccatttgtccccccccccctcaattttgaattgattttcacagcaatttgtgtgctttcggctgccccgtgcccgtgccaccaattaatggaccttctctccccttccccaaatttgttccccaattgctaaattcccccgggggacggacaccaccaacaaataaatgcttgtgcgtctcccattttataacccctcaggctaaatgtgcctttttttgcaccatttgccctccggcacaaaaaatcggcactttgccgcaaaagttatcacaaggaaaaaaatgtaaaaattaataatatttttttatttttctcggcaaaattaatttcacaaaaacaatttaataagaaaaacacccaataatttaaaactaattacatagatttttcggattacaaatccatttaattttaactctaattcgatttgcttataattaattagatgaatatgcgcattaattggcttacatttcttttttcattcctaattttatttttgtattccaaattaattttatgcctttataaaccgtttgcgtttcttaaaactttttaaattaattttaacttcaattttttacccttttttacaaaattttggccattttatttcatttcaattcaattcttcccccccccccccaaaaaaaaagttaaaaaaagttgtccatttcaattggcgtcaaaaatgggtgaaaattgaatgaatggggtgcaattgatacggacgaagaagaatgaaattggctctccattcagtcattcataaatcggctgctgctcctcccacatttttacagaacaggttttccactttttcaccctccgccgccgcccaatcgctgggcgccaacaaaattttgtgacatttcgccacaatcttttttttttgttttatttcggcgcgcggagcgcggttaatccgccgacggtggacggacgaccaatccgcgcggtgcagcgaaaaaatgtgtcgaaaaaaatttactaaaaaaaagaaagaatgttttttgattagtttttcgatctgcaaaatgcaataaatatttaaatgagtcagcgttcaccagtgtccttatttcgaagatttttgagagtgattgacagaattaataaaatttgtttttttttttaaatttcaaaaattctccggcgccgccttttttaataaaagcaaaattgcaaaatttcaaagaaattccaattaatgcgcaattttcctcaacggcatataataataaaaaaggcgaaaatgagcgaaacaacctaaaaattttccgtttataaaaacaatttttccatcgcctgtcaaaagtcagttggacattttacgttttttggcattacgtctcttttggcactttgtctttttttttgcttcaaatgccatttatcgcctgaggcaatgtcattaggtcgggggaagtcgtttatgccattttcaaaatggtcaaaaattaaatttaaaaaaaaaattccaattttttttttactcaatcttatccgattaatttggcctgcatagatttaaaatccatttgcgccaaagtgtttggcgttctgttttttcacattttccatccatttttcactaactttcccccattgtcacgctccgttcacgattgtgccaattatcgcgcacaaaaacaattttgtggtgccgtgccgaggcggcgacccgaccggcgccgtgccattggcacacaaagtttttttctttttttgtttctgtcctatccattttatgcacccggggggcaattaaagtgttaattggtgtcaacgagacgtgccaacacaatccgccctcccccctcccacgcgcgtctctcttccgttgtcccccggggggcggacggcatttacatattttgacacaagcgaagcagcggcctagcagcagaacgggcacaatgccaacacgctgtgccaaagtgtgtgtgccgtcggcagtagaacaaaaacagcgccgtcgcctctcaaatactgaatgaatggcatccatttcaaacatccttttttattttaaatagtattattttgaattgcattattttttagggacgatatttttatgaataaaaaccacaaaaatttttatgttgtatcagtatttgaagagaaaaaatgacctaaagtgggaaaatatgttctaaaatgtccaaatcaattaaggaacgatgatcggatattctcaaaattccgaagtaatattgttttcatttgttttgactttttttttgttgagaaaaacaaaaaaaatttttttaggtttttataaatgccaaaatctaatgaataataaatatagttataaaaaaattcatttataaatcanattaattttttt

SEQ ID NO: 9674 - DNA, 1688 bp, Heterodera glycines
  unsure (1)..(1688): unsure at all n locations
gatccataatttgccaaacttagttttttttctcggtaaatttgccatttttttttctctggggttcgttttctctcgtttttccaaaaattataattttaggtttaatatttccaaacctttttaggaacacttacatttttaaattatatttaaatattttcgatttggcctaacataaaagaaaattaggaattttggcaaatttagcgttttgaaataaaagaaatgatttaggcaaaattcgttgagctgattaatagttattttttcaatttttccaattttatttccaaatttgttttagttcgtgaaaaagttgccttgaagcaatttgcccatttttaattccccgctgtgaaaaatatttccttttcaatgtacgattaagcaaatattttcttttcactgaacatttatttttaaggaaaaaactttattgctaccattgtttaattgattttgaatttcaaacacaattaaaacatgattttaattatttattttgatatttttaaaaatgttttttaatgtttaaaaataattttatatgtaaagattatatatataatatttttgtcatataaaattatatataaatattaaaaatgtaagatgcttttaatatatgaataaaataataaaaaatatttatgataaattttttaattctttttttttgtatatcagaaaaacagcaggtcaggtcaggttatctgcccattaggacctccagcaggaggatgtgatgcttctgtttttttgtgagaattgttaaaattataagtttctaaatctttctataattagcattttatagtgtcttgacaactcataaaacagtggttttttgcaatataaaaaagtaaattaaaatattaacaaaatttatttttccatttaatttcgtttttcttataatttttcctcaaatgaattttttttatttgccgctttgtcttcaattagacttacaattttcaattttcaattttaatgtttataatttgatagtttaataatattttttaattgttttttttctattttaatgtttaatatttattgacacatcaatttatttatttttcgtttgccattccttttacattttcacatttttccaattttggacccattgaatttttatttttattttctctccggacccaaaaagctttttcgtccatccggaaaagtgaaagcgccctcactttttgactgtgcaaacaaaaaattttgaagggggtccaattggtcggttcgccgactcattaagagggggcgccgaattggccactcgtccgtcgaccgcggcgggcgggggagcccataaaatattaaaaatcaattttttaaatattgaaataatcttttaaaataatttcccattccaaattacaaaattatttttttttaaacagtagaaatgatcggtacaattaatgatcaatgatcaacaattcttttaaaacaaacaattttattgtttgcataaagcattaaaaaatgcgttgtttanattanaattggcaatttaagttttcaaatttgccgaaaaaattaatcgctttttaaatctatcgcacttccaaacccattaagaaatggtttgtttaactgatcacaaaggatcccaaatttggaangacatttgatcattgaagtttcgaaaattgtatgaaaaa

SEQ ID NO: 9675 - DNA, 2830 bp, Heterodera glycines
  unsure (1)..(2830): unsure at all n locations
tcgcgcatcgcatttccgctgttcttcgtcatttttcatctcgcttattggtcattccatttggcatatttgaaatttgataacatttaatgagagatcttttaaaataaatgttatttaatacggttattgttgtatatttttggtgttcaaaaagataaatacaaattttatgtaaactctcatttttttgtttatattttatcaaataaaacatttttttaattaacggaaaataaagaatgtaaatattaattataaataatagctttgtgccatttgtttgtaaaaaatcaaatttttgtgttaatttggcaaaaattcctatgaatcgtaggaatttggtggtccgacaacattgagcattaaatattttttgtaaatattccaatttaaaatcttcgtcaaaaatacatcaaagaaataattttatttattataaaaatggatgtcaatttaaaggattagctaaactaatatttttaatatagctctttaaattggagtgcagcgggaccgggacctgaacacggacaactgagtacaactgagaaccaaggtcccggttttgaccagttttgaccgggaaattcccggctttttccccggttttcccagccaaaaagtcccggtttttcaacccataaagtcccggtcccggtcttgcccaaatttcccggccccgctgcactctaatttaaaacatataaaaaaaataattaaattttaatttgaattattaattaatgcggaaatatcgcgcggcattttttcccgcaaaaattgacacattttgatttaacagcacacatttttaccgtaattatctccatattaaaatagacatttgtttagccgaagtattttgaataattttctctgcaataccactcttttgcctgccccgtgccgccgcttctcatccgccccataaaatggctgtcccacccgcgggagttggcaccggcaccgctggtgccgccgtactggaatggttgcgcaaaaatgcgctggttggcgccacgctggtctcggtgctgctgggcgcactgctcggcaccgttgtacggcaaaattagcaatcgctgattgatcaaaaattaggctttctgatcagttgggctagtccgtaaaacggaatccaaactctgctgatcagcccgaccattggtcggcattaaaaacattttgattcgatgaataccaaaattaccgatgcagattttttggcattttatcgtacaaaattgggaatgaacccagtaaaaatgtcgacaaagaatgtcgccgataaaatttaaactatatttcgaataccaagcatctacccgaattgattgaaatttccaaaaaaaaacgccgatgaaaattttgggtgcagcccggaaattcgaattttaaactggatattttttatgccgtttttaaggggtatggattttccggttcttagggtatgggatatatatgaggtttttatgctaaaattatttataatatatttttttttttgcagattcgttatgccaacccatccttacagaccattatgctgttgacatttccaggagaagtaagctgtggagagagagagagtgtcaaaaacaattaattaattaattaaaataattatttaattaattaaaagacgccaaaaaattttcattgtaaataaatgctcacaacattacaatgcttacagcttcttatgcacatgctgaaaatgatgatcatcccgttaattgtggtcagttattattattctcgaaattaaaatagtctcttaaattaaataattaactaattaattaaatgccccaatttgttaagtcctcgctgatctccgggttggctcagctggacgccaaacagtccggacgtgtgggaagtcttgcggtcgcttattacttggcaaccaccgcaattgcggtgatcaccggcattattttggtaattaacagtagggttaagccccgaccccgagccccccgactcgacccgagacgttttttggacctattccccgacccgacccccgacatgtcgctccccgaggtccccggctcccgacattttgccccccgagggctcggggcttaaccctaattaacagagtcgcatatgcaaaataaccagggaatgtctcggcatgccgatttccgattgccgtaattttttgagcgcattccacacatgtcattgataagattttccaccgctcttcaagaagcaagccctggtctgtgccattgttttgcatatgaatggcatatggcggcgttatttaaatttgtgtcaaaaaaccatcaaaatgagaattttttttgatataattttagtcaaaagcaatcaaatttttattcttgatagcattcgatagcgccttaagtgttttcaattatcatgctgcaaaattccaaaaaatttcgttaaataccaagaaagttatgactaaaaattttcagaaaattttgagtttctcagtgctcataacttttttggaacttaatgaatttttttgaaattttgcatgataatagaaaagcttagggctatcgaaaaatatcaagattttaaaatttggttcatttgggcgaagttatgaataattttttgtcaaaagtttaccatttgatcgttttttgagtaattttcatagcaccggatttccttcatctccatggtccatttgtcaaatccgttggaaaggatcaatgccatgattttaccgggatctttttttttaccgaaatctcgacaattcgaaattttaaatccaataatttccgtgttgaattcgcgnatttttaatccctgtcaagacacaaca

SEQ ID NO: 9676 - DNA, 4348 bp, Heterodera glycines
cgccgacattcttgaaaactaaaaaatttttatttttgcctgcttcaaaatgttttacccgggtgccatgctgaacgcgttggtcaaggaccggttcaccaacgaccagtaccacaacgtggacatcggccaccggtgaacgcacagtcagcagtgagaattccatcttttttgaggttgtatatcggcgcggaaaattctcgggaatttcaaaaaaaattttatttttttgtaggtcgacggcccatactacgccatgattttgccggcttccaaggaggagggcaaaaagttgaaaaagcggtccgtggcattttaatttaaatattttaatggcacaattttgcttttttaagttatgccgtgttcaatttcgaccgtacccttgccgaactgaagggctttgaagtgaaacgacgtggcgaactggccatcatcaagtcggacagcacatttattaataaacatatatttcgagaaaaattcctcgctttttttggcctccattttttgggaaattttaattagaacaaaaaaaaattttttttttttttttatacatttttggactgtttccatgccatttttagggtgttttaaattgtgttaaaaatatgccaaattttgagtttaaatattttacaaagcacaatgcccaccctcaattaggacttattcgagagtcttgaaaactactcacaatcaaaccaattggcaaatattgatgatggtgatgttaaggtatttccaaacggaggtgttcaagcgctttttggaaggcgcgacgctgcaagaaatttacgaaaatgtggccaaagaggcgaactattggctggacattttgcacgacaaagtacacacaatttattttcttcaatatatattttttaaataaatttataaattatggaaatttaaaatttttgatgctttcgatttttcaacaattaattaattccgtttgatggggggggggtgaggtatgagaaaaagacagttggcgagagagcgcatgaaataagagaacagtcagtttgagagcgacgagaggcagaagaagttgctccctcctctcgtttatgagataattaataacaaattatccaatctaattaagttaattgttaaacatatttaaaagcatttcccctcttcacagggccaaacgctgtcgcgccgtgaactgttcgatttgattggcgaaagcaagaacatgagcaaacagttggaggagtacggggagcaaaaatccacttcaattagcaccgcaaaacgattagccgaggtgggaaaagcaattaaaaatttttaattcgtgaaaaattttcaaatttttccagtttcttggcgctgacattgtgcgcagcaagggcagcttggcgtgcagttttgtgatctcccgtttcccgctgggcgactccgtctcggaacgcactgtcagttctttctggaacagccccgtcgttctccatccttaaaattttaattacaataatttacaaaaataaatataaatttctttaaaaaatattttttatatttaaacgaataaatatagaaaaatctttcgaattattttgaaaagaagaaaattcttaggaatttgtcaaataaacaaattttttgagttttaaaaaatttagggttttggcttaaatttaaaaaaatttcttaagtcttgctaaattttcaaaaattaattcaaacggagtggaattaagactcccgtttttgcaaaataagtaaaaaaaaatgtacaaacaataatgtgtcaatgaacatcaacatttcagcttccgttggccattttcgacgcggcgcccaaagagcgcgtcaaattcttgcgcaaatggaccaaagcgaattcgttgggcgaagagttcgggtcggacaaatgtctgaaggaggtgagcttttttggtgtcacctttgtggaattaaataaattaaaaaaacaaaaaataaataataaaaaagccaatttgattttccccgtttttttttgtagctgatcgactggcaatactacattgaacggttgggcagcaccatccaaaagattgtgaccatcccggccgcgttgcagggcatctcgaacccggtcggtcccgaccatttcgcccgatttttttccctcgggttcgaacccggtcgatcccgacgatttcaaccgattttttgccccggggacatttcgatttactttatttcattttcattcctttttcgcgcaggtgccccgtgtgctgcacccgcaatggctggagaacaagcggcgggaacgcattgaaatgcacacacagccccggatcacggacatgttcaaggtcatcagatcagaccaccccgactgtctgtctgacaaccatgggggctaacttacattgataggacataatcctgcggatttatgccgagatttatcagggacttccgtccgtcgacccacggaattgtcggtgcaacgggggtcgggaattcggaaaaatgaacgaatgcccaacaaaatattaatttaaaactccacccacagtctgccaacgcccctgcttccgtcgtcgtccgtccaatgccaacaacgccgggctctgctggccgaaagagtcggggcgcctccgtccatctgacgccgtggtcgttgaagaagaagcagcagcaccagcagcaatctccgctgacaccgacggcggcggcgacgacggcgagtcgacggaagcgaccgttgctggccacaagtgttgatggagatgaacaacaacagcagcaatgtcctgatggtgccagtggtaatggtggtacttaattattattttttttttgtacatgcttggcgccatagtcatttgggatttggttgcgggaattttgttgaacaaaactggcccgtgaaaatttagaaaagaaattaaccaaaaaaaaaacttggaaattattagaaaccaagatattctaaaagattttacgaaatttatgatttattgagtattcaaaagttttttagtttttcttgacatacaatttgacagaaaaaattttctaaaagggcttttttcctgaaaaattcttcaattcttgtctatgtgtattcagtttcatcaaaacgcatttgtgcatctgctgatgttgttgttgaactgctcgaggacgaggaggctgaaaatgcggagaaccgtcgaccaccgcctgcccaccagccgacagggcccatggatttggtcgcgttggacacactgttggagcagcagggtcacaaccaacagccggtaattaattattatacaattgattaattaatatccatctttcatgctaattgtaagtgtatacatactgtaatgaccgtattttagcaaaccgaacaagaaaggcgcgcggaagcagtgcaaaaaacggcaaaaatggacaagaaaaagagcgctgcacagctgaaaaggtgtgccaatcgaaaatgttccggaaaaatttcggaaaatttaaattttccagggaggcaaagcgtgcggctgttctgcaacatgccggccgtgcatttccccggcgctgttacgccgcaatgagtcagccgacgaaacggagttggcacagcgacggatttatgccatgggttggtcggaaaatgcatttttatgcctttttaaatttattttttcaacatttagctcgactatctgaaggccaaatggcttctgcagcgacaagcgcggaccaccgcgttcaatgaggcaaactttgttcaattttcaatttgggattttaaattcattttaatccaagattatcattttatatgataattttatatgtaattgactcgcgaaaactgttttctaactgttaaaaattttcatttatgctcggtctttttcggattcactaagaaatttaaaaaaagaagtaaaaattttcaacgatttttggaaaattttttgaaaaacagtatttcatcataaaattttgaaaaattctctagtttgaaatttaaacaaaaaaaaattccggggagagagaacgaacaaggaactgcttccgtctttttcagtccctcgggattttaaatccccatttaaaaaaaaactaaaaaatgtttaggcacttttggagcgggccatggaagcggcggatgatgcccaagcagcagctggaacagatgccgattccgacgctgttcgcatcggcacttccgctggtggtggtgccgtcgtccatctgtcgactgccaccgccgcggcactttcgttggcacgccgggagagcacttggcacattttgcaggtacacaacgcacatacacagtcaaaacactaccgtacctaatcaaaccaatgctcctcaagtttttttgctccac

SEQ ID NO: 9677 - DNA, 1486 bp, Heterodera glycines
  unsure (1)..(1486): unsure at all n locations
aaaattggtgcgtaaattncaattggtttgagaaaataaacttttgttttttggaaagacaataaaaatttttttctaaatgtgtcactaaaatcaaagaaaatttttaaagaaaatttgaatttaaaaaaaagtcatgttattttttgagacataaatttctaagttaagagagtacaatgcaaattttttttcaaaaaacatagtaatcatcataaaattttaaaaaatatagaaaatttttttccaaaaatattttttctaagaatttttttttaatttctaagtattgaaaatttatgaactcgttctttaatagatttctaatgcacaataaagaaatattacactttcaattttttaagccttcgacagcgtgcggacgcggcggaagcggaatttcccggcatgcgtgagcaatgccaacgtgtgcagcacgtacagtcccatcagtgcaccagcgagaaggaagcggcacggcgcgtgcacgcgctgctgaacgcgttgaaatgggcgcccacggagccggtgctgctgtgcacgctgaccaaccgaccgacgcaggccgagctgttcaaggtgttcaccacagcgtttgggggagcatttttacgaggaaaaacggggacggaacaaaatctcgtcgttgaaaaatcaaaaattttcaagaaaaaatcttattgttagaaattttacaagaaaatttcaaggaaaaaaattttgaaaaatttctagctattttttggaaaatttttcttgaaaaatagtaatttatcataaaatgaaaaaaacgctaggaaaagtttaaatttgtttcttgaaaaatttctaactttgaaacggcgggcagattttgggcgcgatagtttggagtgcacccagaaaaattgccactttttgcaattatttattttataaatttgtgccctcccccgaagaattatccggcactccgtgcgttcgcttctgtccgtttgcgtgtgcccgagccggacggactgctcaatgtgctcgagtgggcaaattcgttggcgcgccgctccatgcaacactttttcaacagtttcacatttttgaaggtgagtgagtgaaaatgcgattaaaaacatttttcctaattttcataattaaataaattaattctcaaattttaaatgattttttgtttgccatttaattcgataattatttttccaaaaattaaattttcagacgaaatttaaaaatgcaattataattattatttaatttattattactaattgaaaatagtttttatattgtgcttatttatttcccttccgtttttgtcccatttttcctattttctctgtcactttctgtccattcctttccgttgctttaaattttcccttcatttgtctcattcctttcttttccaatgactccgtggcgcaatggtagcgcgtctgactccagatcagaaggttgcgtgttcaagtcacgtcggggtcaatagcttttt

SEQ ID NO: 9678 - DNA, 5523 bp, Heterodera glycines
  unsure (1)..(5523): unsure at all n locations
attcttagttcgtttttaatcgattnataagcgcagagctataataaggtacaccctttttctggattgataactcaattattcgaatatttcgaatgaaactaactttgatcctttcgttgttttcctttgtcttctctttgagtgtttgaatactgtgattaatgcgctgaatttcactgcgcattatgcgaatttcgttgtcgagcaacagcgaccgctcccgaatttggtccgtagaccatttgcaaaatttcagcatcgatctaaatttaagaaaaattaaatataataaagtaacggtctctgcataatcttgtgcacctcatcttcagcggtttccatcttctcgtcttcctttttagcaggttgatccgctgtctcaacccattaattttatttaatccgttgtcaaattccacaccttaattaaaaccattagcactgataaaataaatgtaaggaaatgaaaatatatttgaagaacagaaaaataagcgattgttaaagcataggcttaagctaaagagaaaaattaagtcagcaaaagagacaaaacgccaatttaaaaaaaaccgacacagagggttggcactatgggtcaactccactgtgcagagaaaagcctagtactatctcgtcgtttctctttttctttgtaatttctctcactttggcgtactatctcttcattttaattatgtaaaaagcaacgattcacttcatcctgtttaactttttttctgtttcttaaatccacaccaaattttgcgatatcgatagagaaaaaaattaggaacgaaatgtaagggtttttaagagcaaaaaaagggttaactaaaaagttatggagtgattaaaatttttgcatttcttttcctctccttttggcgtactattttcacatctctaacacacaaaaaacaccaaattcgaaaattctaataatttttgttataagggtacaaaatcactttgaacatttagaatcaatagaaaaaagaataaatttagcattttggttagaaagagctgcctaggacttgagttataacgtgatgaacatttgaaactctcacaacttttttctgagatgtcaaattgcttagcattcacttagaaaaagattctccttttcaaaatctttttttagataccaaatttgttcatttttgttgggaatgaagcgtattatggctgatcaaaataaaaaatacaaaaaaggcatttaccagtgtaagtgcatatactttgtttttgcgtgtgttggcgttttgttttacgccaattattttttggcaatttttttcgttttttaccgtccatgggcaatggtaaagattattggtcccgaaatttgtttttttaatagattgcgagaaagttattttcaagggtaatccgaggcgcttacaaattagcacgaatctgatcctctttaggctcagtttcgaatcccaaactcggattcggacatttttcgaaaattaaaattttcatttgcaaaaattgttaaggcattctcgagttgtacaacaatatgaaaaaaacaagggattaaggaattttaaattttcaaaaatattcgaatccggggttcgaaattgagcttaaagaatgttagattcgtgctcagcacctcggattatccctaaaaataataaaaataacaatcgctttgcaaattttaccgaatgtttctaccaaatgcttactcttgttgttgttgaattatgaaaagcaaatggaataaaattgaataggaaaaataatatggtatttgcttttgtttttccattgtcttcatcgtcctttccttttcgctccccgggcttttcccccattttctgtggaatttcaacaaattttggtcctttcgccgccgtctctccccccgcggcattggcgcagtgaaagcattgcgacttggcaaagcgcaattggacagtttgtcagtgcgaaaagccaccaaaagtggtgaacagggtgagcatcgacggcaaatttgagcagaaagggacaggcgacggcgtgggaaatccaagcgaacatttgcaaatggacgggcgacagacggaggacgacgcagtcggcgaaaagcagcgccagcgaaagggcgagcacggtgcaaagggacgcgtcggtgtccgcggaaagcgccgcgtgaccggcggcggacattcccacggcggcgccaaacggcggcaaagaggcgacgacgtgcgcatcctttggggtgggcataagtaattagcccatttatggcctaattagaaggactccggagagtggatttaatgcttacccgattaaaaaaagttgtgaaaagtgcgcaactgtgcgcaacggcagtcagaaagctgttcgtatccaggtccatcagttaaggcatcatggaactcttttgtctaaatttcatttgatggaaaggtcgatctgttgtcatggcaatctttcctccccacccattgccaaatgaattctttgctgaatgtgccctcattgacacggaatttggcaatttcgaagttaattgccttggttccagcaaatgataattgggattggtcgcagtcggcaaaatgaaagggcaaattgacttagtgaattcttaagatacaacaaaagcattctctgctgtctggtgtttgactgtgttgaacagaagcacatttttaggaaatttcttgatacaaaatcacaaaagtaaaaaaagaatcagtcaatcttcatcttgtcagtcataatacctttcgcgcaagagacagttgccagcaaatgtgtgccctcgcatttttcaattgcatttgaatcacccaccgatactcaatgttcaccacgcacaaacaccaataaatatttgcgtcgctaatgccaaaatataaaaattttgaaatttttcttcgaaaaaagggcggtaccatcggtggtattactttgtcgtaattgcttctaatgatacatttcaccgacaaagagaacatatccaaaatttcagtttttttttgttacccaattgaagattattttaattcatcatcttaattcaccgtcaatttcttcgcacatacataaatgtgtatttctctccaaaattgcctcaagccgaaaattagtctttgtaatgggcggagaatgaatgaattgatgagcatgacaaattgacaaacaccgaaaagaaacattaatccgcagcagcaaaaatttggtatttaagcagtgcaaatgcctctccaactgctcattctttctcccaaagtccattcatttgccattttcactgcccttttttaactacaaatttccaaggcatcgaaacatttcagaaaacaagtaaatgtctaacaacaaaaacactctgtcgcttcaaaactccgaaacttcctcgtccgcttcttcttcctccccccgtccaacgtcgccgaacggaattatgaacgaatacgtcaagtgagttgggcatgaataaaacaaacattgcccattccaacggatgaatgaatgcctttcagaagtgccactgagcggatgatccatctgagtgtgttggaggtcggccgcgtgggcaacgacggcgttggcattgtgcaactgcacaacactttcgacttcggcgcgtcggacgcgcggcggacctgcgcttgttgtgccgttctgtgtgcttccgggtgcgggtgcggccgtttgctggcggaaggcaagtgccatggcatcggaagatgggctaatgctttaatccatcaaccccaattttaagagaccatcttcaactacgcaaagaatggcatcgctgcaaagtttgggagcggaggccgaggatttgggcggagatttggtcgcaaatggcgcaagaatggaagggacggacgcctcgaaacgattcgcgaagggacgtacggaagagacacggcaatcgaacagaacggagagagggcgggacacgggacggtgcagagaggcggcagaagacgaggagtgaccgtcagaagaaatgagatgcagcggcaggagcaatcgatcggccagagcgacttccgtcttaaagcgatcagtggacaatgcgacttccaatggcaaccgatcggatgggacgacgtctttcagcgagaaatcgccagaggcaactcttttgtgacgtcatttggaagaattgacgaagaacgtgcagaaaaaccgcagcagtcggtccgtggaaggggaggaggacgcggacgaagtgcaaacggcggacgggggagacgcggaaacggcgccgggcgcggatggtctcgcggagcatcgcgaaactttgaccaaggtggacggactgatcactaattagtgctaatccccccccctcccttcagaatggcagatcgatggtccaattgtggcaggcgtctcaagttccaagtcgggcagtggcactcacaatgcgcgttttgtccgtcgtgaattgcgcagggactccgtcggcaacagctaccgtaacgacagaagggacgagcccaaactcatctaccgtagccgtaaagaaaattcgaacgatcacttttttcactaatattcggcatgaaatgttatgtcaccttttaatattccgtcgttttgttcatattatttgtttctccttatctatttgttgttactcatcggcagtaatctttaccctttaatcattttttcttattgtttgtctctttttgttttatccgtttttttcacttatcaccactaatcaacaaaggagaggcgaataaaattttgttttgctttgacgacttaattttcgattttctttcccattaatcaaattaatctttctattatcagaaacaataaattataggccataaaatcaaattccattcatttttaattgatttttttcattaaatttccccaattttggttccgatgcgtttttgctgttgtgtcaaatggtgttctgtcattgctctgctgattttcggcataatttgcctttgttttggcattttctctctcatttttgtgcccaaattggtcaacaaagcgatcagagaagttggccaagggaattaaatttcaaaaaataagagttttattaatgcacagaatgtttttgttggtcggtttccaaacggaagtgataatttcgcaatggaacagtacagagacccgaaatacgacgtaaagtgagtgaaaaagtaaaggaaacaacggcagaagagaagtctaaccaccggcggcggtggtttgttcatctaccgtacccccttccccgccccaaacgaccgtacccacgcgccaaattaacacatttattattattcattaattaccatttgctccattaaatcaacagccactttaggatgcagatttgggtcttttctgtgcaaaaccctaacgaaattgtgaataaaggagaaaaagcgaatgtgacggagttgggtccgttcacttacgagtgagtgccgccgggcggtcgaatttaagtccaatttttgagtattcgaatcaaagaaacaatgtgaagtttggctccaatgactcgcgact

SEQ ID NO: 9679 - DNA, 2420 bp, Heterodera glycines
ctcgggctctcagttgtgctttctcggtgtaaaagccggtcatgtgttcgacccgtcttgaaacacggaccaaggagtttagcgtatgcgcaagtccttgggtgttcaaaacacaaaggcgcaatgaaagtgaaggcttcttccggagctgatgtgtgatccctggcaatgcggtgttggggcgcaacatactcacgtttcgcttgcatcagatcaggcggagtcagatcgtatgctctgagacggaatagatggtgtggtattccataacagtatgacaacagcagggagtacgagggaagtgggacgagattgaaactgtctgttctgatgcaggcaaattggatcaatttgcgttgccaatcaaaatctgttgtaagtgctttctgattgagtaattcacatatttctgtgcagagaccaatcagcaagcatttgtgttttaaagctcgtatgtgtatcaatttttccacctcttttcagtctcattgacctttctgtgcttacatttctccgtttcaacaaacaaatttgggacagaagtggcaccaatttgcttctgcggattagttacataaaacattgttgagacaatttgggatgtttttgtccgtgtaattcttaagacataactttttctaacttggttaatgcctgcctatcttcttggtatcaaacgaatgcttaaagtctcggggttttataaatgcaagaaaatagcaaataccggcattaaaaaagaaattacaatgagaaaacacgaaatcaagtttttcgagtatgagtatattcgggaattatttttttgcctatagcctttacataggtaaaaataaaaaataattctatatactttaagcttttcaattggtaccaagaaattctcacacaataaagcaaagaaataaatttatgttttgtatattcgaacgagcgaatcaacaaaagatttcggagaaaacgagaacataaaatcaaatttcattttgtgagatgtaaattattattttttaatttacaagaaatcaaaaattgctgttgatgcttagggacttgcgagaagcgatttttaccgggaaccgagaccgagaaatgatcccgggaaacgatacgagaaccgagacccaaaaaacccgagaaatttcccgagtcgggaaccgagactctctcacatccctattgctgctcacccaatgcaattaaattattgccgccccataaattaggcgtttatccatattctgctagaagttgaaaagaacgatacttttggaaaacagcaaatatttagtagaattttatgagcgagggaaagacgtaagaaaaaagtgaattaattggttggaaatgttatcaaattcaattcttccccggaagggcactgaacaaaaaaataatcagccaaaaatacgcatttcaaatttcccatcagaaattggccaaatcgaatttgaagttgggcccaaagttcgcctcaatttggtcgtaaatgaatacaaagaaacgaatggaaacagcggaagaccatcagaagaagaagaagaagaagaagaagcagcagcagcagaagttggaggagaaccgaacaaaaagaaatctgtaaaatatgaaaaaaagaagacacaaaatgacacaaaattaaaaaaggaaaattaatcgaaattatttcattttccatggatcagaagagtagtgaaaaacacttgcaaaccaacccaaacgaagcccattctttgtgaaaatgatctgccgagtggacaaattaatggcaattcccacggtatcgccagcgccgtaggaatattcggcatttattcctttgccttctccgctaatccaaatctcgccatcgctttcatatgcataattgcctttgtggtcaaaaatttcttcatccaattttgtttgctgtttaacggcgaaaccaaagtcgataaagctgaaaaatgaggcaaaattaaaagatatttttcagtgatttttaccttcccattgttttgaccgaaatttcgaaataaaaaatgtcagactttagcaaaaccgggtgttttgcgaagatggaacggcagccttttgagggaaaattaattttaaaataatcagttgaattataatttacccgatctgtgttccttgctgtggacagtcaaattgttttcgtcaataattttgaggtccttgtgacaggcgtcaacgtcccagaaatttggttggaaaatcaaatgcaccttaattatgttaaggttatgctttttcattctttcaaaataatgatcgcttttgaggcaaatttttgcttttctcctccccaattcaccataagattctgtagttttttattcaattcgtaaaattgttgtttctgccatttttccatttcgtctatccgttttaaagcacatcaaatgatgctgtgaaca

SEQ ID NO: 9680 - DNA, 961 bp, Heterodera glycines
taaaaaatgtttgctgaaaaattgtggtttttggaattccgagattccgatcccgaagtttctggtccggtcaatcgccaatcccgtgcaaccctacttcaaatatccagcgtatttaacgtaatttgaacattttattattaaatattagatttaattttattttcaaaagtattattgtcgttcccttgttgctgtaaaacatgttcccgtttcagcgcttcatcgtccaacttgtcaacattcgcctttaatatttacaaaaacaattccaatttgtatcgagaaaaaagatgcgccaattttgagctaatttttcagattaaattcatgttttttttaaaaaaagtgatttcacaccgacagaaattttctaaatttttgtgaatttcgatgattaagccaaagtgagaattattgtaaatctgattcgaaatagtgtggaatttttcatttggtaatgccatcgttccactttctgtggcgcctatcggccattacccgaaaattttcatttgccttcatcatagtgtcacttattttcctaattaaaagtgccgacggaattttcgctccgtgctcctcccataagccaaaaaaacaaaaaacaacaacaattgcttaaatttttattgaatattgagccggatgtttgtaaattattttgaaaaagcatttttatattttagcacctttgaaggttcatcaaagtttggcactttaccatcagcaccagtgcctacgccatttgtgcattcatagcaaagccaaataaaggcaatgaaaaggagaaagaatgaggagtatgaagtcattatgctgggaattcagtgatagcttaactgataaaaaagtaaaataaagtaattatatttaggtttattctgccttttattgcgatagcttttatttattttcttttaataaatcgatttactccatttactgacgcaataaaaat

SEQ ID NO: 9681 - DNA, 1919 bp, Heterodera glycines
  unsure (1)..(1919): unsure at all n locations
cagacagaatttttcattttgtttttcaattgtcgaaatttaatgatttaccctctataatatatttacgcatttaagagcttaatttttaaaagaagttaaaaaatcaatgtttaaccattgatatgaatacaattttatgcttattcgataggaatattatagcaactgacataaacatgataaattatcgtgatattatttcgaaaatccggaggccatgagtagaatctaaaatttagaagcatttatttgttatgttttcgaatttaaaattagccttctttttttgaccagcgggatttttacgggaacgggagtttacgggattcccgccccagctcccggaagattctattgaaattcttcaaccctaaaaatccgatccctagagatgacttaagcatcaacccaatattaagcgcaaaagctagctcaagaccagaaaaatggggcgaaaaatcaccaaaaaacgaattaaacccatcgtgaaaatcaccgctttgatttgattaatgaaaaatcttttaagcttaaaataaaaataaaaataattaaaattaaaattgcattaatttcatttttaaattttgattcttttttttagtttcatctcctgtaattgttggcttttgtgttcgatttgcttgcatttcgggtaggcttatggagtctatataaaggaagaggaagtgtagcaggggtgggactactctcgccaactctcgccatttttgggactctcgcctctttttgtagaatcatgttaatttctagattttagacctttgatttcttagtgaacttattttaatttttgtgtcgccttgctaattactagggttataaattatatgcttttgcatattttttctgcgcatatgctatgaagaaaggggctcaaaaatagcattctgcgtaaaatgttttgctttggtgaaggtttttagtgcatataaaaagcatattttgggtgtttttgagaaaatgtatatttggccatttttcgtttttagagcatattttggccattttttggcaaattttcataacaaaatacaaaaaaagcaaaaatacacccctaatttgtaaggatcgagttttttgggaatttaaaaaatatacccttgaaaattgaaaaattttgaattttttgtaagaacttttgaaaaaaaatgttgatatataagaaaaatttaattttcttttagcatatgataaaaattaaaaaaatcgaaattgcatatataaatttagaaaatcaaaattttttgcaattatctaaaaactctccttagttattgttttgatcttttaaaaatcaattctgtatttttacacaattttgtcattttttgagggttagaagacattttgggtaatttttaaggcatattttagtgcatatttgggcatttttcgggtttttagggcatatttggcatattttagtgcatacaacttataaccctactaattacttttccctaaatcttagaaaaacaaatgtacatacaattagctttttgtagaactcattttaattttgcgtaaaataaaaataaatcgtaaattgaaaataatttgtcaatgcgaaaaatgttgattgaatcccgcagtttttcaattttaaagatggtcatcagcagcaccgaactttttgaagccattccgctgcagaaccactaaagttttgacagcgaacgaatgtaaaaaatccgctgattcccgacgattgcaacggacggtttgaactgcgcgggtgggcagggttcagttgggtcaaaaaatgatgggtctgatttaaaaatacataaattattgngaaaaaatgagtaatttgggaccggaatttttgaaaacaaaaccgggcataagaaatgccaaaaagttgggatcggcactttgatttcaaacaa

SEQ ID NO: 9682 - DNA, 1708 bp, Heterodera glycines
gtattaccggcttaggcgccggctttgagattaattttaggatgatgtaattaattctgaatacttcataacctttctgaaatattaaagaggtgttgatgaacctctttaattgagcctatatattgtgatttacaacagtatttcctctccttttttcttaattaagctgacaaatgttttcaattgttggaaaaaaggtcttcaacactacctcgtgcaattttctttcgaaggcattttacgctcatatgagcaaagatgaaataatgtggcattggcctgcgcagagtaaattttgttgtttttttcaattttgaatgtttgtctaaatgttacaaattctcagaatttgaccaacatttcatcgattacttgaacaagccggacattgacgggtgggaaatccgaaaaggtacaaaaccaattttgaataaattacacattttattgtacgctgattccttcttgcataatcgaataaggtcttcatcctaacttttccttttttagctctcactgaactcgggaactttgacgtggtgccagaccccaaagttgttgaagcagcgctcagagctattcgccgtgtcaatgactttgcgcttgccatccgttttctggagcagattaaatacaaatgtggtggacccaaaagccgatccattgtgtatccgtatatcattcaagaggtaatttgtgacgggcattaccgcccggtatagaacgggatcccgcgcggtttgtgggatcgggatcccattccgcattttttggaaaatgtgggattagtctcagcggtatgccattctgcaaaattttgagttccaatcccgagcgggattcgcggtttttagttcagattgcattgcatttaaaaaaaggacattgacaaatatttttctgaataaactttgaataaatccaattacaagatttctgtaaaatttcccggcggtgccttcggctcgccgaatcagcctaacggacggcgtttaccggcactgcaggactatttatttttttttgaaaaagcgtgccgcaaaaaacaacataaaatcgtcaaattttatgagttaatcccattaacaaactcacgacttctctccaaccctcggagcccttaggaaaatctaggtctattttctacacgaaaagtgattttattttttaacaattaacttgtccgaaaaataattaatcgaaacgactcattgtcaggtcaaaccggtgatggatgagttgggcattccgacgctcgaggaacttggctacgacgagcccgaattcttcactcccgaccccgagtggtactgggagaagtcctggtaactttcccgttcatatttaaacgatgaagccgaaaaaaataataggtacaagctttacgggttcgacaaactgcctggatacaaacacttggcctgaactgtttggccggagatggcgtgtgcatagaataggaaagaaattgttggacgactctttggatggatatgttcataatcaaacgtaaaatgtttaatttgttaggataaattgaactgaatgccattttgtctcccgctttacacttttattgtcttaatgcaacaattcgcttgtattttaaatttatttggtaattcaatcgatgggagtgtccgtgctcttccttcccttctttcgcatgtccgtccatttttcattgttggtgcggattgatcgg

SEQ ID NO: 9683 - DNA, 4465 bp, Heterodera glycines
tgttgttgttgttgcagcagttttcgagcgttgcggcggggcctttggctcgactgtttgtgttttgttttgttacagtagtagtcagtgactacagtagtcactgaccgtttttcccatgttaaatcacggggaaagttcgtttgggtaaacaaagaagaggtggcgtactgtaataccaacgtcatttcgactctttggttcccaaattttgcgccacaatccatcgtcagagcgcctgcgcccaccccaaaatccgacgccttttggcccatattttcgcgcatggcattttgtgcagtacaattccgcctcgtggggcgctacgttggtggattccaaaagtttgttacacaattctggaagtcaattcatgaaaacggacaaagggagcctaacaaaagcaatgtgaagagagacggaagcccaaattaaaaaataataaaacagaaacacagatgggcattaaaaactcaccgcacttgaagcagaatttgtgccagtcatctgtaaaggaaatgcgattcgatcgaattatttatgcattattattccggtaatttgaactgacatccgccagcaaccattttttccgctgcataaaccgatttcccacattttgggcactttgattggactggcggtacgaagccgggcattttgtgaagctaatgatcttatcttagagaatgactaaagaaagggagaaggaaacgaaatgttcgatcgacgacaaagctcctataatttgatattcccaaaggaaaggggcaaaagcgcattgaacggaaggctaacggacggagaattttagtgaatggagggagagagagagagaagcacttcctgcagctgctgccgttgatcattctctgtgagggcgacaggcgcacgctaaataggagggaaaagggaggggacaagcgaaggaggagggagaaaacaacggggagacagacaaagaaagcgaagcaaaacgcatttctcaaggatcgctgagagtggcgggtggacaaacgctttgtgggattccctttccctctgtcccttcatttattcatcatcgacttcttccactcaaagaaacggatggatcgactggggtggggtggaccgataagttgagatttcaaaccgccgaagggacaaacagaaggaggaggcgatgacaaatgggcggaccagttgggctactgctgaacgcccaaccaatggcagagatcctttgtgtttggatttggggctttggagtatccgtccggtccgatagggacaaacacaagtgatgaggaggggggaggggtaaaggagagatcaaagcgaccgcaaacacaaatcatttttgttttcgaaaaatcaaattttaacactaatattaaattgattagaaaagaaataaaatggtaaaacttataaaattaatgaggtaattaataaattttcacaaataattataatttaaaaagaacgggaccattagcctttgcccatagcacaacatcgccatcattttcattaacgtaaaaattcattcatcgacttttcattcccaggaatgctttgcagcattagtcattcactccgattacgatcgcattcaaccgtcagtcttttccttcaccgtttttatttataaaaatgacattttctaacgttcgtttgtttgtccactttgtacctttgaacacatacctctctaaatattcatacttttctcattttacattctttgaaaagctttttgcaagtgttttggatttgcctatttttaaaaaattatttttaaaggcaaatcactttttattgtctctgttattcaatggctgcgcgaaagactgttgcacgccgtgcccgaccgcaacgggcgaccagcaatgttttcgccatgttcgaccagccacaaattcaggtggtgaataaaaaaacagtttatcggtaaataaattgaataattttgtgaaaaatttcctttattaacaaaaagacttgttaaggagttcaaagaggcgttcaacatgatcgaccaaaaccacgacggatttatcgatgagcacgacctgaaggacatgttcgcttctcttgggaaggaagtctcggaaaagttcattgaaaatatggtcaacgatgcatcgggttctatcaatttcacaatgtttttaacgctttttggggagaaattgactggcactgaccctgaagaggtgaggcaagcaaagtatgggaaagaaagttttaatttttgccgtttttatgtgcacaattttaagggatttaacaaaaatttataataatgggtcaaatccagaggggatggattgaaaattgagccattttgaatacccttaaaaatttaggtgatcaaaaacgcattccaatgttttgatgaggacaacagcggaacaattgcagagggttggacttaaggatttgattttactaaccgaaagcaccatcagatcgcttgagagagcttctcaccacaatgggagaccgatacactgaggaacaggtcatcatttcattatccatttcggggactattgccaaaacttaatttctatatgagtattatctttatttgtgacgacattaaggttgatgaactgtttcgtgatgcgccaatcaaaaatggccgctttgactacgtggaattcacgcgaatgctcaaacacgggacgaaggaaaaggacgaggaagaaaagtcgtgaaatggaaaagagagatggtgatgtgctttattattccaattgcttaaatacaaatgtcttttttgtaattttatggggtcctgaaaaaaacaatggcggtgctggtggaatgggtacattttttgctgggtcactttgcttttttgcttggcactcagtcggagttgttgtaccagtttgtttgatagataattcgtcattttgttcgatgtttctcaggagggatgtgagtccgaatcgttcgagaagtggagcgcttgaaccacaattttggatgggtcggtcggactgtttgtatccgcaacgtcggtagaagtcgattttatccgttgtcgaacaacaaatctgtcgtttggatatcggagttggggtttttactgtcattctgctgtcaaaccttgtcgaaaccgtgcttcctgaagtgaatgaaacatttaatttggcacggtgggttttacgcgtcccatttttttttgaaattggtgatgcgtaaatccgaacaaatctttccattatctgatttaacctggcttccgtctccaccatctccatcattttgcgtccaattccttgtcctcttattcccttgcggatcaccaccgattcaatccaacactctctggcgcttcccatgcccaacggactgagtcggagatgtcccaccaattcaccggaaccattctcaataaaaacataagccattggtggcgaagtacacaacaatctcttgagcccaactattcgcgctttttgacttcgaggccattcctacaattgtgaccgaaaaaaagccaaaatgagaattccatcacaaagggaattaacctcattaaggagatcgatgcactgatcgatgagttcaggcttatgagctaacgggaccaatgaaaagtccatcgcttgccagtttaagtcaaaatagtcaatatttatcttgaattgatttgaaaatgtatttcggtttaaacaatttggcaaaaacgagaacgatgaactgcaccttgaataaatggggaaaatgaatggactggcactaagttgatgaggtgggcacattccctaagagaaaacaagacaaaaacgaagggccaaaattcgcacgagaaaatagaaaattgatcaggtagataaatctgcaagttcattgggtggggtgaagaggaacattgaaaagaggagattcgaatggatgcgaagggaggagcatagcacaaaatgacatgtgttgaggatgatcaagttgattaggcatgagtgatcgatcggtgatccacttgctaaaaccgtccacccccatttgcagatgcattggatgtgcctccgttatttccctgctgttgttgctgctgagaaagatgctggttgtactgctccaacaaatagtgtgaaggatacattccaagaggattaacctgacagaaagggggaggtaattaaactaattaagctgtgttgaatattgaactcacagggttctcggttatgctggggaaggcaggctggcaaagtgaggtgtagtagaggtccaacatttgaccaggcgtggtccgagtagcagcactaactggcgtggtacccgactgagacattcctccgagcaaagaaacggaggaattagcgacacgctgaggtaacgaatgggattggaggaacgcttgcggaaaggtcgaagccgagccaagcaacggattttggatgggcgaattagaagagatgaaaggtggttggtcacagaacgcactccctgaaggacctga

SEQ ID NO: 9684 - DNA, 1910 bp, Heterodera glycines
gggagcatccaacacggaatgttctcctgtgcccattgtcaattattagaacactttcaaacaaacaaagtcacctttaaggcgaacagtcttgtctcctctttggaagtgatcatctgttgtcaatttgtgcttttatccgtcccaattaccataatccccgcccttcgttattaccgtaatgtgcttcttctggaaatggttggccaaccgttccatcaccgcttcccttcccatccgcgccgtacagtaaactaaactgccaaaatcagtgattaacaaatgtgccgtcccaccgttttctgccggcacaaattcactcatccgacagagcatcagttggcccaatgccccagcgacgccaacagcgccggtggaggaccaaacgacgtttgcgcatcggttggggatgtgccgtgacctgtcaatggaggacaatggaactagcggagaggcaggcattttcacacaaatgcatgctaattaagcattgtgccgttccactgacctttccgacaccacgcgaaggcattggcggaaaagttcgattttggagaaaggtgattgcttaacaaaatgccgacaatcgcaatcgccacttgtatttccaattttatccctctctttacctcaaatccttccaaacgtcggaacatttccgactgaattccgaactgttgcaaccaaactgaatgtccaaatgccaattttacattaaatcatttaaaataaatgactaattatcgcaattaacgctaatcaccaaaccgaccttccattctctgtcccccgtaaagttcgtatgtgttcctaatcagtcggtactttgccgctaatttcctcagtccctcattgctgttgttattggacagcaccggacgtgccgtcaatgcagccggcgaattcgagcagttcgcctgcattggtgtgggtgcatccgacaatatttcctgcttcagctgctgatgcctttgcggtgacaattggaccccattttccgtccgcttcacttcttcccctccggctccgttcgaaaggccaaactcgcggggaattggccccgccccatttgccgcggcataattctgcgcattttgcaatgcctcgtccgaagcggcgtcctccacatttgtctgctcaaactcctcggggctttccagttggaacccatattggagcagttggttcagcatgaacgacatctgactttcccattcgttgcggcacggagcgttttggggaagaacggtgcaaaggtcctcctgaggaggaaaagcggatgaaaagcattggaagggggcgacgaaggaggcgacaaactgaccaattcccagacaaacaccagtgcctgaatgaatgttgccttgtaatttgacccctccttccccctctctcactgtgttgttcggctccgtcggactcactcgtgtccctccgctggcggctgcttgtgcctttttctttttggaccgctctaaagcaaaattttcctcgttgctttgtttcaatctgtgctcacttgatgccgttttgtgttctgatttggcacttttctttgtttggtgtgcccctttgcttcgggctgtgctttcggcaaatgccgtaggttttctttccaccgatggtattgccgacgaatactgctgcatgtaattggccgtgtttccgtttccggcaccgttcccgttgagtttggcgtcgtctcgacgatcacatgccgaagtgtccagctcagaactgggttggctgctgttatttcccgtttatgttcggctttttgatcccccactctaccgtaataaagcctgcccccgtcaggttactgtactgctgctgttgcggctgagttccccccaataagctgctgccattggaaaagaagacagttcggcttttttgatgtcaaatgt

SEQ ID NO: 9685 - DNA, 2902 bp, Heterodera glycines
ggggacctctagagtctgactctttttatatgacattttcccgcttttgtaccataccaaaaaaccccgagaaatcccgacttgtctcggccaactcaaatgagtgcctttatcatgttaatttatggtgattaatattttaattacaatctcttcttttggcataatattgcattttcatattagctcttctcggtttgggcttatttcacggtcttttcttctcaaaaacgcgtgtcaatctgtgcggttccgacactttataaacatttcaccgcaaatttcgcccaaaatttatgaaattttccatgcggcgccaatcgacaccgcaggctgattgataaaaactctcctcatcagaactattatttaaatagttcaaaaaaacaacaaactttttaaaaaaagccaaaaattctacgtcgaaggctgcttgtgcctttttctttttggaccgctctaaagcaaaattttcctcgttgctttgtttcaatctgtgctcacttgatgccgttttgtgttctgatttggcacttttctttgtttggtgtgcccctttgcttcgggctgtgctttcggcaaatgccgtaggttttctttccaccgatggtattgccgacgaatactgctgcatgtaattggccgtgtttccgtttccggcaccgttccgttggtttggcgtcgtctcgccgatcaatgccgaagtgtccagctcagaactggttggctgctgttatttcccgtttatgttcgctttttgatccccaactctaccgtaataaagcctgcccccgtcaggttactgtactgctgctgttgcggctgagttccgccacaataagctgctgccattggcaagtaggacagttcggcttttttgatgtcgaatgttgatgagagtgcggcagcagcgtaatgactcgccgcggggaaagaggcgccgtaatagccattggcaggcgaagagtaagcatctgtcaaggaatgagtggtacacggcattgctcatccggaagcgatcggaccactgatcactcccaccccaccgatgatttcttccgctcccccctccccccacgcattcccaatttttaagccgatttccgtacttcctccgccataagtgcccaaatagccgttcagtgtgtgtcccgccgctctttgcaatccatcgtaatattcgcaattgtttggtgaataccaagcggtccctgcgcccgtcacagaagaaggggccgaaacagccgcagctgcggccatttgtccataataagtttgggaaggagcgcagagagcgccaatttgggaggaggaatctgagaagaaaaggacggacaatcaaagccaaaagggatcagaggaaaggaaaatgccaataaagtggataatgaaagcaaagtttcggttttgcaactgaccggcacagagcacggccgatcggttcatcgccgccgccgccgcgagactccattcggcggcgcccactggccaacagtaataaggggaagtgttttgggggaaggacgaagaagaaacagtggcggaagaggaagcagatgaagcggaggaagaggaggaatggccgagggaagagagcatcgacggatggacaaaggaaacggatggaaatttggctaaatgattgggaagaacggcaggtcaatccgaggagcacgatgacgcacttcccggctcaaatttagtggcggtcatttgatttatgatggcatttcggtttttagtgggggccaacgattgacgctgagggtgagagacgaaaacactgccggagggatgggggacagattaatggggcaaaattgcaaaaaaaataaacaaattgcgcaagggggcggcaggggaataaactcccaaaagtttgggagggaccggaaaattcaaatgggcacacagcgggagggacagagaaaaattgtggatttccccgcggctaaactcaaaaagggcggattaatgggcacaaataaaagggaaacttaattgtttggacaaaattttggggacagaaattaccaacgaaaagggacagaacgaaaaataaataaaactaattttggcggtgatttacggcgaaaattgcaaaaatggaggaaagacgaaatttgggattgaagaagcagcggaaattgacgtaatgacaaaattggcctaaaatggaaaatttgagggagagaaagggaggggacaagcaaaacacaaaaaggcaatgagcagaaagagccgaaacggaaggaggggaggagaggaagcaggtggacagcaggacaaatgggaacagatgggagggaaagggggggaagcatttgggatggatcatccgtccttggggactgactctgaagaaggcattggcgaagaatgtgcgcggatggaagacaaatggaagaaaacggacaaagtagcgaaaaattgactgaagggtaaagcacacttaaccattcacttcctctttgtcttcttcagtttgttttactctttgttttgattgtgccaactcccaaaatgccattcttcgccattaaattccattcatttgtctttcattcatttcatctcaatttcgtctcctcctttctctttgccccgaggcggtcaaaaaatgcgcttttatgaaatacgatccgcccattgctcttcactgcagttcaaatgcttgctgatttctagctgctttatctgtgcttccgattatttggcttatccgtttcgcttttactctatcggtttcactaaaggacaaatccgctgagggaaacggtggagcgaagggagaagaagcggtaaatgctcgagagtcttgaggagatcagtggacgggcggaggggggggggagcccaatgaggaggggcggcaaaaccaattgaaatgccaaaatgaatt

SEQ ID NO: 9686 - DNA, 2201 bp, Heterodera glycines
  unsure (1)..(2201): unsure at all n locations
cgccgctttctttctcaaaagtgtccggaaatgtacattacgtattgccgaggtgngcatgttggtaaaaatgttgctaccgtttaccacccattcttcccagctgtactccgaagaacagttcaagacgtacatgcacgaggcgggcgatgcgatccgcgactgtgcgttgggttgcgccgggtggcggttcaattacgacggtgtgtcaccgaacatggcaatgttgagcatcaacaacaacaacccgagtgatgagctgcagtccgcccgacaagtgagtggcgttaatggacttttccttcattgtcagaattatttttggcatttgtttttgtctttatccaaaatttttgccagccttttactcgcatgtgctcggcccgttcctcatttgcatccacaggttggaatcgctatttccagaaccgttccgcgcacggcactctgtcggccgagggcgccggtgcggcggaggcaattcaaagtttgaacgaacttggcaaagacgacgaggagcgggacgaattgggcaacaacaacggcaacagacagatgatggacggtggaggcggcggtggcttatcccaggaggaggacctcaacgaatttaagtcggtcgtttcgcatttaatttactttcaaaaccattcatttaatgtgctcttttcagtctttactattcaatggccgaggatggtgcccgtttggactacttccaattcgcctacgagggcgtgtccgagtcggacgagccggactcggtgacttgttcaaggcgtaattcccaagaaagcgaagaggaaaaaggttggaatggacgagttatggacacagtttaaataacaaattaatatttctcgggtttattattagaattttggtctctagagaatttgttattgaatttattttgaccctttcttaccttagaaaatgcgaaggcaaatcgcaaaaatggtggctcacaatcagttgccgttccgttacctctgtcttcgtcgccgcccacaatttcggctcgttctcacataatggacgcaatcgtcgccactgagtggagcaaaacggacggagtcagtcacttaggttcaagcgttcttcctcccgtaaaattaatttcgaaattccttttaatgggaaattttttaaaacgaaattccatgcactttacttttgggtctaccgtcaattccgtattcttttcctcaaccttatttttaagccatttcagcaatcattcttgctttgtttagagccgtgatcagttcattgaaatgcttaacgcattgcctttgccgtccaaccgagaacacgttgagaaagccgctgctgctgggcccggtcgttggagcccggtgccgaagagagcgcgcactgttgaggagaacatggcactgatcgaatctcgatggcaatatttggaggtatttaaaactgccgactaaaaaagggggcgggggtcaaccgaggataatgaattatgcgaggaaatctgaattttgaattcacaggaattacgattggaaagagaggaaacagccaaaaaggagggagaaaagggcgaagaagacggggacaatctcttccgattggacttaagcgaagtcgcggcaacagacgaaaatgggaacagcgaagaacaacaacgacagatggcggaagaacggatggacgacgaggagaacggcgtcagcggggacaatgacaaaaacgcaaataatactgacaacaataacaacaatgaggacggatttccgatggaatgcgtcgatggaatgggtaagggtcaggttataggcgtaaaatacaagaatttagaaaatatcgtaattttaaaacttatttgtgcgatacatattcttaaaccgaaggaggtgtatatcactcttttaatttgttattaagtgtctgtcttattccaattgaatattatttaatttttctctctctctctctttcttttcaggtgccggcgttctgctcgattctttgttcgaagcattgagtcgactcactgagcacacttttgccactaatttgcaactgatcggcgcgttcaacgaactgttcgcctactcccaaccgttgctgaccacctatttgttgtacgtcgacgcgctcaagtcgcggcccttgagccgaatcacaaaagtacaatattttggtcatttatttattttatcaattattgtacaatt

SEQ ID NO: 9687 - DNA, 1012 bp, Heterodera glycines
tgccgccattttatcgcaatttgccttttgttttttatttatttgtttttcctttacaatttttttccccttgaattttaagttttatattctcacaaattcgacgagcccctttttctcttcagctctttttggcactgaaatatgcgagcgaaggtatttttggccatttcccctgctgctgttgggttgtaggggcgagcccagcgggactggccgagttgggacgcaatgcgataaaatccatccgtatttggaaataaattccggattaatcccacgcaaaatccctgcaatttcagtggcgtaagaagcgaatgcgtcggctaaagcgcaagcggagacaggcgaagaaatgagcggacggacggagagaaaactcagccgaacgcggaaacggaggcacaaaatgttgttgctgtttttttgttattgttgtcaaccgcccctttactcagataaaatttgttgcaaatttgttttttggttttatcttcgtatttttatggttttttaaaccaattactgattttttccaaccattgaatttccaaattgcagcgatttttcttttccccctcgtccttcttactctttatctctttgctttttactgtctgtctgcctttctctttcccttctgcttttagaaaacgattagttttatcattaagcaaccaaccacaccatacttaactaagaaaaaaaaactcgtctaacatggaaatgaacccaaccagaaacaaaaccaacactttcatttgctcttttctaagtttacgcgtccaatcagtgaccttcctcagtttttaggccatgactttttcttactttgtaaagcttaaacattcttcgtattgaagcacagcgttccaaacgaaattcagctttttcgagtatattcagaaattctgttactttagtccaacatttagttattaaaaaaatttgtccatagaccaagcttttgtttgataccaacaaaataagactgaccaaattaagaaaatgg

SEQ ID NO: 9688 - DNA, 777 bp, Heterodera glycines
  unsure (1)..(777): unsure at all n locations
tttccatatagcgccgaaaaattcatagtctaagaaactaattgtaagtgtgtcattgatttgacgcgtgcctttgtattttccatatattataatgcctaattttgatttcttaagcgcttttttaaatccgcggaagctctttttcaacaaaaattttctgaaatattcaactccttttgttctcacgactccgacgaggccttttttcagcagttttctggcagtgaaaaatgcgtgcgaaggtattgaatttttgataaatgtatgggttttttttcgtatacttgaatgattaattgcataaataggaatttcaaaattttaattgttcgaatccgatttcggggtctgatatagggctaaataatgtcaccttcgggttctcctggtcatcccggaaaataatttaaaatatttttagtatctatttcagcaacccctaaatcaacccctgttttcatcatattcaaatatcaattgattccaaaaatccatgctcattgtcagatcatctgaccaaagcatcttttaggccagattcaacgtaattaaactgagtctttccgtaaaccataaaaaatacacagagtttatttatttattagtccatttttgacgcctttgtaccgcccctttactcagataaaatttgttgcaaatttgttttttggttttatcttcgtctttttatggtttttttctccgtttcctggttttttccttcccttgcgtttcctctttgcggcgntttttcttttccccctcgtccttctt

SEQ ID NO: 9689 - DNA, 5558 bp, Heterodera glycines
atatatggacatgatttaattaaattcaattaaataatataaattaattataacatcatttaatgagtaattaagtaataaatcagtaaaacataatcaagaattaactcttaaaagtgataaacaaattaaaataattacatttaaaaaaaataaaaaggcaaaaattaatattttaaagcaaagcatttaaaaataaattttaattcgtaaatatagctaaaaatcttagaataaattatcatgagacaagaattaaatagaaatgaaatttccaatattctcctcattatcagataaatgaacaatacttaaaatttgattatttttaaagattaaaaaattaaaaacacaaaaactttaatttacatttaataatattcaatgaccaatttattagttacattgatttaaacaaattaatattttttgttaaatgtaaatgttataaaattattttaattaatttttttttatatattaaaaacgaataatataaaattaaacatattaaaagggaggaaattagtaaaaacaaagcgaattaattaaaatattatattatttcactagaaaaatttaaattaagatgtaattttcaaataaaatttaaaaaagaaaatcattcgaaaggaaaataatatagccaaaaataaattatgttttttttcaaaaattttacttaatttagtgtatcgatgaagacccacaaaatttgtttaaaaggtaataatcacaaatttttgaatatttgacacaaatggggggggggcagcaggaggctcgaaaaagaaatcagactgttctaaaagtgtatttataatacaaaaaataataaaatttttaaaccccattgtaatatttcaaaaaaataacaaacaatttttgaaaatatctattcagataaaaaatattataaattaaaaaaactaaactaaatattttcgttatgtgaattatttgtaaaaatttgtcatttgataatatctttaattctaaatcattagtataggtgataagtagatgccggattttaggcatgacttttttaaatatgctcttaaaatggacacgaaaaaagtgaaaaaggcataaaaaaaagacagcaaaaaagaattattatttttttactattgtaaggtagatccggggttttcctgtttgcctgccgaagccctaggaatttcactcacatttcattttctttgcatttcatttgccgtttattgtaccacccctttccccgaccaatcattgatcggtcatatttcgctttcacatgtatttaatgttcaccatttacgctattatcaattcagttgctcagtcccgagaataaagccactttcccattaagtgtgaccatcagagtgggatgggatccctaggcttgatcaccccatggggcccttccttcgggagttatatgagtttctccccattattccccatttggcctcccaaattgcccaagtcccaacgccagcacgtccaccgcgcacggccgcgctactctataaaagatttacaaaagaaaccgaatacaatttttgaaaattaaaatatttaaaaaggagagatgatataaatggaaactgagcacttttagttatgaagctataataaacctaaaaagcctaaaaaaattaatttaaaaaaatcttcggataagccgatgtactgtcccgcttaatcgccaattaacctagccccgagatagacattttgataacaaatatctgtacacagattgctacatcaactccatcctccaaacgaatagcaaagttgagcgggtcgtcgatacgttcaaaagggccctgaagaaatgcgccaaagatggtaaattttgggcataaaagatgcttctctcctacaggaaaactccgaattcggtactcaacggactttcgccagatcaattgttcttcggtcgaagactccgcacacagttgtctcttgtccacccaaaggaagaacaagccaaaatcatcgacccagccaaaagccgtaaatcacaagctgattatgcgcgaaaaatggctcgtcaatttgatcaacaccactgagcaaaatcggttgagtttttgccaaaggattcagttcttcttttgaacttcaatcgtggaaaaatattttggcttaatggaacgataattgaagattggaaaaatccccgacgtatcgcgtccacgttccgggcactcggacgagccgtctaacggcacgcaaaccaactgcgacgccgttatcctctcgaagaggccggtacggtaaggatcgcaccccaggctcaagaagagcacgaaaataaatcataataagcgaatgtgaatgctaaaagctttcgtattaacaaatattattattattataattgaaaaaaatatattcagatttattcggtgtaattaaataatgaaggctaacaaaaatatattaaaagtcaaactcacagtctttggaatattgacacaaaggcgcaagaggctcgaaaaaggattatttgactaatttatgaggatatttataataaaattttaaatttttgaactattgaatattgtaacatttctataaaagataaatattatgaaaatatacatataaaaatttatcataagtttataaaggaaaagatttgtttgcccgcaacaaagagcatgaactcagaatgaattaaaacgacaagagaaaataaaataatcattttaatccaaattcaactaaaataagtgataataatcaaatgaaattaaatggtaattcaaatttaaatattcacaaaataatacttaactaacatattaatgactagggttcaaagttgtataattttgcatatttttttctgcgcatatgctatgaagaaaggggctcaaaaatagcatttctatgttaaaattttttgatttgctgaaggtttttagtgcatataaaagcttttgggggttttcaagaataaatgcatattttgcatcttttaggccatattttagtgattttttggaattttcacaaaaaaatgagcgaaaaataacccataaggattgacttttttggaatttttaaaatatacacccttaaaaatcgaaaattttttagcttttttgtaagaactttgtgaaaaaaatttatttatataaaaaatataattttgttttagcatataataaaaattttaaaatttggaaattcaaaatttttgcaattgtctataaagtgctctttagcccttgttttagtgtttttaatgtcaattattaatttttacacaattttttgagagttaaaagctatttttagcaattttaaggcatattttagtgcatattttggtatttttcggttattagtgcatattttatgcgcatatttggcatttttagtgcatacaacttcgaaccctattaataaccgtcgcaaacacaaattcttatgacgatacaaaaataaaagcaacaataaacattttgctttagaaaaaataatttcaataaaattatggcggctcgaaaaactgataattaaatttattggtaaatttaattttaaccatgataatgaataattttaatttgaaatgacagaagaatttattaaacggctttgatatttttaaagtcaactttaaaaaatatattagttattgtaaacacatcaagtaatataaaaaaattaataatgattaattgcgagccaaaaaaacaattttgaatttaaatagtaaaaaatattctgtaataataatttataacagcttgccaaatatctcatcctaaaaacaaaatcattcattataagctcattaatgcaaatttggcctagaaattttaatgatatatgataaaaaattagggttagacgggtccgggtatttgggcaaaaaccgggtccgggattgccgggtattgaaaagccgggtaccacgtcgggtaccagttttcagagcgggtccgggcctgggtacccggtaaaaccgggtattaagaaataaaaaataaatcaattttttgaaaaaattttttcattaaaatgaaagtttatgatttttaaaaagcatgaaaaatataatgttttacaaataacgctttattaattgcccaattttttgttgttatttaaacctttttgcggtgattttccaaaaaactttcgtggccaggggcagtgcggtggtgccgatcagggaaggcacggaattccgatttccgacatttttggggtcggaattccgatttccgaaaaaattttggacgtcagaattccgatttccgaaatttttgatgaaaaagcggaaattttttttgaatttttttcaaaaaattaacaattttttacaacttttgttaataaattgcactgaaattttcaaaaatttcccggcggcgcctatcggcaccgccggaccctaaaaatcttatttttcttgagaaatttttgcctcaaatcgctaaatttggtcattttttggacaaaatttgttaagaatttgcattaaaattataaaaattttccccggcggcgcctatcggcaccgccggacctcccccgccatggtttaaaaatttttgaaaaatgcgatgcaaaaaaaggtaaaatttttgatgaaaatcattgaataattttttaaagcaaatatgcttttaaatagatcaaaaaatttttgagtcaccttttacttggttaagaatttaaaatttagcctagtaaaatatttagaaaatttttattatgttttttgaaaaatttccgacttccgatgtttttggggtcggaattccgatttccgacttccgaaaaatttttgggcctcggaattccgatttccgaaaaattttggacccccggaatgcattcctgatttccgaaaatttttgggacctcggaatgccatccctgatgaccatgatataccaaaatttctataattcatcaattctttaaaaataatttttaagaaacaaaataaaaaatctaaatttatgtgtaacaatttttgtatttgcctttttttgccccaaaaatattactcattacataaccttttccatctgatatttaaattttatggtgctctgcacaaatgaataaattgatgtatgaccttttgggtgcctccttttatgcgttggcattcataaaacccattattataaatggccttttggctgtgcatttccattcattttatctcgaaacgttcacaatcattttcataaagtattcaaaaatggcactgtattttctgatgttcccaattattttttctgtggcattaattgccgttccaacaactgaaaataaattaatccccgtcgatttaattaaaggttaataaaaaataatttttttttgtgtgtagtaagatttttcaatgtaagtaagggtcatcacagctaagctctgggatagaagcggtgcctaaggggccgcgggaaatttttttatgaattcatttaacactttttagtagattctgactaaaaattttttgaaaataaatagaaaaatgcaaaaattagggtaattgattaagatatattttaacattttta

SEQ ID NO: 9690 - DNA, 3162 bp, Heterodera glycines
tgctcaggccaccattctcacactcaaaacgtggcaaaaagctgaggttctccaaaattggacaaacccgacatcgaaacacggaactgcaatgaagtgccgttcaacatcgaagggaaatttgtttgcgacgtttgccagagagaattagttagtggttataatattgagtttagtagtttattttttattttttttttctttcagaatattctattctttttttttatattttttttttgtcttttttttagtttttttttaattccattttttttattgattatttttattcgtagtttttttccacggttacgtttagattttttaatgatatttttttgattttttcaatcaagcacccaaaaagctggtggcatacgtcagctccgaaatcaactacgatcttttcggactgccttggattgaggctttggacgtcatcccacatgaaatcatgtaccccgacatccgaccaaaagctaaaccagccccagcagaaatcaacgccatggccattcctcagccaacgcacaaaatttcggatttggaatcgctcacaaaggccctccaaactgatttttctgaagtttttggccccggattaggccattgcaccaaagcaaaggcccatttgatactcaaatccgatgctcacccaacattctgcaaagcacgccccgtcccacacggcgccctcaatgccgtcaacgaagagttggaccggcttttgcagattggagccatcaaaccgattgagttcagccattgggcagcaccgattttggccgtaatgaaaaagaatggaaagacccgagtttgcatcgacttttccaccggcctcaacaattcgctcgagttgaatagacaccctttgcctcggcctgaagacatttacactgccatcagcggctccgtctatttctccaatctcgacctccgagacgcgtatttgcagatggaattggatgaggaatccaaacacctttgtggaataaacacccaccgtggcctcttccaatgccagcgcctcccatttggcgtcaaatctgcgccgtctattttccaacatttgatggaccaaatcgtctcaggcattccaggtgcgtttgcctacctcgacgacggcataatcgcctccaaaacgcttgaagagcacattttttccctttacaaacttcaaacgaatccaggaatttggccttaaaatccaattagaaaaatgcaaattcctccagcccgaattgctatttctcggccatgtcatctctgcgaaaggaattcgccccgaccccggacgatcagaagcaattcgccaaatgccgccaccacatgacttgagcacacttcgctcattcctaggcgcattgaattattatggaaggtttattaagtccatgcgcgaaatccgcgaaccactggaccaacttctccgaaaagacgtgaaatgggaatggaccgacgaacagcaaaacgccttccaaaaggccaaagaaatcatgctgtcggatctactgctcacccatttcgacccgtctcttccaatcgtcgtagctgctgacgcatcaaaagacggaattggcgccacaatcagtcatatttttacggacaaatcggaaaaagtcattgaacacgcgtcatgcacactcaacgacgcacagaagaactatagccaaatcaaaaaggaagcattggccctcgtttttgcggtccagaaattccaccgaatgttatttggtaggaaattcacgcttctcacggaccacaagccattgctggctatatttggctccaaaaagggaataccgatttatgcagcaagtcgtcttcaacgatgggcactgatcatgtccaattacgaattcaacataaagtacatcaacacgtcatcctttggacaagccgatgtactgtcccgcataatcgccaattatccccggcccgaagaagacattttgatagcaaatatctgcacagagacagattgctacatcaaaacaatcctccaaactgcaactgatcaattgccgatcacgaaagcagaaatttcagaatggacaccaaaagacgatgttctccgaaaaatttctgatcacaccaaaaacggctggccacaaaagtgcaccgaccccgatctgtcaccgtactttcctaagcgaaaggaaattttggagatcgacggatgcttgctctacggaaagcgagtgatcgttccgaccaaacttcgtgaacgcatcatcaaggctctacacatggcacaccccggaattgtgcgcatgaaagccctcgcccgtcagcacgtgtactggccaggattggacttggaaatcgagcgtatggtcaggcaatgcgaagattgccagagcgcccaaaagagtccacccaaagcaccgctcgctccatggacgtcttgctcacgaccattccaacgcattcacattgatttcgccggtccctgttcagatggccactcctatttgattttgatcgactcattttcaaaatggccggaagtatacagaatggaccgaatttcgacaccagcaacgctccaagtcctccgatcaattgtctaccgactcggatttccagaagaaatcgtgtcagacaatggcactcaattccatgccgcagaatttgaggaattttgcagcgagtttggcatcaagcataccttcaccccgccgtatcacccgcaatccaatggccaagcggagagattcgttgatacgttcaaaagggccatgaagaaatgcgccaaagatggaaaattttgggcagaaaagatgcttctcgcctacaggacaaccccgaattcggcactcaacggactttcgcccgatcaattgttcttcggtcgaaggcttcgaactcagctgtctctcctccatccgaaggaagaacaagccgaagtcatcgacccagccaaaatccgcaaatcacaagctgattatgcgcgaaaaatggcccgtcaatttgatcaacaccacggatcaaaatcggttgagtttttgacaaaagatcccgttttgcttttgaatttcaaccgtggaaagagattttggcttaatggaacgatcatcaaaagattggaaaagtccccgacgtatcgcgtccacgttacggcactcggaagagccgtccatcggcacacaaaccaat

SEQ ID NO: 9691 - DNA, 2804 bp, Heterodera glycines
  unsure (1)..(2804): unsure at all n locations
aatcgccgagccgatcccaaggcctttctctgatatcttagatgtctgacaaccacctaacgatcattttcaatcttatcaaatcgctaatcatttctttgttcccctaaatttctccctctccgggctcttcatttacgcaacgaacagcaagcacctcctgttgtgaatcgatgcgaaagttgcaatggttggagtcgcgcatgtgctttcgcagtgcgtcaagcgaacggaaacgggcgcattggcaacggacgcaggttaggccgaccccgactttgaagccttgaaatgtaattcgaaaaagaaattggaaaagcaaagtgccacacccaaataagtgagcaacccgggcacatccgtgcagaatggcgagtccgggaccagaaaaccgtgctgcttcctcatgtgcgccaaatttgcctcccaagtgtcggatttgagttcacagaaaaggcattcgtttggcgggatgccgtcctgccaacgaaaatggataataaacattttccatcgaatttgcaattcgtcataaaattttgaaattcgcgagaattaaaagttctaaccttcaaaaaatgattgagttcatatttaattattcattcgatttcatcccatgggcatgcaattacccacttcttttttggcaaaactgttgtcttctttctgctccgcttcttcatcgtcatcattatcactttcgattggcaaaaccgcttcttcttcaccatcaatgttttgtgccacaatctttggcaattttgcttccatgccgccattttctcgcccctccgtttggcactcattagcctcaattgtcgctgtcgtcttctgctgctgttgcagttgttcttcctctttgtgccgacgcgactgcaaatggttgtcaaaggcgttgcgcgaccgaaagcgtttgttgcggcacacagtgcaaaccaaagaagacggagaagaagacgacaaattggaggaggacaatgggggaagagaagaagcaacagcagaggcaccgaggggaagagatgaagcagcagcagaaacagagagggaggacagacgacgatggtcagcatcgaaagcattcttctgtattaaaagagagaagtgagaacgaggagagagaaggcagttagagcaaagagagaaaatagagggagagagagagaaggggagaaaaagaggaaaaaagaaagagggagatatagtgagaaaggagagagagagagatagagacggatagagaaacgagaccgacagagggacgaagagagaagactgagagagaatagagatagatagagaaagagagggggagagcgagatagaggggaagaagatgtgaggnaagagagagaagaagagaagtcggagcaaaaacaaaaaagaaggagaaagtgcaacggaagaaaaatgtaaggagaatangaagaagaaggggaaagagatggaggaagaaaaaagggggagaaagaaggaaaaaggaaagagggagaataatgaagaaggaaagaaaaagagatagataaaaaagaaaggtggagaaaaaaaatagaaggggaaaaaatgaaaaatgaaaagaaaaaaagaaaatggagaaaggaaaaaagaaaaaagtataaaaaaaaaaaaaggggggaaaagcgaaaaataaaagggggaaaaaaaaatgggagggaaaaaaaaaaaaaagaaaaaaagaggggggggggggggggggggggggggggggggggggcgcgccgaacaaaaaaaaaaaaaaaaaaaatttttttttttttttgatggggtggggggggtggggggggtgcgccacacaaaccaaatggggggggggggagaacaaaataatcccccccccgcgaaaataaaaaataagcggcgggtgtttgtgggagggagatttttttttcccggggggggggtgtttttttttcccccaaaaaaaatttgggggggcccccgttggtgtggggggggggcgtcccccccacaaaaaaaaaaaaaaaaaatagtttttttttttaaaagggtggcgccggtgggggggggggctccccaacccctttttgggggggggggggaaaaaattcccccccccgagatattttaaatttcccggttttttgggggagattttttttcccgaaggggtttgggtttccccccaaaaatttgggggggccattgggtttgggggggggtttcccccaaaaaacaaaaaaaattggttttttttcaagggtcccctttgggggggttcccaaacctttttggggggggcaaaaattcccaccccggaatttaaagtcccaggtttttggggaaagtatttcccgaaaggtttcggtttcccccataaatttgggggcattggttccagggggactcccccggaaaccccaaaaaaaaattttttggataaaaattatttaaatgaactgactagataatatttaaaatagggtatttctcttcctttcagtatccctgcaaagtttggtgcgcttctgatcagtttctgaaaaaaaagttaagcctaaactttttggcctgtttaaaaaggaattaaaaatttttaaaaattttattcatctccctttttgatagaaaaagcatcagagtgcctaaactaacatgtaaataaaatttggtgcgtttcagaaccctttctgaaaaaatatttaagaattaattttgcaaaaaataaataaaaacaaaggactcagattttcgaaaaattttttgagccagctagcaaaaggggctccatttcagtgntaagttagtcctttaccggggag

SEQ ID NO: 9692 - DNA, 2435 bp, Heterodera glycines
tttggaaaatgttggtttttatttttttttttatatcctaaaaacccccaacagacacagcgggctcggaccccagggttttttgttttgtgatcgggatttaatccttcggaattggtgttccgacggaaaaaagagataaaattttctttgaactttttctagggtaaaaatgctctgatcaagaatccgagctcggattttgcaaaatcattgattttgtctaagatatttcatcaaatacttgattttctttgaaaacttgttgtctaaaattttgttggcggtaagtcccatattcaaaatgatttagaatgcataaatagctttagaatgagccattttaagtgtacggaaagccaaaattttagaaaacaaaaattttcaaaaaaatcaaatatgtacttgaaaatcaatgatttttcaaaatctaagctcggattcgttatcagtgctgttttttaccttaaaaaaactgattttgtagtaaatattttttttcggtcgggacaccaattccgaaggattaccgggattttgaaagtaccgggcaattttttgcacgctctcaatcagtattgggtggatcaccaatccaaaaattggcccacctgccgcttcatgttgtacaggtgccattcactgcggtaatggtcccgctgcaattgcccgctggagaacaccaatttgcacgccaaacaggtccagcccgtggtgtggtccaagcgcggtgccgtcggcgtttctgtcgtcgtcatggtagcggtcgattgcctaattttttgttgatttgccagtaaatttgccaaaaaaaagagtcaataaacagcgattaaaatttgcaaaaaaaaatattaaaaaatgtacaaaaattgattcgtatgtatcggtacactccaaaaccaaaatagttgaaaaaacagtagaaaaaagcgtagacacacacagaatttattgtgaaacacgaggaaataacagagtgattcattttttgaattccaacgcgttcatctgctggtgaagttgttaatccatccatccatggctctcctcatcgacttgccgaatgccttcgcttccgcactttgatcgaagtggtccccccaatcccaacataatcattttccacttttatcgaattcatcccattcaaaacatcatcatgttccatctttatgttgttgctgttgatgagaatgttgttgttgttgagccgctgatgatgctgctgttgttgtgggaccaactgttgaggggtgacactggaaaaaagaaatgatttaaattggaaatttcaatttaaataattaatacacgattatttttaagttcgaaatgtcggattctttcaagaaagcaccaccgaccaacgaacaaacaattattgtaactcaaaattgttagtttacggcccaaaatttggaaaaagtgccgcccccccccccctccaccaactcactctttgtgcagtggcatctttttgccatggaaaatggtcatcgacggagaaatttcgaagcacttttcaaacgccaggtgtttctcaatgtgattgttgaccctttaggaaaaagataaagaattataaaaagcaagccattgcaaatcgagctgaaaatgaaaaaaaaattttttttttaatttccaaacaaatctttggaaaatccaaatttttcccagcgatagcgaaatttttacttataaataagccgcacaattccataaagtattaaaacagaaattttcagggacgaaaatttggggggggggggggatcgatccctttgcaaacattttggtcgactccccatgtcccaagaaaaatcgaatgtttgacatattaaaaaaaataaaaattgaaatttgtacctgcccgcgtcgttgcccaactcctccagaaactccaactttcgcattgagaattggaagcgttcctccgcgctcagatccttcgagtcgatggccatgtcaaatgcactgacaatttcactgtcccgcgaatgggacgaactgtaggccaagtcgaccagtgccaagtacagctgcacattgtcctggcaagtcaatgaatgcaaaaaatacattaaaaaaacattggtccgatcgccaattgttcggcacccgggggatttaaaccaaaaaatcggccaatttttggaaggttttcgagtaaaatttaatgagcgctgagcagccgacgccaattttgtaaatgctcgtacaatttttagtgttaggaaaaatttcagggcattcaacttttgtgatttctcaaaaatttaccgaacttaaaaattggacggaatcacaaattttctcaaacaaaaaagccaaaaaaaagatctatgtttattttaaaatacatacaaaaaatttaaatttcttgtggaattcaaaaaggcaaccttttgcaaaaaaaaattgcatttttttaa

SEQ ID NO: 9693 - DNA, 1815 bp, Heterodera glycines
  unsure (1)..(1815): unsure at all n locations
aagtacagctgcacattgtctgcnnaaggcaatgaatgcaaaaaatacatttaaaaaaacattggtccgatcgccaattggtcggcacccggggnaaattaaccaaaaaaattccgccaattttggggctttttcagtgaactttaataagcgctggaaagccgacgacaacttttgtaaatgctcgtaaaatttttagtgttaagaaaaatttcagggcattcaacttttgtgatttctcaaaaatgtaccgaacttaaaaattggacggaatcgcaaattttctcaaacaaaaaagccaaaaaaaattgatgtttatgttaaaatacatataaaaaatttaaatttcttatagaattcaataaggcaacattttgcaaaaaaattgcatttttttaaatcgaagaactccactctaatattgttctgtatagtgttcacccaactcactttgtccttggaaattgcctccttcaacacctttttggccaacttccgatcatggcgaaatcgggtgtggaaacgggccaatttcagcgcccaaaatgaagcaattttgcgcgatgtgccggccgcctcttggattagccgctcgtacttggccaccagtgcggaatagtcgggactccttttttggggaagaaaaattataaaatttgaaaatgtcataaaaaatggcaaaaaccaattcaaaggaaatgcccggaaagtaagtcggtggtcaagaaaaaatggaaaattttcaagcgttttttccacaacatttgttttatgctgaactagttttttttaaacccaaaaatcgatgaaatttttttccattttttgggccctggttcaattttcccagactgcgaatgcaaattattatatatttttttgggtttatgtttggtaagtgaattaatttttaagtatttacaggaaactgaaatttttccaattttgagttttgtagccctccccacaattctcgcaattaaaaaagacaaaataaaaaaaacagttattgagtaattactccatttttgcaattttgcgtcgttcaatggccaacagtcggatgtgcaccgccagaaagtcagggtggcgtcggtcgaactccgccagaatggtggtggccaaatcgatgtcacctgtcaatggacgacggattaaaaggtggagaggtggctagggaccgatttttatactaaggtccaaatttttctccgatggcgaccctttgttttgcgattcaaatttttttttgcggctcttttcaaaaaaaaatttgggaacgggggggggggggtccggtggcgcctggattttcaatgaatatcgccaagaaaatttgttatactttgaaaattttcccctaggttacgaccaacccccgccccacccttacgacgaaggacaggagggatgtccgatgcatcgtttaaattttaaacaaaaaaacaaaaaaaaaagtttttttattttagatgtttgtttgctgatgccatttctttgtccgaccaccttgcttctcctcaaaagcgctgtacgccaagtgaatgcccggcttgcgtggacaatggatggttgtggcccgcttgtaaatggcccgggcagcaacagcgtcatcaatggacagcaaatagttggcgtactgtgagaaaaaaaaagtaaaatttgaaaaaataaaaggaaaacggatacaaattattcaaaatcatttagtcgaaaagatgtgtggaaaaagttttaagacaaatgaaactaaaacttttaaattgagaaaacctgtgaaaaaaacaaaaaaaaattttgccattttaatcttcg

SEQ ID NO: 9694 - DNA, 3868 bp, Heterodera glycines
aagatccatctccagcgacgggctcggcagggtgagcagcgggcggcgtaattcgttgagctgctgcatagaaaaaccccgaaatatttaaaaatatgtaaataaaagtcccaacttttgttcgcaaacacaaaaaagaaagtgtttttcctactaattaggctatggagaatccaggaaaaaatatgtatttacataaaattagcagccctaatgataatgttaaaactcgaaaattgagttaaaccaacagagttcgtattttggttttattataattttttggcactcctcgttttctcccttgattttcggttggatttgaattttctccatttttctactttttaactggttcaaaaactcttagaacgcatcgaatcggcttaatttcatcaagaattttcagattgataaaatttatcatagttcgaccgttttaaaatctcccgttgagtcagaagtgccatttaaattccaaccttttgttcgaattcggtttaggaagcggaattggtcaaaaggacgttagtagagatagacattttgaaaaaagcctggacctggattccatattggacctggatttcctggacaaaaatccaggtccaggaaaaatccaggctcctcgagacctggatccaggcctggacctggattttttgaaactcattttaaaaatcaaaaaaatatttgaaaaaattaattatttgcttagaaacatctaaaaatatctaattaataataataatgtgtttttaaatttatttaatctttttttgaaaacttgaaaaacatttgtcacttgaaataataaattctaaaattttgtccaggaaaatccaggttttttcgtgttttgcctaaacctggacctggacctggatttttttcacattagacctggacctggatttcctggacaaaaatccaggaaaatccatgtccaggaaaaatccaggttgccgaaaaatggcctggacctggatccaggaaaaatccaggcctggatccaggtccaggtcgatcgctagacgttagattaaaagccacgggaacatgtttttacgatatattacgacaaaaaaaattgcaacaaaaaaaatatatattttcaaattagcgaaaatatcgccacactttcaatgtctttcagattttaaatgatcttagatgagctaaatgtttgtattccttcacctattacctaaatgtcgcacgggaaaattcgaatttgcctgaaaagaaccttaaattcaacaacttttttaacaacgacagaacaaagccaaaacaaaatagcaaaaggagacagtgaagtgtttggagaaggaatggacaatgaacagcagaagaaaacgcatagagaaagaagcaaaagccagtaaagtgccgaatgtttggttatgtgccctttgcatcattcagcaacgattggtccgcccaattctctcctccgtttgcttcgcccacccaaccgaaaagtcgtccctcgtcctccaattctcccccctcggcagcagaagaagatgaaaatccgctgccagccgcgttcagaattggcaatgagtcggagagcagtgacgagagcggcgcggaaaggtcggaacacgaggaggaagtgatcagacgaagcaaacagatcaggttgaagacggaccaactcggaacaattaggaaacgcgaattttgaccaggaatcgagaacgatgggaactgctcaagtacaaaatgttgatctcttcgtgctgcactccgtcaaaaaaccccagtaaaaatgacaacgaattgcctgctaattgtaagcacgaaacggcggaggaggaggagcagtgggacgaggaaagggagcgcgagttcgtgttcagtttgttgtaacggaagagagcaatcaaaaatgaccaacggatcactggacagaccactaatttatacaaaaaataataagcatatacatatatatatagaataagaaataaattgtaaaacgaataaatatttggtactcattttcttgctaaaatagtcgacatgcatggactgacaaagcaatgaggagagcccataagggcatcataatcataaaataagtcgtttcgatggatttctgctgattgccccgctcgaattcatcttgcaatttatggcataaaatcatctgttattaaaataattttttgattttaatttgccttgcaaagtaccctcgtcctggtacatactgattaaaaactcacttcaaataatgcaaccattgtgacccggaaaaaatgtaacgcatttctgaatggcaggcgcgtgctttatccatctgttgctttttgtcaaaaaatgcaaaccctgcgatcgcccgcttcggtgatccgtcctcaatgacagtgcgcacaaaaataatcacaagaaagtaaaaattgagggcagaagcgacgaaaaggggggcgaacagatgcaaaattgtgagggaaaagagaaagtgccgactgagcaccttcgaaggcatttaaggaaagtgatgggaaaagcatccgaaaaactcacgaaaagaagggaagtgaggaacagagcggccgaatgcaaatccatctcgaaaagagtgaggccggtccaacgggcgaactcattcagagtcagcatttcagaggacagcaaacggaacacaaaacgaaaacacttttagttttcaagtataaaatgacacctatctatgtatcttttgtatagccctaatctcaaaagttaaaatccgcatcaatcataatcttaagagttttaatatctcaaaacattagaaattgcaaaaccaagttaacattatagtatatttttagtttgaaaattgaaacaattaacagactctctataaatatgattttttgggattttagaataaattttataattggtggtcggcagtaataatcggacagagatgacgctgtgtgacagacaaaaaggtttttctgcccttccttccttttccattatgcatttacaaatttttcaaggtaatggtggcgacggtttccaattgttagccgattcattgctcacttacaacgaaaacaatgaaaaattgaaaaagaagaagccgaggacgacacagaaaacgaacgacgaatttgaaaataaaaaagcgcaaaaagaggcggagaatggacggaacggtggtgggcacgacgaacagcaggaagaggaggaagaagaagaggaggtgggaaaacgcaccgaaggggggcatttacaggggaggatggccaagtgtccgtggagttttggaaacaaattttgtagattgctagtgaatcttgggttcttaagaaaagtgctccagcaagaccaaatcagcagggggaaagcgccccaaaataacggaatattattttttattaaatgggcaaattttaaaaattaaatttaacagtcctcaaaattgcttattttttccagccgaacaaattgacatttttgttcttcagattcaacgtcttcgaagagtccaccgcattttcacttggggtcacaacattccccgtccaatcagtgacttcgcttccctcccattgcccgacaaatttcgtgcaaatttgcgtgatttcatccagccgacgcccgttcaaatgcagggaattccgatcggacttctccacagggaccatctgatcacagcacccaccggtctctgctcaaactttgcatttcaaatgctcaatttctattttataatggcttttaattcgatggttttgataatttaaggttctggaaaaacgctctctttcgccattcccctcattgtccgtgttttgagcgcccgaaaagaacgttcccctgccaatgggacacaaaagtgtgccgacattcactcact

SEQ ID NO: 9695 - DNA, 1748 bp, Heterodera glycines
gaggagagcccataagggcatcataatcataaaataagtcgtttcgatggatttctgctgattgccccgctcgaattcatcttgcaatttatgtcataaaatcatctgttgttaaaataattttttgattttaatttgccttgcaaagtaccctcgtcctggtacatactgattaaaaactcacttcaaataatgcaaccattgtgacccggaaaaaatgtaacgcatttctgaatggcaggcgcgtgctttatccatctgttgctttttgtcaaaaaatgcaaaccctgcgatcgcccgcttcggtgatccgtcctcaatgacagtgcgcacaaaaataatcacaagaaagtaaaaattgagggcagaagcgacgaaaaggggggcgaacagatgcaaaattgtgagggaaaagagaaagtgccgactgagcaccttcgaaggcatttaaggaaagtgatgggaaaagcatccgaaaaactcacgaaaagaagggaagtgaggaacagagcggccgaatgcaaatccatctcgaaaagagtgaggccggtccaacgggcgaactcattcagagtcagcatttcagaggacagcaaacggaacacaaaacgaaaacacttttagttttcaagtataaaatgacacctgtctatgtatcttttgtatagccctaatctcaaaagttaaaatccgcatcaatcataatcttaaggttttaatatctcaaaacattagaaattgcaaaaccaagttaacattatatttttagtttgaaaattgaaacaattaacagactctctataaatatgattttttgggattttagaataaattttataattggtggtcggcagtaataatcggacagagatgaagctgtgtgacagacaaaaaggtttttctgcccttccttccttttccattatgcatttacaaacttttcaaggtaattgtggcgacggtttccaattgttagccgattcattgctcacttacaacgaaaacaatgaaaaattgaaaaagaagaagccgaggacgacacagaaaacgaacgacgaatttgaaaataaaaaagcgcaaaaagaggcggagaatggacggaacggtggtgggcacgacgaacagcaggaagaggaggaagaagaagaggaggtgggaaaacgcaccgaaggggggggggacatttacaggggaggatggccaagtgtccgtggagttttggaaacgaattttgtagattgctagtgaatcttgggttcttaagaaaagtgctccagcaagaccaaatcagcagagggaaagcgccccaaaataacggaatattattttttattaaatgggcaaattttaaaaattaaatttaacagtcctcaaaattgcttattttttccagccgaacaaattgacatttttgttcttcagattcaacgtcttcgaagagtccaccgcattttcacttggggtcacaacattccccgtccaatcagtgacttcgcttccctcccattgcccgacaaatttcgtgcaaatttgcgtgatttcattcagccgacgcccgttcaaatgcagggaattccgatcggacttctccacagggaccatctgatcacagcacccaccggtctctgctcaaaatttgcatttcaaatgctcaatttctattttataatggcttttattcgatgggtttgatatttaaggttctggaaaaccgctctctttcgcctttccctcattgtccctgtttt

SEQ ID NO: 9696 - DNA, 2306 bp, Heterodera glycines
gattgagccgaccaaaatattggccaaacaggtgggccaattaaagagctaacaacccttttttcatccttattgttattctttttgggtgaaataagaattttaaataaattaattgaattaattgcgtgaatttgtttaaaactctcttttggttttcattttttacccccttttcttacggcgaatgcgccgggggggcgacaaatcccttgagatatgtaatatattcagatgaaaattctttattcagacctacgaaaactttgtgagattctgtgatggattggacataaattgcgaatatttgcgagagaatggaattggagataaatgtaatcgaacactaagaattaattcattatcacttatttgtcttcatcaggtgacattttggtgaccactccaaatcgtttcattttcgcattggaaaaactttcggacgatggccaaaagagggcgaaattagtggagaatttgcaatggctgcttttggacgaatgcgatcggatgttcgaccggacggaaggggaggcgagtttccgagtgcaggtgaagcggcgaattgcaacggacggaccattcgaatcgaatggcatttgatcgaataaaaacggatatttcagctttcgaaaattctccgcctttgcaatggaaaggaaactcgtcgcggcttttacagcgccaccttttcttatgaggtggaggaatggtgcaaagaacatttggaagaagtggtgatggcatgcattgggccgaggtataaaaggggcgagggagagggaaacggacagtcggcgaagggatttggacccatccatttcaagggaagcggaaatcccaccaccgactctaactaaatccgtatcccttttggacatgaaaaataagtattcaaaaaaactttttgggtttttttcttccttttcaatttttttactttcgatctgatggttctaactttgaaaatgttcgactttttcttagttattgcaatgctcttccccccccccccccccataaattcttggaatatttacaggaacagtgccaatgaattggtgaagcaggaactgcttttcgtcggctgggagcaggccaaagtgagcgctgtcagagacatcgtccggcgcgggttcgaccctccggcacttctgtttttgcaggtcattataacggataaaaagcattgttaaaactgagccctgcacaaaatgggctttgtttttattttatttttccttcttgaactctttgctgtgccattctctcaaattgttaatcctatccaccacaaaacccaaaaataaatttatttcagttttttaacccataaataaattttagggtaatataagctgctttttccaaatatggcatcagaattagttcaaaatccatgtttttattaaattaggatttcttgtcaagtcctcgaaatcaagtctaaaaacattgaaattttagaaaatgcaataataaatattctgcaaccttttctctatattctgaacttttaaaaaaaaaaattaaaattggtcaaaattgaaaaataattaataatttttcaccaataaaaaacataaaacgaacaataattatacgaaaaactattagaaattctttgcttgacaaaaacagttgtagttttttatacaaaaagaattgcccatggcaggaatcgaacctgcgtcactacggccacaacgtagggtactaaccactatactacatgggccgacagcaaacggatttataaaaagctaagaataaaaaaatattgtcaaaaatgagcccataaagaaagtaaccattttaaattgctgacgtttgaataggaaacgttacataatttggaaaaatgttagcaatgaaatttttatggataaatgaagtaattttctataaaaaattgtatttggtttcatttaagcacaaagtgtccaaatttcctccctcaactaagttttttttaagagcaaagaccgtgcgaagcaattgttcgtggaattgtccgagtcgtgcaattcgattcccattgggctcatctccggcgaattgaccgaagaggaagtgctcaattctttagatcccttttgacccctcgtgcatttatttgtctttcccttcagtgtgaagtgaccatcggacggtttcggtccgggaaaatttggcttttaatttgcactgaaatgatgggacgtggcatcgacttccaagaggtgaacatggtcatcaacttcgacttggtaattaattacccttcctaattgacactttgaccctttttgtgtttctcttctcag

SEQ ID NO: 9697 - DNA, 1896 bp, Heterodera glycines
atgatcgacgaggggcagaaaaaagccgcagaaaaagtcatttttaatgatgatgtatagaaagttttaaatatttttcacatatttaggtttccaaaaaattgacaacccagaaatcgctttggaaagtgaatgatgggtgacgcttattcaaaagattttggggtttttggacctcgacctcgagtcctgcagtttcgggcctatgaaatattcaacagtcccgacagtttaaaaaaaaaaacttatttttagttatgccatcgcattgtttgtacatggcatttttattcagaagagtaactgagtaaattttatgacaaaatgaatgacatttagcgcaaattgtcactctttaattaaactaaaaagagaagctgaaaatttttttgcgtgtgtatttaattggcacttttggagatatcgcgcacgattcatgacaccttttttgccgccattaacacgacaaatggtgtaaatggtgtgtggtgtgtttggtgtggtgtgtatgtgtaaaataatgccacaaaacaaacagtaggaaaaaaatttggggaaaatttgtgggccaattgatgaggcctcctaaaattgaaagagcggttgggggacattcattttgtcgtttggcggggggggggggaggtttaaggagctcatccaaattggctgcctaattcaccttaaagagaggaggacaaattgaatttttttttttttggggggggatgccgattaatatatgcctattcctccctcccgctgctatacccctcagcaggggcaggggatgagccaacaacaacacactgttagtcgatttggcattgagtggaaatagggagggatgccgatgccaagggctaagctaagaatgggatgagtgccgataaatgatgatgatgaggatgatgatgagaattgtagaagattagtgcgagagtgtatgagaggaatggcgcaggttgccaaagaaaaaaatgccaaaatccgtcagtgggtgtcgaacccccgagaacattcaaggggacccgttaaaaacttagtcaagactaagttgctgaacctaattatcaagcaattaatggtggtaattattgattaaagcaaatttttttgtcaattgtcaaaagtttagacaaaacaattgtaatgttgaagtatacaaattattgagggcttgggtcaagctagctaacctattggcactttttgcccctggcgaaaaagttttacccccccccccccccctcttctttgtgtgtagaagaaaacggcgaaaaatgccccgcaggggagaggagaggcacacgcgattattaaacaacaaattatgtggaagattgagcaaaattgggtgggctgagggggcgagtgggtggtgggtgctgtgaagcacacatttgacttcccgttgagaaaaataatattgtgtggagaaattttgatgttaaaataagataaagcggcttcaaagttttgatgcatttttcaatttcgatgaggaaattttctgtcaattttttgaaatggaaaatatttgacaaatttttttgtgatattaattcgtaaaattttttcccgggggttttggggttcctgatcacgaatctgacatctattttgactaatctccaaatccctaacccgaatttaaaaaagtcgaaaattcaaatttttctatttataatttttttccaagttaagattatgaaatcggagatagttaaaataggtgttaaatacataatcaggactttaactagctccgaaattttgatattaaaatcatacattttttagggggggggtcgacccccgccccccccccccccctcgctcgcaaagggggcgccagcgagggggggggggttcgcagcgaaggggggggggggg

SEQ ID NO: 9698 - DNA, 2409 bp, Heterodera glycines
acccttacggattttcccattttttctgacccttgtttccttggccgatccttgacccgctttttggccctcttcaagtgccaacggcgcactatcaccgaaaaagcgaggttcgcgccgttgtgccaatgcttttggttgtccatcgcttgcggggtcgtcgttgctattgctgcttcggctgcggaacatgttggcaagaagttcgagcagttcaagccggagtccgttgtccaaaaatgatgcttcttcttcagacatcaacgatgaatttggaccagtttgctgttgtttttgaccaatataattggcagattggaccggataagcaaagtgaattgcagcaaaaaacagcacaaattgaagaaggcccaagaaagaatatgctgttgttatatgatatgtgcaaacggtacaaaatgccataaaccgcatggcattttgtgtggtggtgaaaaacggattccttcctttctgctgctgcaattggtggatgtgaatattgagccaaacctttttcttctgaaactgagtaattttttaacagaaaatctcatttttagaaatttcgggaatcagatttcaacctctccgaccccacgtaattgggccgatgaaatgaatatagccaattttatcgtatttagtaaaatacagccccctggggctttgtttttcaaccttccccctcaggaggagtgctttatttcaggagaagctctaatttaggggtcgggctttattttacaacccgcctcaaaagagggctttatttcagggggagaggggggggggggctgtattttaggaagtacggtataaatatttaaaaaatcttgaaaaacaaatctcgttattatatgacacaaaattttattggcaacaaaagggcgccggggcacggaaatgattttttgcgtgcgaatgttcaacaacaatgacacactctgcaaatggcacattacttcctccataagtccttccaactgtcgccccacagataattggttgcctccggggggaattgtggcggtcgccaaaggcaaaaaaaaatttttttttttccaccctttttcctatcagtcattgtgccgtgccgtcgtcgtccccaacggggactgccgtaattattatggtctcattttttggtgcttgtataaaatgggacaaaaaatggattaatccaaaagaaaaagtaatttttgcggaaaagtagctttatttaaatatttatataaatcaattgaaaatattttgtgtatataattcagaatgtagttaatgtgctttatccgattagtttcaaaaaattttttacttaaactaatatcaacaacaaagttttcttagcaatggtactcttctgttttggggcccggataggggcgcatattgcaaaaaatacactccaaaattatttcggaggcataaatgccataatttgagctataacaataagattttcttcaaatgcccgttccttactttttatcaaacgaattttttttttgttacaaataacgagccctattatattttttcaatattcaaatccgggccccaaaacagaaaaatatcaatttttaaaattaatttttgctaattgaattataaaataatatattttttgcggttaattttatgacatttctcggccaaaaatatctcttcatatctgcgcctttaaaaagctcgtaagagtgggggaactcagctcggtttgatctctgccataggggcggctgtttttgctcatttatccgcaattttcattgtgatgaatgggtatgatgtgctgtgctgctgctttttatgtgtgtatttttgacagctttttccccaaggaataattaaaaatttcggagtggcatttatagagagagaactttagatttttttgtaactgaaaataagattttttgcaatttaaaaaataaaaaatttattcgtttgcctttctcaaattgagtctattttatggaaatggtattgttgtgcgcaaaagtgttcgatatagtattatgaaattccacggctattaagacttaggaataaatttgccggtgaaatagatggaaaagtagggcaaaaaatggctaaaattcaaatatttatagacctagagattataaatgttagcaaaaaaagggtcgtcgatttgccacctccgaaatttaaatgtgtggttggttatatgggactcgggaattgagcctttgtctcgaatttagatgttacgaatgcgctgtccatttaattggatttgaaattttgtaaggcacagaataatgccaatgttcaaatgccatcaaatgttttcgcctaagcagcagcagcaggggcagcattcgtcgaagaagcagacagtttaaaagtcaagtgtcctccacccacccaccaccagcagca

SEQ ID NO: 9699 - DNA, 2102 bp, Heterodera glycines
cttgccgacatgtcgaaaggaattgttcttgacacggcaatgcgttcgctgctcacagtaattccattaatggtgtggctgatgtcgacagcgggcaaaatattttccataagggattttttgtcacgaaggttaatgctcatttttcaagaaaatagcaaaatgaatctatccaaaaattgccaccttttatatacctctttaatttatacatccgtaatttatttatttatttatcatttaataagatggtccctcttatttgtttcggtcgtaagtgacctacattcacattacatatgccattctcgaatgagtgaccagcagagaacgatggctctgttcgatcgaatcatcatttgcctattttatgtatgtttgtttttttctttatttttagcaaaatatgagccgccctattttacctatttttaaaaaatcgagtagagcctataatcggcactacagcatcggaacggttgtttaattaaataattttttatattcattataatttatatatttttattcactatttagatgattttttatgaaaattccaagccgcagttctacagcaatttatggcagcgatcattgatcgcggctgcattcattttcattttttggcttatttggtaatttaaattgtaatttttactattttttaaatgtttgattaattttaatttttagggaatgaccaaactctggaaatgttgagatacgccaacattgaaagagaaggaccgaggaatattgataaatttcaataataaattttgaacccttcgatttaactgtttatttaaataaccttcaccaaattatttaaataaatggacaaacttataatgataccctgattatttcttttaaaaatttttcctttgtgcttcttttctcttttcatattttcttctcctcttctcttctcttgttctcttcacttctcttcagttctcaattctcaacggcctcgtctgcctgtagaaataaaaaaattttaatttacaaattgatatttttaaaatttgccacctcctcaattggggacaatctaccaccgacaaattccgttgaagcctgtgaaaatttgtgattttatttatttgtttgttagtcatcccctccccacccctcccccaccgttccaattgggcgttctcgcccggcactcccggccggcaatcgatgaacaaacgaacgctgaattgccaaaaattatccaaaaggaaggaaatgaaaaaaatggggtgggggggagcgttcccactcacctcacgacggacaagaaagcgaagcgtacgcgggtggccctcatcattgttggaaacaggcggacgacgcggacgaaggcgctcgatgcagcgcaagcgcgctggcacattgagcaaaattgcccaaaaaatacagacctcaaaattatagaaattataatatacaattttccatcaaaaaattaaatgaaaattacttgggccatgaaaatgaaaaggaagaacacaaaattcatggagttgacacatccggcccctttgacgcacagtccgttgatcagctcggtgatgttcatgttgtcggggttgtcgcagggtttgctcatcaggtgcgcagaaaaatcacccacgtgtgacacgtggatgcactcaactggctttgtgtagtccaccggccggatgccaaccgcatccggccggggacacacgcagccctcgagcaccatccaggtcaaattggtggggtgggtggcgacaggttgaatgatgctcatgacagaaaaaggtgatcagttggactaaagcaattggaaaaattataaaatgcatagaaaaagagcacagaacaaatatgaaaaatgatggcaaatgcccgtggctatagccgaataagcccaacccaccccttcccatactcacattccgatcacttccattgtccacaataaccgtcgtacattttctttgtccctaaaagttttcagtccccctcccccttgtcccgacccttctccccaagcaaatcgctagatcaaaatcttttgtatgctcatctcctccactttttgccattccgttggaaagatatggctattaatattc

SEQ ID NO: 9700 - DNA, 1634 bp, Heterodera glycines
  unsure (1)..(1634): unsure at all n locations
atgaaagcagttacatatcgtgtgatggaatacattcaaaaagtagacaattacgatgtcttaggcatcgcaaacattgtcatcacggatatagtgtatgaagaggcatttgctatctttcgcaaatttggggtcaatgcgtcagcaattaaggtaacattttataataattacatcattattggattttatttttaggtgctcattgagaatgttaaaaaccttgctagagattaggaatttgcggaaaaagtctacgaatgttcagagtggtaggttttggttaaagatcagattaatgaaaatgtggtcaaggaagcggtggattctattgaagagtacgaggataacagtgcgtatatagaagtggcaaagaaatgtaatgaaattgttcattgggaggatttggtgagatcatcctaccggggacacacgcagccctcgagcaccatccaggtcaaattggtggggtgggtggcgacaggttgaatgatgctcatgacagaaaaaggtgatcagttggactaaagcaattggaaaaattagaaaatgcatagaaaaagagcacagaacaaatatgaaaaatgatggcaaatgcccgtggctatagccgaataagcccaacccaccccttcccatactcacattccgatcacttccattgtccacaataaccgtcgtacattttctttgtccctaaaagttttcagtccccctcccccttgtcccgacccttctccacaaagcaaatcgctagatcaaaatctttggatgctcctttcgtccacattttgcgattccgttggaaacgatatgcatattaatattcgggggtggagagatagtacacaacttggagaggaagtgcgaagaagggaagagagaaaggcagagacaacgagaacactctgtccctttcttctcttcccttggccacccatcggctcgagtgcaaagggaaaaggatgagaagaaaagcaatgaagaataaaaaatttattttaaataaaaataaaaatttacagtataccaaaaaatgcgcgaaaaacaaacagccaatacccttgggttttttgcgcgaaaaagtgtgaaaaccagggaccgtcgcctccctccccttccccgaaaatgcgcgaaaaaacagccaatacccttgggtttttgcggtaaaaaagggcaacaaaccggggaccgtttaaggtgtgaaatttcacaccttaaacggcaacgggtaccggccactaactacttacggctcccaataattcgagtccgcagcaattgcttttcgcattgcattttccatactctgcacgacttgtgataaatccaagcggtctgacatatccacgaggctaaagaaattaaacattcatgaaatagagagaaatccaaggtgggaggggttaaaggcatattccgtagataaattttcaggaaaaatattaattaaagggaaaaaattcataaaaattcactaagtaaatcacaaaagtaaacgaatttcaaaggattttcttgagaaaccgaggggaaggcggagggacagggacagtcacagaattctggcttgngaagaggtaaagccgatttgcgcatggacaaaaaaagaaggaaacgatttttcaattccc

SEQ ID NO: 9701 - DNA, 2503 bp, Heterodera glycines
attctcacccactaataatttgatgctgattgtgattacactttgttgagattctaattttttttccattgaaattttgacattcaccacacattattgaccatttaaatgtgtaatggcaattttgaagagtgatttgaataatttcgacatgttttaatgatcatttgcagaaattattgtagattaatttatttaagccattacacatgccttgcaatgccattaaaaaaagcaatttgtgccaaaaatttaaaaatctgatttaattatttttgaaataataagttggttgatatttttggcacgaaatgcagccataaaatttccttccgaacgaactcgtcattataatttttacttttattcattaaagagaattttaatgatcttttattgatgaactacagtttttttatttctcgtaaaaaggagagcaaattaggggatcgtgcatattttaagacttttcgtccatattttgtctatataaatccggtccataataatactaattagttaattaccaaaataacatttttgtcattgtcattagtcgtaaaaatacaaataaaatttatacacaatttaagaattggaatggtaaagcaaggatcattttttgaccagtttagcaaagaaagttgcaaagaaggctggcaccaactgaaaattaaaaatttaaaataaacgaattaataattttcaaaccagatagaaactgcaagaaattgacagccacgccgcaacatgaactaccgagagcaaatctgaacatcaattataaacaattatttcggcatttttgaaattaactatttggctatggaatttgttccaaatcaggcatgtttcacattttatgtgaaaaacgaagttgtaaatagtgtgctctatcccagcggatcaatgataatttcgtacaattttttaaatatatttttaaaaaagtatttttcgtataaaattaaaaacggctttttaagaaaaagttgaaattaaatttttgaaatattttaacaaaaattaaagcttttataaagaaaatattgtacgatttgccgattgtaaaagtcctatttcgtacgaattgtcatgatatgacatcaactcagcattgaccaaaatgaagagttcaaattgttcaaaaatatttttatatatgatcacttccaaaatcaacacctgttctgaacggcatgtaacaagtgtttgtatagaaagccgccgcctctgatccggtgaaatttgtcatgaaaattgttgacgatgatgatgatgaatcggctggtaattgttgttgattttgcgcaacatgttcaccaccaccaacaacagatgcttccgcttctgccgaggttggcgctgcttcggctgctaattgctccattgatggccgaatgccattgctcatctccttgtccatggtaatgctgcgctccacacactcagccaaccgttccggcacacaactttaaagcacataaaattttttgggtcaaatgaaatcttctcaaaagtctgggaagaagcaataaacaaatggccgaaaaatcaatcttttgagttttttggccagaacttttttattcagagctaattttttgaattttattgattaatcgggactatcaagcgctttaaaatataccaagcttatttaatttaaatgacaaataaaaatgttatagcgtgccgaaatggctggcgccaaagtgggtggttcccaaaaaaggcccctccaataaattcaattcataaatttcttccgcaccctccctccctgtttcgttagcatttcataaattttggttagacctccaaccaaaaaaaaaaaaatatccgagggccaagcattgggctggtggtgtgtatgtaccatgactgggggaatgcgggctttggctcccggtggtgcatgtgccatttggaggtgcgccaaatggtgaagtcttcagtgccgttgacgccacagcatcggaactcgcgctgcaaactgtcccaggccaatgtaattgcggtcatgtcggacaagccgtacaactccttcaacgatgtgttcatcttcaagtgcagaggtgtttggactaacttaattgtaaagcaaccatttatttttaatttttgcattggaatcgatgtgtactgatatctgatcagtcgatatccaatttaaattaattcgaatccgatttcttttccaattttgttgctttgatttcaaagtataaatcattaaaataaaacatattacataaaatagaattacgaaaattttttctcactttttggcgaaaaacaagtcccatgattccaccaatgagcaacgaaaaacaaagaatcacagatgcggtagaaaactgaaataatttaatgtttaatagatatatttctataatacagcccccccccccccgccgtcccattgaaagaaagccctccttttcaggcgggcggttgaaaaataaagcccccaggcatacatggacaagggggggggggg

SEQ ID NO: 9702 - DNA, 3039 bp, Heterodera glycines
gtttttgcggcgtttttcaaaaaattttgggaaccagggggggaaagtgggtccggaggtgccgataggcgccgccgggaaaatttttgaatcgcagtgcatttgttacctgcttttgtccaaaaaatgaccgaattttgccattttcatgaattttattaacagattttcaccaaaaaattatatttcataaaaaaaaatttacgaatgagaaaaacgaaattcaatttcgtaaaatttcaacgactaggaaaagacaaaatagaattttgtgaacaaaatcgtaaaaattttgcgttttttggcacaattttttttttcaatttactaaaattttcccatctttaccagtgctttttcgattttggccaaaaatgcctcggaccccagtacgatttacgaaattgaccccccacccttgtccagctatgccccagggggtctatttcagtaaatacagatgaatctattttttcaccgaataaatcaggcatcggagctcttttagcacagaatatacagcaatcacactgttagccacgaccaatgatgagatcaccttattggaaaaaaaattaataattaaaaggaaagttaaacaaaataatttggccaaaaatgaatgagcccaccaaccatcatgatcaggcaaacatccacgtacaaacttggtgccaacagctcatagtattgggaccggttgtgataaagccaagcgccataggaaaatgtgatcagggagaaaacctgacatgaggacacatattttgagtaccaattaaaaccgttttattcgtggcacaactgatcaatttgccctgctgatcagcagtgtcatgacaactcgtacaattctcggttagacctaagctataggcctaagctttaggctaggcctaggcttaggggaaaatacgagttgtcttttgtacgagtcgccattgacccctgctgatcagcaccagaatgaatagatcacacccaccacacatagacgcataacccaccacggacaacacgtttgtgatgagaaacgtgtatttgacagtctgcccgtataatccataggcggaccatcgccacattgttgaactgcttgtggttgtgttgcgccccccacctccatggccatcgttgcccatttttgttgttggttttttgtctccgttttttgtcgctttttcacaatttgtataaaaaaatttggcctttcattgattttgaagacgtaatttatttaatatctttaaattctcaaataaataaatgaaaaatgaatggtgcaaatttcttttaacccttctcattcttcataactacgttaattaaacaggggacaatttccggttttgtgcaaaaaatatgacaatttaataaagtaacacccatcataattatcccaatttccgttgttttttttttaccaaatttgtaaaattttgttaataatgagaaatgaagagaagtgggtaaaaagaagttgagcgcagaattaattaaataaaaagtattaattttttattcaaagtaatgtattcttaattgtttttttctcaatatttactaaaaccatattcgcgtataaaatgtttctttataatttcattattcaaaatgttgactttgaaatggacaaggccagagaatgaaagccggcgcttaaataaaattggaagccggaatcgggcaccaaaaatttcgaaaattagaaacctcaaaaattgttccaacattcgttcagtcccgtttactcattataaaatatgtaaattttttcaaattttctgcttacaaatgagctccaacaatgtctaggagttcggatttcagtgtatgggtattgggaatgctggagaatttttaataaaaatttcggggagcaactcccctcactcccctgtcggggggaaatttcaaaaaaatcaaaaaaaatatataaattttctaaaaataaaaagtcttagaaaaacacatttagacattctcctgctataggaagtgcaaccgatgacatttgaaattcatcgggttgggggagcagccccttattttaaagactagatggggtgtcggacggttgcaaaactgttagggacgaaattttctggatgtaaggcgtaaggcatgggggagggaaattaaagagttgcgcggcgagagtttagcacaaattgtgcgcttgcgcagcgatggaatggtcgatttttgtgggccaactcatagtcaatcatcacatcagcagtcatcaacagcagcagaggggttgttgtgtgcgtttttttttgtgactcaacgtcctcgtcgacgtttctcctcccccatttttgtgtcggtttacgaccccaaaaatttttggggcggaaaaataacgacgacacttctcgccgccgctgctgctgatgatatatttaattgtggtagtagtgaaattgttttaaaaaatgagtcaattcaataataattggctatatgaaaggcaaatgatcaaaataaaaaacttattgagatgttaaaaaggtaattttgtgaaaaaaaattccttggttgctgaaatttggttaaaaagttttgacatttttatgaacgtaaggtaagggacacaaattaatcaccaatatatttcttgccggtgtgtaatttttccaatgttgagtttaatgttctgctggaaattgatttggggaaggatgaaagcgatacttcagttgatatatagatatttataaaatgttattttttaacaaatttgtaaaaaaataagtgtgagtttttcttcttttttttttacgaacctcgcgccgtaaaaaaatttttgaattcatcgggagacggaataaggcccctggagatcaggggttaaagccgcgattttgatggaaatccggaatttttaaattgtttgaaaaatgttaatttttggtgatatcggggaaggggtaggaatcacttttcttcccctcccccatgattactaatgctttctttcacagcatttttgtaggaaattagcgccaacttcgagctattgacggccgaaga

SEQ ID NO: 9703 - DNA, 5352 bp, Heterodera glycines
  unsure (1)..(5352): unsure at all n locations
atgggcaataaagtggcaaataaaagtttcaattcaaaaactttttgtattatattgggttcaaaatcncaaaaagaaacatataaatgtgatggaaatacaataaatgctgtggatacaactagggatntaggagtaatcattgataacaaattacaatattccggtcatattaaccaaataacaaggaatgcgtatttacgtatgcgttccttgtttcgaataattaaatccaaatcgtctaagatttggattacgttatataaaacttatattaggcctttattggaatacgctccggaggtttggaatccgtctcttcaaaaaaatattaaaaaaatcgaaaagtgtcaaaaatatttcaccaaaagggtattttttaaatgcagccttccgccaattccataccaaaatcgattagaatacctgcaactgccaacacttgagaataggcgaaagctatttgatctgttcatggcgcataaaattgtttatggccgaacagatctgaaactattttcaatttttaatccatcgacacgctttaacatccccttttacagatttaacacaaaatataaaataggcaaaaaattcattccctttgctgggagggtaacaaaattatggaatcaactcgataaagaactaatcaaaacaaattctttaaatcaatttaaaaccaaacttagaagttcactagggtaatgaaaccggaaaagctagaattataacaaattcctaagtgatttggtatttttttatttttcgacctcatttgactttgacctcaatttcaatttatttatttattttcacatatttgtcttttttaattcctgtgatcatcactttattttatcacttactctacgacacattatctgaacagtcgtcagagtaagtggttttcgcccttctgatgacttttttatttttacgaataaataaataaatatggctaaaaattgattacggactctcaatttaccgctttagaaattcattatatattgataaaatgtgcaaaatagcaaataggtgtatctctaatttataaggaattatacagttcgcctaacaagaaaaagcattgaaacgaaaggacaattcattgtccagcagttgttttttcttttcaattcacttcatatgtttgtttgtttctcatataaaacgcaatcgaacgaagcctaatggaatcaacaatagcaaagcaatttttcaccaaattccttaaagtttcaaaaaaaagaattataattttattatatgcatttaaaaactttttccataacattctttagcgataaatattaaatatacagtgtgacaaataagtcttgcaccacctatgcttttgatgtaacttttaaaaattcaactaaaaatgaccaaaatatattcaaaatatgcacaacagattagggaatattgctacataatagtttatcccatctttcgagagtcataacatagagacaaaaatgtgccaaaaaaattttcaggtggcacgcaactcccgaatcaatattttggcataatcctagttaatttcttctatttgtctacagtgaatccatcttcattttatgcacaaaaatttccaaactaactaatttttttatcaatttcgcccgcacaattgccatcaagaaaataaataaatatattttggagacgaatttttgagaaattttcctttcttaggggtatatttttgaaaaattttggtcaattttaggaatttatttttttgaaatttttgggaccgattcttagggggtgtattttttgtttttattgcatttttgctataaatttctggaaaaaggccaaaataggtgctaaagttcgaaaaatgccaaaataggtgctaccccccgttttaggtgtttttaggtgctaaaaagttgctctaaatcaacaattgttcggagaaaagtgtttttcgtgcttctctcatcaagtactagccgtaaaaaataggtaaaaacttaaaaatccggtctctagtaatcaccatcgttttcatgcttatttttaaagaactaatgtttttttagatgaaaatgttgtcaaaagtttgttttccaaaatgtttgttgctgttgttattcagctgtataattggcaataaattttcattatgcgaccaaattttatcgcctcaaacaactgaagaaaaagattattcggaatgcggaatttcggtctttgatccgttcaacgaacgaagcgaagagaacacggaaataagccatgtaattatgttattaattacattcataattaggggacttttaactgaagcaaaagcgaaagctgtttttttgaccagaaaccgaaaatcgaaccgaggggctttaaagcgaggaggggaccaagttgcgtctaacaatgagacatcattaaggaataattacttttttcatcattttattaaactcaacaaatttaataaatccccggataaaaaacgaccgtaaccaattcccctaattaataatattaatttgttaggtattcaaagggcaaactgttgatgatgatcgcgcattgccgtggatggccacattgttaaggcgcccatgttctttcttttttcaaatttttttaaaattaattaattacactttttggcttaattttaaaaaatatttggaattaaatttaatctaattttgtgaaaacaattaattaggtacatgtaaattattataagtaaattttattaaaaaggcataaaaataaaaaattttatttattaagttgaaattgtccaaaatgcaactgtttatgaaccattttgcactgcaacaatcgttggaccaagacacattttgacagcattgcattgcgttgccgacataaatctcttcgcaggtacggtgaataaatatactgtacatgaatattgtaagaattttttttttactttataatttgacaaaagtataaaatttacaatttttaatgaaaaagattcccctgctattggaaatattttttgaaacaaagttttatttttttaaacaataaaaattgcgcaaaaattttatggctgccggaaccgctcagttgggcgcgcacggttgggcgccaacatgtttttccactatagctttttatttgttatccaaatccaacaatcttggtatcattcgaaagctcttaacatgctcacaactttaataagatataaattattttgtttaaataaaaattaaaaggcgcaaaaaaatatatatttttattttatgttcaatgtactgtacatcaatattgtcatattttggcacgaaatacggtatttctctaggttgctcgaaagcatgaaaatttaagaaaatttgattgaattttcagaaatttttgcaaattttttgaacctttttcatcactttttgaaaaccggaattaaattgatatttttttttgtgctaatagtgcaatccgagagttaagtatgagacacaagattatttaatttagttatgcttaagaaaggttatgacgaattttctcaaaaaatctgaaaattggcactttttgcgaatgacccacaggcactaatctgcttgctgttggtccgtggtcacttatattaaccaaaaaataaataaactaaaaaaagaaaaaataaaaagaaaaaagtgaagattgttttttaaatattatgccataattttttgttttttcagataattataaaattttattcggtgccgttcaaagctcaaaacaaacgcacaaattgcgcattaaacgcgtccattatcatgaaaatgcaacatatttggttcttaatgacaagttgaatcctgctagtggtgtttatggtgaaattgtgcacccggattttgctttaattgaagtaataaaaaaattcaattatttattttttaattaaatgttttttaagagcgtggagccaatacaattttcatctcgtgttagaccaatttgcttgtttggcataggtaagtatttataatttttttgaatttaaatttacctttaaatgcaattatataatcttaaaaaaattttcaaaaatttaaagcagtgaaaaatcattttttattgttataaaggaattttagaatttatagtaaaaattgttttattcattacgcggttttttttattaaggctagcctctaaaatttcaaaaaatttaaagcagtgaaaaatatttttttttttttgtacataattataattcaatattaatttgtattcatgctaaccccccatatttcaatattaaggttcctcaaatttgaaatattcattttctgaaaaaatttctgcccaacacttcaataattcacggccatttgttgttgccggatggtgctacacagagccaatttgctctaaaggaactcacaggacaagtgaccagctgatgtacggtacaatgcgcatggtttctaaagacgcatgcccacttgcttacggtaatgtaaaaacggatatgctatagctaaactaaatcggtatactatagccaaacaaaagcgggtatattatttgtaattccccgaaggtcggagaccaatcctaaaattaaaaaaacaatcgaaaatttaacaatttttaagggcgacagtggcagtcctttgctaagcaaaattggtgacaagaattgggtccaagttggtgttttatatggtggtggaggatgttctgaaaagcatcccttttccacaagtcggcgtcactgtaagaaaatcaaaaataaatatttaaatatcaattttatttattatttttaaataattttatttttcaattagcattatacacaccgatcgattgcgattggatttcgcgcgtgacaaatgatgaagtgaaatgtaaaggatggtgaattgaaaacggaaaaaatgaatttaaataacatttacattgtgacaacattttgatgcaatttacaaacacttacagtatttatgtacagaaataaaaattaaaaaatttatttttttaatcgaaaaaatttgttgcattaaaaagtttcaaccgataaacaattttttgcttaaaaagaaaacgggaaaagttcgacctcgaaacggaagcaaaaacaaaaaaaaatggataaggatgagtggtcacatatgaattagtaccgtatattgttctcattactctatgttacaaaaatgggctaaaaataaatatttattaaaaatgcaattgttttaaaataaaaatatatttaggtatgtatattgtagtaacacaaacgaagttgaacaaaaaaaattaggggtagtctgggaattgaacccaggacctctcgcaccctaagcgagaatcataccactagaccaactaccc

SEQ ID NO: 9704 - DNA, 2249 bp, Heterodera glycines
  unsure (1)..(2249): unsure at all n locations
tttaatgaaatcacatagaaccatcattccaaaagcaattttgtagcaaattttatgctcgtttcaatgagcctactcaaaatttccataaaatttttccaaccacctaggagcttttttcgaaaaatttctcaaatttttagggtattttgtcatgtcttattcaaaatgaaggagtgatcagatcaagatgggtttttttgatcttttcacgaacaaaatttttgttccctttttttaattaaatttaatgtttaaataatgccacaaagcaactgccaattaaatactaataataaaattacaccttttcatttttctataattaaataatatttttgtctgttttatgaattataaacaagagtaatcaaataaattcagtaatttaatggacattttttaaaataaaattatttcatctaatatcaaatgaataccgagaatttgaatgatttggggctaataggctaaggaacgcgacgcgcggcatcaattaagtgccatttaatgatggactgatttatccagaaaaatatcttctggatgacatcattcaatattgtgtagtgcctaatggatgcccattttgtagtggaattacttgattagcatttgaaaaacgtttgaacacaaatggaaacgccgtctggaatgcctggcgatattccgtactaaaaaaaataaaaatttaattaatttaagtaattattataataccttgtgaagcacaaaatgggtgcattcgatgccgcaccaatgtttagtgaaattccgctgatcacaaggccaaaccaagcagtgatcggagaagcaattgatggtttgattaaaattaaataaattaaattagtacagtaaccaccaacattaacgacgattatacaaaaaagtgaacgaaaagtacgataattaatctgatcagcggaaggcaaacctaatcattaaattataaaattaattttatttttttaataaattatcacctgccgatttaattcttataatgagcccgacaaataaataaatgaatatggtaattatgatgagaaagagccatagtatactgtatagagaagaaccctaaaatattctttttcgttgatttgtgagcaagaatttatttaccatgaaaaaatcggcataagtgccagtgatcatttgatcaccattcagttctatactttggtaaattgttatacaaaaactgaaatttaaagcactacaaataattgttatcgtagccaaatacagtcggattttgcatttgctatgcctaaaaacggtggaaataaatcaataatattttagaatgtattcctttacatttcaccaaatacaattccaagcattctgtcaattccaataaaaagcattattggataaatgccaactaaataaaattattaaaatttaattattaatctgagtaaattacctaatccaaacattggaatcattaaaatcttttcgcaaaacgatactcaatgaaattttgtcccgaaaatgctgtataaacaaacaaaaaatggcgaatctgatggaggatttcaaaaaaggaacaaagtgccaagaggtaattaacagtgccacggaatgacctaattaaggtaattaaggttcacttataactcattaatactgcttactccaagaatttatctacactaattacgcactttgttaaaaaggttacaacaattacagaaaaattgaaaatgatgccaattaccgcaatgattccataaatcagtgcacaaccaattagtgaccagctgggatggacatctttgaagaccaaataaaactgcaaaaaaattttaaaaaagtaatttttaaatatttcaattaatgactaccgtattgtacgttgtgttgtcattcattttgtttaattttatttaattaattttttgagataaaacaacgaatggcaaaatgctgaattatttgcttaaataaaaccgaaagctcacctgacaatttatttaattaaatgtttctgaatttacataatatttgntgattttttgtgtctggcctntctgttcatggcacctgccaattaattaatgaaattacacgttttacatcttttccaacaattgaataataaatgnnaataacgctttttgtccgtaccgaactgagcaaaaagattcatatanaatgatttttttattataatgagaaatgagaatttatttttttatttttttgaaaaagagctaaggatgagaagagtgaca

SEQ ID NO: 9705 - DNA, 4778 bp, Heterodera glycines
tttttctattcccttttcagctctgatacagcaaaatgggtcactttctgcagctgaatttgaagaggcacttccgcttggctcatttataaaagatttttacggaatggcgttgcgaattgtggcactcgtaacttaccaagggcattgaacaaatgcacggaacgaaaatgtgcaaaacaatggtgggtgctgtaatgatagtatacttacgacaatcgaattagttgatgggtgggtactgtaatccaaatggtggcttgatttcctgtaataagttagcttttctccgtccatgctaatgtcagccttttcgatatgcaggtggccgccctgaaaatttctcttaataaagttttttattttctttagcctgtgccgaaagcgtcaaacattgaccatttgggcacaaactgtacacaaattgtgtttgccgaccgtatgccacagttttggctgaatgtgtccgtttctccctattttattgcgtgcgaacaatttaaggcgccatttgatccctcgactatgttcaatcagtctcggaccagcagtgatttgtttaatgcatgtcaaaaggtgccaacaacaccgaactgcgagaagttggcacattatctgtgataaaattattttaaaaaaaccataaccaatgtacaaattcgaggactgtcattagtctttaattctatgattttaaattttcagaaattccgtccttatttttcccattatcttgaatatttaaaaaaactgttctttttggtgcaaaaaactttcaaagtgctcaaaaaatttaaaggcattgaaaaaaatggaattttgtgcttttaatcatatattataatttcctatttttgccactccaattgttttttaaatatttttgccaagaacatctccaaaacgcgcgccaaaggcgtacggatttcgcatccgtttgtgtacacatcgcgaagcggaaaagcaacggatcattttggaatccaagctggacttttcattcactgatcaaaagtacttaactaacaaatagaatcaatcacaaaaactgattggaaaattcgccgctacaatggaatcattaggctaatattaattattattttttaatatatcgatttttttctattttttgcaaatattttaatttttaaaagtgatcaaaccaaatcaattaaggacagggctaatgaaattagactaattaaattaaatgacaaattaggcatttgccgcttggcattatataattaaataaatataaaattgaattgaattacattttaagctacgaatccaacaaaagcttcgcatacacagtgaatgccatggaagaggcaatgaaaataacggaactttttttaatcaaatttggcaaggataagcagccaagtgctgcgcttcgtgatgacaaagaaatttcggcccaattggtgatttattaagtttttcttttttttggcatttctagatgcaaatgcccagacgcgccgattttctgtctatgttttttgccatttttaatgtttattttagggatttcgcaaaatttcataagaaaaaaaacaaaatgcctccccctaagaagttaattgaccaaaaatttcagaaaaatccttcaaaagatttttattttttgtatatttttgatttcaaattatttagctttttaatctgttttactatctacctttaatttagctttttttacgcctatttgagggtttttgaacctttttttatcgtttatttatttatgcctataataacagacttttaattatctttttaaataatttagtaaaaaacaaaactaattaataattaattcaattaaagggcaaaacaattggcataattaattgtctttttgaattaattaattcattaatcaatttaagagcaaaacaattggcataattaattatcgttttgaattaattaattaattaattcaatttaagagcaaaacaattggcatgattcttccaaatcccatcgcccatcttttcgcgaaggatcactcgcaaaacgaattttctgccctataaaaacgatcccaataaggtgaattgatcaaaaacaaacaaacaaacaaataatttgtaaaataaaaataataccattccaaaaaatccgggcccaatgtccatttgcctggctctaagcaaagaaaagccttggtttttctgggcctggactttggtccaaaaaatcttttccatgttttacataaaataccaggttcagttgttattttagagaccggattttaaatggccaggactcggtaaatgaaccggaaagttgcggaaccatacatatacaaggggtgtctcaacttcgcccccgcgggggtgaaaatacatccctaagaatggcatttcttgtgataaaatgcaataaatttatacaattttgaatttttttaaacatcttgaccattttttataaaataaagtaattttgctttcttttttaatttatttatggtttagttgttagtgctgcagcactaacaaaatttttgttatgagttcgataccggttgacgttttcttttgaatttatttttttatgattaatgtacaaaaacacccataaaattgaccattcttggcataattcattaacaaattaaactcaatttttaaaaaaaatgtcggtttttttcggttaaaaaccgaaaccgaaaaccgaaaaaaaccgaaaaaaaaaccgaccgatccgatctctagtttcaattatataatatggaccacagcaaaaaattaaaacaaaacgaaacaaagttaagttagaacatgacggcgcactctatgttttcgaccaattgagcgcagatagacttcagaaattttggcgatgtgagtttcatggcccgtcagacaagtgcaagggtatgttaatatattattttgaattttgaaaatcttttaaaattcaggacgtttgcacacggatttaaataacgttgtgcagaagttggtcgtgagttcattcgtgcgacatgaacgctgagcatgtggaatgtcagcgacttgtaactggactcaagcgacgtgctgctgagatgtgcgaagcacctgcgactatttcgtgctcaagtgctgcaaaaaacatgcacacctgtgctagcagctttccgagcaaagcgccacaaaaaagtgggtttatatccaaaaacaattttgttatttttttggttttttaggtgatcaaacgattgcgccgtgatgaaaatgcaccgcggaccgaacctctcaatttggagcagttggaaattccgaatacctatcgtatttacaagcgaactgaaattgacaagaaacactttctattggcggacaccggcgtttttcaaattcaaggacagaatggaccccaacggtgagacatcatttatacattaaatgctgatcattgaaccggtattaagaattctcatttttggaagagcttctacggcggattgggcccatcagatgaaagacatttacgcggacggcactttttcattgacgccaccgcttttcagttggcaatggtcggtgcggtccgcacagtgcttccggcatgcagtgtccgctactgttttttcaccttgtccgcaacatgaagaggcagatcagaatccttggcctcacacatgtcaattgaatttttcagatgataaatttttttcttagtagtttaggcttacaacactgatcatgctttcgccgagaagtctaagatgatcacttcattggcctttctgcctgtgcaccaccttcaaaatggccttaatgttcttcaaggacaaattccaccacaacttaacggcgttttaaattggttaagtccgaaggcgaattttatgatttttttgatttttctaggtttttggacaactacatgggccgaatgcgtttcaatgttccaatggcggcgcctctgttccacccgcacgaatggaatgttcatcagcgcaccttagatggtgctgatcgtaccaacaatttcgccgaggcattccatcgcaaacttcagcggcaatttagctgcactcatccaacaatttggcgcttcattgacacgatcagatgtgagcagaaggcaattgacgcagacatttcacgttgtgtcatgggagaatccgctccacaaaagaaaaagaagtatcgcgaagccgacgcacggattctccgactcgtgcaccgttataacgatatcaataaccagggattctttttttatgtaaatacatgtttttttcctggattctccatagcctaattagtaggaaaaacactttcttttttgtgtttgcgaacaaaaatcgggacttttatttacatatttttacatatttcggcatttttctacatattacatatgtacatatttttatacatattttggactttttcgcattttttcgaacatattttgaaatttttgaggatttttttaaggaaattttcattaaatgtccccaaaaaaaacccaaaatttcacaattttttgtacatatttttaggatttttgagaagtgatagaaatttcatatgaaaaatttaaaattttttttgaaaatatacccctaaaaatcgtttttttcaaaaaagagatagtaaaaagggtgcttctaagcctatttaggtcatttttaggacattttgtacttatttcaccccttacgaagatttttttccaaaaaacaccatttaaaaaattttatttacatattttaagtacatatttggttctttttgtacatatttcatacatatttt

SEQ ID NO: 9706 - DNA, 1019 bp, Heterodera glycines
gatcaagatcagtgagaatcgtcggtgaaatcgcgacgacgcaaatcgtacaaatcatcgccatcggcaaagctcaaacggcgaacgtttgtcgtaagaattggccaaatttctcggacaaaaacatcccaaatcggctcgggcatttgaaatagacaactccaaatcggtgcccattctgtcccaaatcgtgcttgttggcacggagaaatgcaatgacggagtggtcaatgtagctgaaaaaaatacatataacaaaatgctctaatataatatacactttcgtttaaattactaaatctgaagatccttaatacggattatgttgggcagcggatggtccggcaatggaaaatccacaaaattgccatcgatccgtacagagagtttcgcttttgttccgttgtccttgcgaatccttatttctctccaaattctaaattccgtcgttttggcatcaaaatgcgtgtccacaagcgcatcaaaacggtcggaaatcagtgccattttgaggccgagttgagcatggtcaaaggatgggagaatgtccatccaaacgtcgccacaaatccaactgaaatttgttaaaaaaattgggaaaatgaaaatttgtaatttgaaatgaaaatccgtaatttttcaaaataataattgaataattgcttaccgtcggttcatttttgtagttcaattagcacaattttccctttttccaattgattaattggtgcgtcacaaaaagcaaaaaaaaaaaaaattgtgttaacttaaaacagagagaacaacaattaggaaaaataagagagcaaaataacacaaaaacataataactagggaagcaacttttagtgaaaaaacttttttttttgctcaattgttttgaagaaaggagctcaaaaacgcatttctgcgttaaaattttttcatttggacgtcacttttcgtcactagaaatcactattttagcgtttcgtcacttaaaatagtgaaaattcacttttttggcttttatcactatt

SEQ ID NO: 9707 - DNA, 2442 bp, Heterodera glycines
ctcttcgcaaccgaaggaatcgtgtcataattcagatttcttttgaatttctcatttcgcttactttcgtcaattgtcggtgtcctccgccgcttttcgtccttttgcttcacgcacattttgacgatggatgagcggagcatgtccacaatttcgtttccgtttttccccgtctctttcggctgtttcgtttccctttgtgtcgcattgtccggcgacgtttgctgttgcggcggcgcttcgtagacgaccaccacgggaccggtggggtgcattggcttcggatgttttatctctttgctgcgtcggaaattggcctcgctgccgatcactcccgccggatttgtggcgaaccgtcgctgcacaccgtcgtattgtccgattcccgtgctgcaattttggctgctccgatatgttcaagaaagctttggccggtgaaggaagttggttggatggccgggtccggcttcaacggtttgaacaaattttcaacggtcgaacatcgccgggaaattgtcgaatcggtggacatttggtaagacagcgccggaattgcaacatttgaagaaacggtgggcaatttttggtgggacgaagctgaaaaaataaaacaaataaggcggcgatgtaaaaattcacaattcagattgtgcaacaaacaaatattttaactcaaatcgcattatgagttgtgtttcgtccgccaaccccgccctccttcaaaagacagaatcacctgatcaacacaatatcgccatttatccaggaagtcacatttggagaacacctgacggacaaactgcgcaaagcccacccgttgacacggcacaaacgatcgaagtcgttcgggcacgtcgcaattgtcggagcaataaaagtccaagaaaaaccaatgggccaattcaatgtgaaagcagacgcggatttgattttccttctaaaaagtgaaaaatattcagatgattaatcgagtatgactcaaaaatgcctcattattcggaatattatagaggaatcggaagagaatgtcctccatgaccatctccggcacggtcggtccgaaacatttgacctccttgagataattgctggaggacgactgttgctggtggacatttactgggaattgctgctgttgaaccgatgggaaaagcgggggcggtctgttgcttgggccaacggaaggcgaaccaagtgccgataggcaccaccgtggaaaattttgaaaatctaagagacattacgccataaaattacaaattttctgaagaatttttaaaaataagaacaattgcccgaaatcagaacatttgcgcttaggcggtgccatttgttagtattagtgcaggtgctaaattaaaaacaaaagagaaaaacaataaatgcaaaaataattagacaaaattaacagcaaaaaaagaaattatattgcaaaattgaaaaatatttttcttaaacagtacgccaatcagaaatttttaaagaaatttgacagatttttctgagaagcgacaaatcagaacaaagtaagaacaatagcccgaaatcagaacatttcttacaaataagaacatttttattttgtaagatttgaaccctccaaatcagaacatttcttataaaaagaacaaatcacatccctgcactattcgtcactattttggacttttttcactattttgtcactattttggcactttcgtcactattttagttaactatttcgggatttttcgtcactaaaagtcggttccctaataataacaaaaacattttgggctggctctattatagtatagtttgtcccctataatttttttagatttaaaaaaatcgattaaaatgccttttgacgccgagttgggcttgagttaacagtttctaagcaagaaagccaaaatccaagcacgtacatggtatccaagtacgaatccaaaccctggtaaaaaaatttctagtttgtgaaaaaaattacattttattgccatttttcatgtgtttctcaattttgctaaatttcacttttttaaactgcagaattatacagccagagatatgattcgaaatgctaatttaatagctagggcgcaacttttagtgaaaaaactttacacccctaagaatcgacccaaaaattttcaaaaatacactcctaagaaatgaaaaaattttcattttcctggcaagaattttaatttaaaaaattattttttcggtactaattttggggtttttgcccttcaaaatttctgtcctactcattttcaactgcaactagttgataaaaattatttttgctcaatttttggctaaaaattatgtcactattcgtcactattttggactttttgaccctattttttcactattttggcgatttttactcgagtattttagttaactatttcgagatttttagtcactaaaagttgcggccctatt

SEQ ID NO: 9708 - DNA, 1448 bp, Heterodera glycines
gagaaaaacaataaatgcaaaaataattagacaaaattaacagcaaaaaagaaattatattgcaaaattaaaaaatatttttcttaaacagtacgccaatcagaaatttttaaagaaatttgacagatttttctgagaagcgacaaataagaacaaagtaagaacaatagcccgaaatcagaacatttcttacaaataagaacagatacgcgccctatttgctgacgctgcgagtccttttgaccaacgccaaaattattcattttctgaaaaaaaaaattaaatgtaaatgtcggataaacagaaaaactgacaacaaattttttttcttttccaattaaaaaaattaacaaaaataataaatttaaatgtttaaataaattctttctttgttttttatcaatcaaaagtatttgaatttgttagagcccgtcttgaatgtctgggatgcggaattttggaggcagctccaacaaagaatggaagaaatgagaaggaggttagcaattataccattaatattttcaaattgagtttttcttttttagagcagctgttgaacgaaattgagcagctgacggaccagctggcggaggagcgtcgccggctgggaaatctcccagacgagacggtaattgtctaaaagttagtatggctgacagctaaattggagaattgtcactggaattctaaaattttgaattttggttttgatgtgtgaattttttaagcagtgggtgccgccaccagcgggcggcgctcctcccgccgacgacgccgggcagcagcaagagccggacaggatgaattcagaagcgtcaaaaatgtattaattttgaatttgggtttaccggattttgaatttttgggacagggcaaataattgactttttccatatttctggaattttggcagtcatcaatagggctgtgaattttagtgacaaaaaatcccgaaatagttaactaaaatagtgagtaaaaatgttaaaatagtgacaaaatagtggcaaaaagtccgaaatagtgacgaatagtgacaaattttcagccaaaaattgagcaaaaataatttttattcactgattgcagttgcaaatgagtaggactgggatttttaagaccaaaaaacccaaaatagttacctaaaaaaatttttttaattaaaaatttttgccaagaaagtaaatttttgagaaaattttttttcatttcataggagtatattttgaaaaattttagctcgattcttaggggtgtattttttgaaaaaatttttaggtcgattcttaggggtgtattttttggttttattgcatttttgttaaggaattttccaaaagtgtcgaaatagtgaaaaaatagtgacaaaacgccaaaatagtgatttctagtgaccgatagtgacatcagaaccgaaaatttttaatgcaagaaatgcgtttttt

SEQ ID NO: 9709 - DNA, 4858 bp, Heterodera glycines
  unsure (1)..(4858): unsure at all n locations
agtttcaagtgaatttttaaataaaaaaactattttatatattcaacaaatatattaaaataaatatcacattatcatcacctctacccgtcatatttaaatgataaaggcacttggaattgaattgaattattcggtagaaggagaactgccctcaggcaaaatccaccctaatggatttagcctaatccaattgcaaccgaatttttatagttaatttttagttattatgccaaatgggaaaactcacaccaaaaccaagaatttggattatttaatttcagaaaaaaatttttcttattaagaaaaattgattttcaaataaaattcattttaatgcaattttatacatgaaaaacttttaaaaatttgaaatttttaaacattttttcactcactaggagtgatttcttgaaattttggatctttggggatgtatttttctaatttttttgaaaatgccgaaatatggattaatatataagaaaacatggacagaaatatgaatatggaaaaataaagcccgctaaaaatgaattgtgtgaagattcagaaatttttgtgactctttgaatttgaataaaatttcaattttgagtttagatgcatatggataaaaaataattggaaactttgcaaaaaataatcaatccatcatttataaacgaacaaaagaagggaaatttgttgaccccaaagtttgagagtaaaaaaacaaatattgatgagaaaagaaagaaggagcgagagagagagaatagaaatacagaggagaataaagagagaaagaggaagagagagagatagagagaaaggaagaaatgaagagataacgcagagcgagagggagagacagcaataacgtggaaaagtagcagaaagagagaaaagtaaatgagaaagaagtagcgagagagagagagtgaaagaagtacagaggaaagtaagagagagaaagagggagagagagagagagaaaggaagaaagaaaggcaaaaaacgccggcgtcattttgcatttgcctattaataaacgcccaaatccttgtttctttttcccaattgtttggggttaacaatttctacattcttttttatttcaattcaacagaaaaaatgccaaaatatttaagaaaaatattagccaaaaatgagaaatttagagcaaaaaaaattgaattctctttttattttaatataaaaccaaaaaagtaaaaaaaaaatcatttattcaatgttgcattgcaaattaattacattttcagccttttcttggtatanagtagagtgcagtgggaccgggaattttgggcttaaccgggaccgggaccttttctggttgaaaaaccgggactttggggggtcgccggcgagggggaaaagaggaaaatttctgaaaaattggctattttcttaaccaaattcattaaaattcttaaatttttccccggcggcgcttatcagcaccaccgcccccctgtcccccaaaacctttttttcttaaaaaattagcccaaaatctcaaaatttggtcatttttagacaaaatctgctaacaaatagcattaaaattacaaaaaaaatttccggcgtcgcctatcggcaccaccgccccccccccaaaatttttttaaaaaatcgccccgcaaaaaacgttttttaaaaacaaaaaaaaactcgtcgatttgctaaaaaaatcgcaaaatttggcagtttttggtgaaaatctgttaacaaattgcactcgaattttcaaaatatttccccggcggtgcctaccggcaccgccggcccccttttcgcggaaattttcttgaaaaaagcaagccgcaaaaagtgcttttgaaaaaaaagtcgtcgatttacatggccgggaccccttcacaaaaattttgggttgacccccccccccctttttccatgtatgttttgtttttatatttcgctttttgaggtgtggatgtgcggtgggtccatcgaagtcgtcccctgctcccacgtcgggcacattttccgtgccggccacccgtacaacatgacgggccctggcggcaacaaggacgtgcacggcaccaactccaagcgactggccgaagtttggatggacgactacaaacggttgttttatgtgcacagaatgggattgaaggtgccgcaaattatgaattgaataaacaaatttgacttctcttcttttaggatgttgaagtcggcgatttaagcgcccgcaaagcgttgagggagcgtttgggctgtaaaagtttcaaatggtatttggacaatgtcatcccggaaaagttcgtgcccgacgagaacgttaatgcgtatggattggtctgttcggaaattcaattgattgagatccgattcctacttgaaaggtgcaagatacagacgggaaactctgtttggacacacttcaaaggctggagaacaaagggacagtcattttgggcgtttgggagtgccaaacgggcggctcctcctcacaggtgacgaattttctatttatgctaattccaaacaattaaatgacaacaacaaacgaataaattagacgaaagattttttagaaatttctaatataaaaatcagagatcaaatgtaaaagtggtcaaaaatcaactaatttttgaatttgggcacattgcaaatcaaagcaggcgtcacctccgattacgtcgaggcattagagatgaagattttcagcacattttggatgacattcccacctgaaaattgaacacgtttttactaaaagtggaaaaaactcacagccggggcaattgatgtccatcttttgggacaccttcgtgaacccgtccatgcacccgattgaacatccgcacgggtagaaaaaagagttgaattcacggcattcgtttggatggcagaactggcagtcgatgtctcgttgtcggatggagatcagttcctcgcctaaaccgaacagtttctaattccccgccattttatttttacatttttccctgcaggcgtagcattcctccacattttcgtctctcagacactttctgtgaacatttaaatggcagcctaaaaaatgtgaaaattttgacataatttcgcttataaaatgcctacatgggtagaaaagtgtgtcgctgtttggctcaaggcacatcacacactcgcccttaaccagctccgtgttcagtccgatgttcacttccgccctttgctccccactgtcccattgcgcctctctttcttccgcagtccatccacttttgagaagacgcgctttaagctttcgttccaacagtccacagctgctcaaaatgcttagtgtgctactttcttcgtacgaccgcctcaacaccgcctttttgtccacttcgatgacgagagaaaagtctgatttatacggaggataacgcacactaaacatgaatttaaacaacaaaaaagattcgccctgacctgtaccacggagtcggactcacactcccaaatgagaagcgaaccttaaatagtctcaacaaacgattagtttcaaattgctgttttaaatttgatacccggactccgtttccgtcggccaagtccagagaaatggtgaaaatttgaccccgcttcggagcaaccaacagccaattgggtatttcgttcaacccgttgtccacaaaacgcaccaattggatgaaactgagttggtctggcgttgcgtttttttcactcagcagagcacggtcttcgtaaagctcttgcaaagacaggcaggagaagccaatgcggggaagacgcggaaagtcatcctgacaatgtgaaaaccaaaaatcgaaccacaatttgtacctcgaaaaaaatgtggacatcgacgccatccgaggacacatcagcgcacaattcgttaacacatttccgggaaattgcgaaatgcgcaaaacattgaaactgaatgtatggctcgagcgatgtttccgccgcctctttccgaagaattcgcacatttttgattaggttggtctgtgaggaagttgaggcaccgctgtcctggttgtcttggccgtcgtcactcaacgtgtccttttgtgactctgttggctctggggttttattcagaattggaagctttttctcggccggaagaggccttgcaaaaaatattggcatttcaattcacctagaacaaaaatgccgaatattgaacatttatttgtacacacaaaaagttcagagacataaaaaggagaacaaaattgatttaaaattattgattctttgattcttaacacagcgatcgaaaatgagcccaaaagatttgcatgtgtggctcagtggtttttgtaagatagccaataggaaacgggtgaatgttcgagtctgcttcactttattaatacttttatttatttacttccaaaataaaaaaaaatctatttaagctttggaagcaggcttttttcaaaatccgagctctagcattaacaaacaaaaaataatagattttaatttaaaattattttttaaggcgttcagttggagcaaagatggagaattaaggcgtgagagcacttgtgtagatgtgcaaaaatcttctgccgctgatgcacgttccaaacggaaagccattctcagagaatgcagcagacaccaaatttcgcagtttgaacaccaaaaagttttaatatttattatatttttttaatttgttccgttttaaggacggtccgttgaagcatttgtcctctgggctgtgtttggatgtgcaatcgctgaacgccggcgacgacatttacttcgcccagtgccataatgagaaacaaagtcaaccatggcaatttggcacatacttttgagctttcataattgtaatttattttggtattactta

SEQ ID NO: 9710 - DNA, 1418 bp, Heterodera glycines
agcagcagcagcccactccccacaaacttatcacatgtcatcagtgtaaaaagaaggccaaagcaaagcaaaggacaaaaaaaagagctaatagtcaaagaagagagagattaacagattcgtagaattaaatctcattttattgccatctttttttattttccaaattattaatgaataattttcttaaaataatgaaaagcacctttctttccgatagtcctttaaagaaacagacaacatgaaaaaagattagaaaataaaaacataggtagtgaatttaattattcttgaccaaaattcccgactctaagatttcaaaaattccaaaggaattggtttttgaaatgtcagcttttttaactactaaagaaatatgacaaaaatttggaataattatagagcttcctatgagctaatagagtttctaattagctagctgtttacttattataaaattagcgtaccaggtgttttcgacagtgattggtttcgacagtagttgatttcgacagtactttttaattaattttctacataatttattgtataccatgaattagtattaatatataatttgcatatacaaaatttataattgaagtaagtaatacaaaaaaaagatttgtataggattttttgtcaaaaatcatgtgcgaacatcttctaactaatgtcgggtttgaatgccaaaatgcaaatctgtaggctcttatagctgaattcgtaaacgcaacaatatataagagcctgtgcttatcattttaattttaaaaaaataaataaactttatttatttttttatttatttattcaagtaataaaagtccaaaagaagggacaaaggccgcttatactttcggaatttttaccaaaattagcacttatttgttaggtaatttttggaagttttacattaaaaaggaaaacttttagaaaacacatcgccaaatttgcagcgactgaattgttttgtctgtgcgtctgctttttctcttttgttgtttaatggattcttgcaatagattaagcttaagcacatgaaagttgacttaaaaaatattgtgaattttaaatgatgttttttaaatttgcgattgattaatttttcattgtttggattatccattcgttttaatgagttaataatgactcccctaaatttgtatttactaatgccttttgttggcatcaggttttgtacacattttgaattcaaatcgtaaattcaaaaatggcggaatatcagccaaaaaaagaaccacgtgagcatcgctattcgttacgcgtttcaaaattgccatcgcgttaccgtgaaaatgtggcggaaagggacggggcacaacaacaacactttgttcagcagggcacgtccacacaaatagcggcgactggctgacaccatcacatatcattag

SEQ ID NO: 9711 - DNA, 1696 bp, Heterodera glycines
aaagggattataataaattaaatatttgaaattacaaaatggtctaataattgtttaattccatccaattaaattattttttacagccatccaaaaatggtgccgaaacacgaggaacgtttggtgccattgttccgctgtgtggacgagttgttcgacaatgggctcgagtttcgaaacagcagatgtgaagaggacgacgatgatgttggaaatgtaataaaaaaattaaaaataaatcaaaaattattgctataatttaatttattttgaaaaaaaaactaaattttttttttaatgaaatggcaacaaaaataatttataaatttaaaaatggaaaaaaaaattgatttttgaaagttctttttccttttcattttttagcatttttttttgcgatgagcaaaataaaggagccagagaaagatttaaaaacttttaattaaaatttttttgtctttataaatttatttaagattttaaaattcactattttttatttttaaattatttttttgagtttttaaaatttttaaaggcattgaaggactgactgactgtttgctgatgtgcccgattcggtcggtacttcaacaacataagccaaagcagcagccgcaccaataacaaggaggacgagaacatggccaaaatgagggcactgaacgaaaaatatgccggcgcagagcggacaaatgagcaaaatgcgtatgaaattgacactttttggcactaaattaatcgggaatgaacatattattatttaattcctttaacaaaattggcactataaaaaaagacatttttgtatttgagaaagtgtccagaaaaatgcaaaaacacaaaaattcacctttggcacataattaataatggggaatgtcccaatttattggttaatttttttttataaaatttgcaccataaaaagacatttttgtatttgagaaagtgtccagaaaaatgcgatacacaaaaacttttttttattttttataattctattttttttaatttttgaaaattttagaggctccattttcctccaatttcgaccgtctcttccgtcgtcccatcataaattcgcttgtcccgcaatttgtcatcataatttttttttaatttccattttcatttttcaccactctaccacaaatttctgtttttctgatgatgctgcacttttttttcaaaaatttttttttttttgcctttttaccaaatgcaaaattttgcctttcccaaaaataacattctttcatttttaaaaattattttctttattatttttatcatttattttatcatcattttatcatttgcaaacatgacacccattcttttgtagacaatttatgtgttgatggatttggaattttacatcaaaaaatgtgacttttttatctccctctaaaacagataagaatgttggaatccaaatccaatgaatgcaaaaaatgatttaaaaatgcaattaaaagaaaataaaaaatttaaattcccattccatcactgtaaattaattaattaattgtttgtttgttaaattgtattttttgtaaaatagcgcgaaaaagagtggctatggtctttgttcggaaactttttgtgccttgccaattttcccgccttttcatttttattattttatttattttattttattcatttttattttaattttcaatatttcccc

SEQ ID NO: 9712 - DNA, 4429 bp, Heterodera glycines
  unsure (1)..(4429): unsure at all n locations
attcactttgtattgtgtatttctatttcaattcttttttccataaaattgtaaaaaataaactgttatggtgattgcataaagagcatgaagaaattttgccaaattttcataatttgtatgtatgggtcaagagtgtccaacaaagggcagaattattttaatatttaataatggatggcttaggacctttttcattttattttcattaaaatttctaatatttttttttcattttgtggccaaattggcatataaaattttatttaaaaagtctcttccttaacgcaataataaaggaaaaagaatatttttgttttaaaaatttgttaaattaaaatagtataaatattttaggttttgaaaataatgaaaaaatttctggtctctagtcttgggataaatgaatcgagaattaattcccgatagatgacatccaaagaattggccacttagagttgaagccgagaccgagaacgctcaacgaaaatcaaaaagcgagaatccgtcttttaatatacatataaatgttataatagatttttaaatatttttttaaaattaattttttccaaattatgctacaaaattttttgaataatcaatatcaattatgatcaaaattcttgtagccgtcaatttctttcatagattttttccatcaaaatccaaatttcttccacggatttgcattgaaaaggagttgttttccgccaaattccaacggttgtttcatggcatatcgttgtgaaattggcaagtccatcgtcaaaccttttgcatcctaaattgacaaaaacattatcgaatttaagcaaaaaaaaaaaaaaaaattggaaaaaattagagattacaattataagttttattaattttatttaaaaaaaaattattttttaattttcaaacgttcggcaaatttatgtcgttaaccaaatgaataattaatttatagactcaaacaaacaccaaacatttcgcgagtgcaatttgattaaaaatgcaaacatcagactatttaatttacctattagaaaagtgagtaatttctttgtgcaaaacatgtaaattaatttttctttttttatgactcattatcgtgagcttatgaaccggaagtttggtctccgccaaagccgcgattcgtcacatttaaataaatgttgtaaaaatatgacaacttttttcataggctggcactgataaaatcgaattttatttttttattaattacattataaaatgtcctcttatggcgccgaaaagtcagtgcttaaaactgtggcacatgggaaggaacaaaaattttgagaaaagtaaatggcaaaatttgtttttattttgttgtgtagagttcagcgggaccgagattgatctggattaccccggtttcttgagtctcgatccaggtcctggttgaaaatcagggtcacggccccggtcaatcgcgtgtcccggtttttccataaatctctctcatcccactcaattcttgacaattaaaattatttaaaaatgaaattttgtgccagcattgtcgatgtgccgaacaatgatcggctcgatacttgctggtgttgagaagtgctcccgccgatcaccactgggtcaacagattctttggattgatcactacggctcagatccagatcagcgcggaactcgttgattgccggatgatgcacaaacatttcatgctgtccctgggtgcgcaacagacattggattggcgagaaatagcaaggccgcctaaattggttgttataaataagactgatcagcagatttctctgattttcaataaacattttttaggtaaagcagataaattctaacctaaacaattataaattctgcaaaaaaaaaatcttttttcttcttaaaatttatataaattggtaaaaatcaaaatcaaaaatctaagaaaaagcgtttaacaaaatcatgcatttaaataaattttattacaaatcattcatgggcatcaaaaaaatgaattatgaattttaaaccaataatttatttgaattcaaaaattctttatcgaaaaaacagcaactttctaaaacaatttttgttgccgactttgaaatttgataaaatttttacctaaatttttttcaaacaacaaattttgataaaaccgaaaaaaagaacacaaataagcgcttcaggggcgttttgtacataaagcctaccgcatgggcaacagtgggctgttgatgtactgttgctgcggtttcagctcctcattttcctgttgttgctgcattatttgtgcctcggttggcaccaagagtagcagctggcgcgaatcggcggtgccatctccatgctctccttcggcaccattatttgatgccagccagcgattggtgttgtacgacgatggtacaatgtctgacagacgacgaatgtacgcctcgctgatgtgctggtgcaattgtgccaagattagcagcagcatcggtagaagcagagccatgggttactaatcgtggtaattggtgtataattgatggaataaaggtgctaagaatggcttagctaaaatttcgagatgaataaaaattacaattaacgggcacataaatgtcggtgaaatgaggaacaaaaatccaactaaatttgtatggaattataagagtgcaatctaatttaaaattaaagtcttaattaaaaataatcacctgtattaattgcttaacacatacaggccacattaaatcaattattgtaaattaattaattaaatttaaattaattactgaatatattagtaaaaatgaacattagttaatgtgttttttatgacgttgtttgacgcttataaaatgaaaaaattcttagtattaattaagtcaattagctatgagctaaaaaataattatattaaattttgcagccttattggcaacggattaggtcatttttatgccctcattagaggcatttaggtaaatattaaacctttcttacagagaaaaaaaatacatgtacaatgacgaaaaaaggaaaaaagtaaatttttaattgggttattaaacagaattatttaattataccgaagaaaaatggaattaaatggccgccttattggtaattgagtgatcatttagtgttaatatggccagagaaaataaatatatatttttagaaaataaatgtacggcatgtgactaaacaggaggattgttttatgtgccgccaaccaataaaatgccaaaaaggcactcattttggcacatcaaataaatttagagcgtaggaaaaatgcctaaaaagggataaattatgttagaaattggttcaattcaaaaagtttttatttttgcttaatataaaaatacgaattaatatatggacataattttttagacaaaaaaaaatggttaatttttttttgaaataataaaatttttttatattagttaatttttttagtattttttagaaaattttctctacagggtttggcaaacatttctcatctaatgggccaaaattgctgttttaatagaaggggggagggatgttccaattgagaattgttatgaaaaatactaaaatacgagaaaaaagaaatttaaaaaaaaagtgtgtatgccccgtggttatgacagtgatggcaaaaatctgtgtgaaattcacggtgtccgtggccttgaccacgaatgaattattgggttgtaaaataagtctttgcatagtgcccaaaaaatacatattaaaattcataacaattcaagtaataaaataaacttaatcaaactttgccagattattcccttataggtattagccacagctttacgccatttgattagtgttttcactttggcttaaaaaaattatggtcccgtaaattggccgagatcttgcaaaaaccactcacatttcaggaggcatttctcagcccctattttctttttatttgaataacaaatattttcctgaaaggcaaagttagaagaataatttagggcgaaaagaaatttcataagtaatttttttcattttttattggagattgttttcagaattggcccaagagagatttttgagaaagggggctttttcagaatttctttcctattgtttcaaaaattttcaaaaattcggtgtatgtaaagtttaggtctgatcataacaatagcaagaaattttgggaatcggtctcttattgaaaaagttatgccatccaaacactttttggagtttgctgattcaacaatttatgatgactcgtgngaatttttttaagaaaatctgaatgggccatgagataaataacaaatagcccttataaatatacataattggttttttaatttggctgagtctcggaaagaaaatcattanaaaatttcgaaaaatacatttttggaggttgaaattanaaatcataaagttcacaactcaaataaaa

SEQ ID NO: 9713 - DNA, 5503 bp, Heterodera glycines
ttcaaccccttaatatctatttatcttttgaatgtcatttattttgctcaccaatttggcgatcatacgtagcccagggttaaacaccattttatcatattccagccaaatgttgtacttggccttgtacatttcgatgaatgctctcttttcctcctcatttctcacctccgacggccagcccgacgcctccacctttattttcaagaacatgcgcacatatcctttgaacagctgactgtcaaattgctcaaagtgataggcccgatagaagcctattactctatatcccaacgccaaggatttccgcagttctatcgaggtgaatgtaccaatcaaagctctccgctctggccgatggttacattttttgacatccttagccaactcaaactctttcttcgtttttttcgcacatgtataacaattggggaagagaagcatattatcaatatgcatagggaggagaggataaagcagttcctttggggggatgaccttcacctttagcaggccatcatagggcacatcgtcgggcaccgtccaattcacatcgaattccctgctcaccacaattttatggaccccaaccggataaggggtgtcttaagcgaaggaaaatttcaaaaatgcaagcagattttttaccataattcacaaacggatacaagcttatgatatcgaacatcgaaatctcaacttcttcggttgcttttgcgtacaaacaaaaaggcattgtccgtccccccgcgtaagcatccctcggatttattggacccttatccggcacagcgtcaaagaacctcttcatctccctattttttcaagttctctttcacatcgcattcctaaatttgttcaataatcaataaaatttgaaattggcacacccaaacttcctccaccgagaagtttttacatttttccctcaaaaactccattcgtgtctcagttcgtcggaaatttacttccatacaacgcccattgggtcctatggtccaaggcaaaaaacattttgggcatccatgaaacgcacaaccctttagcaaaaaataaaatatggaaggaaattctgcctacctgaaattcaatgatttttttctcagctccgatgatacaatccacttttaatcccccgatttccacttcacccccattgcatgcgtgtctaagtctcactcttttgctttgagccaaccattcaaaatacttcacggcaattttgctctgattctcggctctctcataaccgccttccggaataattgggagatgattttctctcaaaaattttgttcgaaaaattctcatcacaacccccgcaattgttacactgtccttcaacacatccatcccatcagtaatctccaaaaacaattgccggaatttcaaaattgcctccatcaaaatttcgacgtcattttcgcaataaaccttgagctgctctcctaaaattcaattttaaaaggaaaacagattttctctaacctagctcaaattccattctataattttcattgtgccattttaccaatttagcacattcctcctccttcatattgtccggacaataatcttcaaggggtggtaggtgtgtcaatttttttccaaagttcacatttttgttgtacttatgagggaagtacaactttgctaaggttttcaaacccaaagtctttggaagatctgccaacttgttttggctgagcagccagaaatcccgaaaatacacaccacgcgctttcatttgataaatcttcaggtctgccatcatcaactcagtttcgacccctctttcagtcagctcttttaacacaaaatgcgagtcgaaccttccagcataatgagcaaaagcaaccgtttcaaatcgtttaaatcccaaaatccaatcaacaaattcgctcatcggttcaaacccatctgctacagaccaagtgatcatccgcggaccaatttcgcattccctctcttctcccacacaaacactacaagtatgcgcggcactaacaagatttggtttgtgttcgccccctacaaccgtcgtctcgaggtcataagccacaattcggtatgctttctgctgtcggagtttgatttttttaatgaaacattgccgacccggatgatagactttgcaaattctacagaatttctccccgcacgtgtgttttgatcgtgtttgatatgtttccccacatttgttgcatttcttgtactccctagaagctgtctttttgtgagactcgaaacaatcattgttgtagaaattccgattgcattctccacagtgtatcgcctcacaaacatccaaacaggggaacccgaaccccatccggcaacactttttgcaacgctccctacattccattcggtgacggtctttggtccaaaatgtcacctcacagcttacacaaaaatttttgacggcgaaaaattgagtaacagattttaaaccatcccaatgttcgccctctcttatcacacaaacttcgttttttcttactcccttccctttgaaaattggtctaagtccggttttctaaataaaacaatcacaggcagtttaggaaatgttcgtttaccatatcaaacgcaacgatacgaaatatatctgggaattctttgtcccaaaagttttgcacaaattcgaggtgtttaagcccaaaagttttctcctgtgtatttatcccagccttttccatcaaaaccaatgctaattcatgttgttttttccctgttttcatgatatgtcggaatttatcacgagaaatttcacgtccaaccgtttgataaagcttagcgaactcaagtgcataaaatatacctaaatattttcataaattgagtttcatttttcttctcactaaattttccctttggtgttggaatacgccctagttctttgacatcagcaaaaaaagatgagttgaacattattaaagttaaaagcttagatatttgaaatggaaattttaaagcagaaaaaatgtacatggcttaaaccaagttttttcatgacacatttcaacaaaaaatttatttcattaataaggcggtgggtattctggaaaatcatcaaattcttctggttcttcttcttttgtccaataataccatgctgcacaaagaacaaagagcaccagcgaaaccagcaaacacaacatgagaagcatggcaaaggagaaacccaaaaggaaaatgagaaattctgacatttttgctgaaaactaattaaaaacgcgttaagaattaacaataaaatagcataaaaccactaaaaactaaaaaccaattattacacatttaatccgttgtgactttcaaaaaccaaacgagatatttttaacagatttttccattcttgtttctgtgacatcagcgaattgaaagtccctctgagacgcttttgagcccacgacgacaggagatgattgctcaagaagactgtagacaattttgaggaggggaaggcttcaattatttcaaacaatagctcagggggcagtggcattgttagctaaaaaagacacggtggcattctctaacgataacggcacagaaacacaaaaacgaaaacgaataaatgactaaaatcaaagccaatccaattattttttcgttattttctttctgattaatttctgtgtcgtttaacattttcctaaaacttaattctgtcacttaaatttttaggaatcagggaattttctcaaccctttacataaaacgatcaatcaacaaaaaatttattaacaaatgcattctgttttctcattaatgtgggggtgagcgggggtcaattggtctcccaatccattgttgtcttggccaacggatcatttgctgtggattttgccccaacggattgacaattggaggcgcctaaataaattcacgttgatgattttgggtgttttgaaagttccgaacttgaagagcttcgttcctttgtgcgacgggcgggacgcgaacgatgacaggtgggaaatgccatggttggggcggcacaagatgagcctaaatttctcctgtcttagaaaaaactgcgggtttaggacctgatggggcagcggaagtggtaggccgttgattggatgatggtgatgttgaacaggcacaacatgacgcaacattggttgcccctaagaactcaaagcggtgaaatttgggtcaaaagaaggcgaaaaaggtcatgagtttttacctgatggggcagtggatgtggtaggccattgattggatgatggtgatgcggaacatgtacaacatgacgcaacaacggtggcccctaacaaatcaaagatgagaaatttgggtcaaaataattcaaagttttgacctgatggggcagtggaagtggtaggccgttcattggatgatgaacatggtgatgcggaacaggtacaacatgacgcaacaacggtggcccctaacaaatcaaagatgagaaatgttggtcaagagaaggcgaaaaaaaggtcattttttgacctgatgaggcaatggaagcggtagaccattcggtggaggttggacatggtgatgtggaacatgaacaacatgacgcaacaacagtggcccctaacaaatcaaagatgggaaatgttggtcaagagaaggcgaaaaaaggtcatgagttttgacctgatggggcagtggaagtggtaggccgttgattggatgatggtggtggtgaacaggaacaacattacgcagcattggttgtccctaagaactcaaaagtttgagaaatgttggcacaaaatagggtcaaaaaacagtatccaacctgagggggcagcggaagtggcggaacattgacaattggaaaccggatggggtgttgtggggcacggagggcgttgtatggcattggtggaccctaaagcccaaatttgacaatttgtggcaaagcaaaaaacgatttcgatttcgacctgacggggcataggaagtggtcggacgtgcagaagagggtgttggacatggtggtgcgggactgggaatacacgatgtggcatttgtggaccctaagacccaaagctgtgaatctgggcaaagaaactcaaaagcctttggtttctgacctgacgtggcagtagaagtggtggaaaggggcggcgaacagggccttgacgaaatgccggcggcacccgggcaattggacgttggacagctcgtgcgccaatgtccagttcctgtctttgcacaatgttttggtgggcggcattgccgtcaccgtcgtcatcgtctgagcttacatcttccgccggccgattgcctaaatttttgggggataaaatggccaaccatgaaaccgtttctctcattgtcaaagcacaaactcaccctccacaacaggaattggtagtccaacgattggtcgcggagttggggccctcattcttttgggagatgttggtggagttgggtcacgtcggctgcgttgcatgttgtgccagtctttgcgccttttccttcaaaactggttgataaaatacat

SEQ ID NO: 9714 - DNA, 2574 bp, Heterodera glycines
ttggaccctcaaaataaggacaatcttacaaataaggtaaacgagtaaccctagttgtgaagacttgaaagcaaggggttggtttttctaaatagtaatgaatgttattacttaaccataaaaacatataaattcgaaaacctaaaatgattttttaaatacataaaaaaattaatatttgaaaaataattaaataatttatatgaaaaaaaacaaaaaaaaacaaaaatagatgttataatcttgaaaaatactctcaaatacaagtatattgcaaatacaccaaatctgagtcagtttttaaatgcgcaagtggcaagtatattaattaaaataaaaaaaattacactcaaatatttatttagaaaaattagtcaataattgagaaaaaataaaaccgtttaggaagaaacagttactcattataaaattaacattaaaatagatgatgaatgtacttttaaattttaaaattcaaaagaaaaataatatatataaaaaaagcatcatagattggttatatggatgatataccccatgcatgtattataaataaataaaaaaaattgaaaatagttaaataaaattattaaatttgattaaataagaataaatagtaatgtaagatttaataataaatatagtactcaaatatggttgaaaaattttaatctatttccatcaccgatgtattgaatttatgagaaatgaaattgaaaaaataaacaaatacatcaaaaatgagaagatattgaagaagctgaaatttaaatcactttctatttttttgctaattgcgaattgaatgggagcttttaaatgatttcaggagaaaccgaagtaattatattgtttaaaatttaaaaaaaactgaaaacagttaaaatttgattttcaacaccaatatccgctaaattctttaaaaatatccaaataattaataaacaaaatatttttgaaatatcaacaagttatatttaattttctttagttgggcgtgtacttatcattattgtagtgccaagaaacaattggggttatttttaatatgattcttctggagtctaaataaattagaaattattatatgaaatttattgtttgatatttcataaataaaatgctaaataattttatattgttattttatttcatttttctaagattcaaaattataaattatataagggaaatattaatttaaaataaatttatgtagaatcattttaccaatttattattaaaaatttattttctacgttaaatttacaatttgatcaggctttttttagattcatatccttaatttatttattaccaaaaattgttataagatattcttttattgaatatttgagctttgtaatattttatttttattatttattttttaagttttctgatattcttttttttggtccaataaacatttgtaacctaatttaaaaatcgttcatgtattttgtaaatcaatcagttaagacctgtgttgcccttgataaagcaatataaaaaattattttaggtttgtagtcttttcacatttttaagtaaattaatttttccttaactctttttcttagataattttattaaactttttgttttttaaaatcattaaaattttgtagatttaaattataacatcagctgtccgacctgctttcccaaaaacgtgccgccctcaaacgggcccaggacgagttagccgaggcggaaaggaccaaccgccgcccgactccggcccctgctggacgaccacttcctttggctgccatttgcccttcctcacccaaaaaatccgccttcgccaatcgcaatgccacggaagcagcaccggacgatttgcgagccatactccatcgacaattcgctcgcctcgccactgatcaagaggctgccgcccaatggacagagtgccgaaagcgcgaaattgccgaggaagcggaacgaatgcttaaaaggctgaaggaagtgatcgtcgactccatcgacattcagcgacaactcttaaatgagcaggcggtcgcctttcgatccatgcgccgaagtatggaggaggcccccgacaccgaagacgaagtcctctccgtgaagtccgtctcctcgagcgctggtttacctggtctttgcgcggggagtgtcgccaaagcgacaaaagaaaaaaaggacaaaatgaaaaaaattgtgttgattggcctttggccggtgattcaattcgtttgtttgagaatttgattgttatatgtttcccaaaaatctgtcttcttgaattaatcatctttctttttgctctttgttccccatatttcgctactcccacacattttttctcctatttaaatgcttttcacttcttttgctttacttcaccatttccattgacttgatttgttttaaattttgtctaaaagtgaccaatttttattttaattcagtttttaagaaaattcgccacggcgtcacaggcgttgtgcgatttatatgtagaatattttagacagaggccatttttatagaaacaataagttgaattatactattgttgtgtagtgaatttattatatatttaaa

SEQ ID NO: 9715 - DNA, 1285 bp, Heterodera glycines
atggtctttttccatattcattcactttatcaacaacacaccgcagcaatggcatttgctccttcattggttattgattaatttcctctgactcatcatttcgttctccacttttaccttttgaataaatatttgtctttactattttgttgtgccaaacgcacgacacaacaactggcgcagtcagcaattcttttcaatttaaaaatcattttgagtatttgctattagcggggtgatcagacgaacaaggatttggcacttatttatttattttttttttcttttatcaatcacatcattttcatcaaattgcctaccttagcccgtaacacatcgttctcgtatcgataagccgtaaaaagcctctgtcgtaaaacgagacgaaaagcagggcgggaacactcacgccgtaaaaagcctctgagtgcactttcgttctgaaagtcatttgtgtggacagccaagtcacggcggtgaccgctggttgcaactcacttgtgcgacttccaacagcaaaaggcaattatctgatcacattacttcatcaatcactcacttatcaagccaatccgtcgtggtttctgaccgaagctaagcgaaatacttattttggactcaaacaaaaacatttcaaaaatcaaatcactttctcctttcactcatttcacctaaatctgagaaaattttaatcacgatcaaatgcctgccgaacaagcaacggatctcaaagacattctacaggcgatccatgcgcttttacaaaaaagcacacaaccaaacgtcccttcccaaaattcagaaatggacttgttctgcaaactcagcgcgcagatcaccgaattcgtctacacaccggacgacaatcacacattcgaacagtggtttgaaagattcggcactttcatcgcagatgaaggaaagaatttgcccgaagcaagccgagtgcgactgatcatcaacaaattgggcgccgaggagtaccgccgctacacggagagcattcagcccactgcaccggaaaagataggttttggtgaaacaatcaacaagctcaaagcaatttttcccgaatcaaaatccctttttgtcaggcgtttcgagtgttttcagcttaagtgcgcggacaatgacgtactttcgttcggagcaactgtcaacgcaatggcagagcgcgcaaaattggatttgacgaaggaccaactaaaatccctcatttttatcacagggattggtgaccacaacgcaaatctcagacagcggtcctcaaatcactcgaagagaa

SEQ ID NO: 9716 - DNA, 3747 bp, Heterodera glycines
gcagatcattgcccttcgccacagcactgcagctttggctcgtgaaagaggagttcaatgctgtgcagctgcgcccgcaaattttgaaggacaaaccgagggccagcaaatcgccactgagatcaaggacaaattcaaccaacacgcgacacaacagcacctcatcacaaccaccatcggcttgtacgcgatgcggcggtaatcactggaactcggactgcagtttccaaagggaagtgatttgcaataaatgcgggagaaaagggcatattgcgaaaatttgccgtaatcagaacaacactccccaacattcaggctttaaatattcccgcacaggctcaaataagcaaaatgccaacatcgtcgactgcctgcacatcatgccatccgattggaagacggaaaatgaaccgtacattgagcggcatgttcggctcaatggaaaagtgcacaaaatggtagtcgactcaggctcaaaattgacaatcgtgagaaaggccatttgggtcaaattgggccaaccgtttctcacagaaacaaagctcaagggtcgttcattcacagggaacattttcacatttatggggaatttcaaggtccaagcagcattggacgatggaatgcccctcgatttggaatgttttgttatcgattcgaaggacacactcgatttgatgggactcccatggataaaagcatttgagcgtgcctacaaacaagtggtggctacaactttgtcaatcgaaaatgttgccgacagtcgttggtgcaaccgatcaaacagcacgtcgacgcaattggagatggatttacagaacacatttccaagaatttttgagaaaacattgggactttgcaccaaaatcagggcccatctcaaaattaaagaaaattcatctcccgttttttgtgcagcacgaccaatcccaatcggcgttaagcaagaagtggacaaggaattggaccgtctcatcgatatgggcgtcctgaaaaagaccgactacagcagttgggcggcaccaattgttgctgttcggaaagcaaacggaaaggtacgtttgtgcttcgatttcagcacaggactaaatgccgcattggaaccacaccaccatccactgccacgacctgaacaactttttgcgcagctctccggcgcgaaagtgttttcgcaaatcgatttcaaagacgcatacttgcagatcgctgttgatgagcagtcacgcaagttattaggcgtaaacactcaccggggtttatttgagtgcagtagtttagccttcggaattaaaagtgccccagggatttttcagtgggtcatggaccaattgagcaatggaattcccggagtgcttggctacatggacgacttcatcatcgcctcccgttcaatcaaagagcattaccgaacactttatcaatttttccaacgaattcaggaatttggtttccacattcaactggggaagtgcaaattcctcgtccagcagatcaaattccttagccaaattgtgacaccaaatggaatcaaaccggactcggagaggacaaaagcactgcaagacatgcctccaccacacgatgtctcaactctccggtcgtttttgggtgccatcaattattatgggaaatacatcaaaaatttgcacgaaattcgtgcaccattagactcattgctcaaaaaaggagctaaatgggaatggacacgggaacatcagaaatcatttgatgaagcaaagtctgtgttgctgtcagacttagctcttacacacttcaaccccgatctcacaatcattgtcaccgccgacgcgagcaacaaaggaatcggagcgacaattcgccaccggttcaacgacggaaaagagaaagttttccaacacgcagcgcgaacactcaccaaaacggaacaggcctattcccaaattgagaaagagggacttgggctaattttcgccatccaaaaatttcatcaatttatttttggacgaaaatttattctccgtactgatcaccgaccattgttgggaatttttggctctaagagtggcatccccatattttcagcttcacgattgcagcgttgggcactgattctgctcaactacgacttctcgattgagtttgtcagaacggactgcacaggacaagccgatgctttgagccgactgatcagcgaccaacgatcaagctcaaaagacgaagacgtcgtcattgcacaattgttggccgacacggaagcagatgtggcacatgttttcaacacgcaaacggaacaattgccactcaccgcaagggaaattgccgaggcacagcgcagtgacccgctgatcagagaagttttggactgtacaatgggacgatggctaaacaaaggcattaatcccgaaataaaaccatattttactgtccgaaacaatctgtccataatctcagactgtctcgttttcaacggacgtacgatcattccacaggcactgcgcgatcgaattttgaaggcacttcacctcgctcatcctggcatcgttcgaatgaagagcctagctagagaattggtctactggccgtcgatggacgccgacattgaatcacttgtcaaacgctgtgttccatgccaagaagccgccaaacaacccacaaaacatcctctccaaccatggccatcaacaacatccgttttcgaacgtgttcacattgatcttgccggaccatgcagtaatggtagaacttacctggttgtaattgacacttattcaaaatggccagaaattttccagttaaacaatacttcgtctcattcagttatttcacagctacaatggttgtttgatcgttatggtgttccaaaaacgcttgtgtctgacaatggaccccaattttcgtcatccgtttttaaggaattttgcaaaaataatggcattaaacacattttcagcccgccatatcatcctcagtcgaacggagcagctgaacgctacgttgactacttcaaacgccaactcaaaaaatgtagtggtgactgaaattggcttagcaaatcacttctctcatatcgctcaacaccaattgctgttttaggccaacgctcaacagctgaattgtttttaggccgaaaattgcgcacaaaattgtcactcatgaggcccgaaaccattccaaagcaacaacatcacgaacacacgtccaaaatgaaattgcaatttgacaaaaagcacaatgtaaagccggtacagtttaaaattggagagcaagtccaatttctcaattaccgaaatggcaaaacactttggctttttgggcgcattgtttcaaataaagggctaatttacgaaatcctttcccctcagcttggcaatcgaattgtcacgcgtcatgccaaccaaatccgaacaacaatggcaagagaggggacgaaacatgtccggtcgccgatgacatcatctttgcgagggaggagcatggaactggaaatgaaacgacggacgatcaacagacaaacacgcagccacaacaacgggcagcgcaacaagaagaacaagggcaaaaccaacaaccacttcctttgcgtcgttccgaacgaacgaggaaacgtgttcgttttcttagtccgacgcacactggacagagttacgatcactgataaatcaccacacacattaccccaaaacaaaatcaaatttttaacattttcacttaaggggggaggtgttgtgtagtgaatttattatatatttaaattcacgccaaaatgat

SEQ ID NO: 9717 - DNA, 1147 bp, Heterodera glycines
atgttaatatttgggatactaatgtccattggtgaaaagttgtctaaaaattaaaccccaagtggacccataaaatacaataaatttttatgcaaaatatggagtcggtggttcagttggtagtgtcgctgaactgacaaaaaattatttaaaaacttaactctgctgaatgcctaaactgtgacaatgatgccattgcataattgggtaatttgcgtctgatcgtttatgatgcataaatatgcaacaatttctgagtcacagcattcttttttggaaaaatttcattcaatttttagtttaaagaatgggataaatcctctaacagtcagatttatagtttaatattcggatcaaaaaaggacaaatgtttgattcccgtgataatgtccaacttggttttcagctgctctcaaccaacgaggacgggttcatttcgctgatggatttggagacttgcgacaccaaggacgacctgcgtctgccggtttgtttgttgtgccattttatctgttaaaaattatattattttcccgtcccactttaggaaggcgaaattggtgaccaaatcaaacaggcctacgaaaaggacgataacggcattcttgtgagtggcacattagttacaacataacaagggaaaatgtttgctcgtaactttatgccacagaacccaaataggaaaacaaaccaccaatcattttttggacgcacaaaatatattttaaattttcaatttttgttcgctttctgtcttactaaatttttttgaccctcggaatttcgtccttggccttttaccaaaattttcgatggaaactttcagaacatataataaaccattggcaagaaaagaaaattggattttcttcagtcagttaagccaccgaattaaattccccgctggttcgtttggaattaaagccttagaacaaattgtatcttttgcacaccaacgctataaattcccatccccaaacaaggtgtcggtggtgactgcgtgcggtgaggaggccatcctcggctggaagttcatgccaaacaaatagttggaggacgacgacggcgatgacggagggaggaaggaagggagacggacagaaagagaggagagagggtgttggtggtggtgatgtgatggttgttg

SEQ ID NO: 9718 - DNA, 2870 bp, Heterodera glycines
aaaaatttccgggagcgggatcgtgagttcaaaattttccgggacgggagtcccgaacgggaatcccgtaaaaatcccgctcccgttaaaaatcccgttcaccgaaaaaagcgggagtcgggagcgggactcccataaaatcccgcgggagtcccgatctcgccggactctaaatttaaatgccttttttggcgttttgtttcaatttgataattcacgaatttgagtcttgcgtttttcaagctgtgattcaacattcaacctgcagcagagatccgacgctttattcaatcccttttgttaacatttaaatcgatcaaaataaattttttgaaacttttggaaataattggtttaacaattagataagttacacactattttattcctttttttataccgatttttacctcctctcattgcaccgtttgtggaaatgacttcacgagacgatgaatatgactatctttttaaaggtattttgtcttttactggccaatttttaaatagtgcgaggatttagccattctcgaacataaaaaaatacattcgggcagcgggggaacaaatcaaaaaaaaaaaaaaacgacacccaccggcgtgtaattttccatccctaatccacacttatggtcgttttgtttaactttgagtcccccccccccctctcccttacgcccatatactaaataaaatggtacaattttaacaaaaacaaaaaattcagtggttctgatcggcgactcgggcgttggcaagtccaatttgttgtcccgtttcacgcgcaatgagttcaacttggagagcaagtccaccatcggggtcgagtttgccaccagaagcatccaggtttggcttttttcattacaatttgcatacctatatgcatcgttaaacgcaaaattttttggaattttaggcataattcgtttttttgccccccccccaaattgtttcaaaagcgaaccaaatttttaaaaacaaagcctttttcttgtttttttgtgtctgtttttctgttcaaatgggtctgcatcggtcgattcgacgccaacaaaaacaactcaaatttaacaaaaattactccccggcattgcactttaggtggacggcaaaacggtgaaggcacagatttgggacacggcgggccaggagcgctaccgggccatcacttcagcatactatcggggcgccgtcggcgcactgctcgtctacgacattgccaagcatttgacgtacgaaaatgtggaacgatggctgaaaggttttcaatttttccccaataaatggcgccaatttaaggggcttttttcttgtacaggaattatgacggatatggccgcaattaaaaaaataatgaaattttcaaaaactttttatttttttagttggacggttaattgtccatttcggcacctttcccatttggttttacgcccgggccaattttacatttaaaggcacggcaaacattttttttttgtttccagaacttcgtgaccactccgaccagaacattgtgatcatgttggtgggcaacaaaagcgacttgcgccatctccgagcagtgccggtatgcacttttgcaaaactatgtaaaaagcgcccctaaactgcataaaaaacaagtatttataattcgaatgtgcaataattttctaatttacaattttaaacaaaatatttccctgccagaccgacgaggccaaggcgtacgcggagcgtaaccaactgtcattcattgagaccagcgcgttggacgccaccaatgtggaggcggcgttcaccaacattttggccgaaatttaccgtgccgttagcacccggtgggcattttaattttcgctgagtttttacaaattttcaatatctggaaggccggaattaggcccccgaaatgaaaaattttcgaaaaatgaattacaaattttacccaattttctcgctaaatttgaccttaagtttccgggattcccataatttttccaagattagtctcaaaagacaaaaaccccatttttgcaaaaagctctcaaaattaccaaaatcacccttttttctacggcgctaaaattggacctaaaggaccaacttttgaggttttgggtaaaattacggaaaaaaactcaggcgcgccgtcaacagagagataaatgttcacagcaaattttttaagaaaatttcattagtaaatttttgtataaaaacgcagacaagtgccgcccgaccgaatggtgccgatcagcagccagaacaacatcacgctgtcctccaccacggccaacaaggagaagaaggcgtgctgttcctccacctaattgtttgtgatgatggaaggatggtggtgatcagaggcagagacagacagacactactgctctctgcgctttttgtggatgttgtcgtgttttttttgtgattggtattatttattttggctgatcggtcgatgctcgagactctcgtggagacacacaattttcactttgatcagttgaggaaaaattcaacatttttcgaaatcaaagtttaaagattgtcgagcatctgtctgaggggtgacagacggacggacacaacatttcatttattttcaatcgactctttttcaccgcttaaaacatatatataaaaatcggacacattttgactgaatagcaaccgacacaaatgcttttttgtgggttattattttggctttattacagttgacacgaccataaaaaaagatacgacgataaaataatttggcaaatttaaggcactaaaactttttctaaaagcatccagaataaacattcaaaaaattgtattctgaacattagagatcggaatttgaaaaaagcctgtacctgtacctgtattctcga

SEQ ID NO: 9719 - DNA, 1744 bp, Heterodera glycines
gacggagggcgtaatccgtcgccgtcgccaccctccttaaagaagcagcagagagacggggaatcgaggacgaagtgatccgaaagcagcagataaggcaatgaatggaggagcggacaagcgcagtttaaaaggcaggcaaaaacggagcaaaaaacggacagagtgtccatctgccgttcccaggcgaagtgaagcgaaactttgatcagaaagtaaaaaacttaggaagcgatgaaatggaaaaggtctccgcccctccccacaaacataagtaatgggaaaacaaagtgggaaaggagagaacatcaagcctttttatttgtattcaaatggactaattaaatggagcaaaaggggcaatgtttcaaagtgtccgcaaattaataagtattaattaattgtctgtcgcaatttgtaattcttcgtatcatcactcggtccaatcagaaaatgggacactattgacaacgcattcggacagcgactgatcagtggccctccctccctcctctctctctgatctccgccgatcagtccctccgaatcggccgtgatcagtcattcgttcgctcgtcagcttctgcctcttacgtcgtcgcctttcgccgcgcacaccacgaccatctccttgagaagtgccaactcgcgtctcatggtgtccaatgtccttgacaaatcagaggatggcgttgttcgggatttccttaggccgttcgacttttggccctcacaatcccggccccttttccggcattgttcggcttttccctccctccgttcgttttgtccgttcccacctttccaattgtgcgttttcctctctgagttctctgaccctttgcgaagtgtgcacttgctccatccgcttcttctgccgcgttctgctcactgctgcgttgttcctcagtctcttcattgcgtagtcgtccatctcttcgttttgttgtccattttgaacctccggcgggacagcagcggaccaactcggctaaaaagggagtcactcgcccattgccatctccaaatgccatcgcacaattcattcgtttccctctccccccccccgggaatggcggagcaggacaaaaatcgcctcccaaaacttcgtgacataacgccgccgcaaaaaataaaataatttaaatcatcaaaattttaagtttcattattttttcggcgacgtttcggccgatgttctgctacaaatgaggtgtgccgttcgtcccaatggtcccttttccgcctccattttcacttgtccgtccgttccgtgtgccgttccgtcctcctcccctctcatttccccccgcatttcgtttcgccgttcgttccaattgtcttccctttggactgtcgtcgtttgatagggcgcggcatttcgtttccgcgcatttcgttgttgtgttgccatcccctcgaagagaataaaatattcaaatcgaaaacgaaaacgaaataattaaaagtaatttaacaaatcataattaatagaaagaattaaaagaatttcactttttattttaataaatttagtttttcaatggcaaaggcaataaaaattggttattatggacgaatttaaatgatttatgataaaaagttgtatgaaaattgggctgaaaaatgaaagattcaatgagaaaatggggaagagaaagggaaaaacaaacggaggacaaaaagtgaatgataaaagggtgcgaaagaatggaaaggaaatgcacaattatcatcattatca

SEQ ID NO: 9720 - DNA, 3453 bp, Heterodera glycines
aaaatgactctgtccgagttacacatttatggtcatcctgtaatcagaatgaccttcttcgttcccttttccctggcatttgccccccccccctccttttccccatttttcaccttttatttttgttgacgttgcgtcttccgtttgcattttgcttcttctcgttgctgaccaactgctcggccacctcctggaacagaatgttcacattggcatcgtttgctgcgctcgtctccacgaaaaaatgaaaagcgttggccgaggcgaaactttgcgcgacatccgtcgggatttccctctcctcttctctgtccaatttgttccctcaattccaatcaattagccctaattaggccgtcaattacttaatttcccactcacctaccaacattctcaacgcccttttgtttgcatattgctcaatttcgagcagccattcgctgatgcaatcgaaggtcggttgggaggagaggtcgtagacgagcactgaaaggggccatgggagacaaagggagggagggaaacaaaggcaaaccgatggcatgcgcagaacggtaataggactgagtgatggaacggaagcgctccttaaaaggggccatttaaagcacttcctccgtcggcattattcgacattcccccccccccccccggctttccacggcatttttcaccccacctgtccggcggtgtcccaaatttgcaatttgactttctccccgtccactttcacgtttttgaccataaaatccactccaatggtcgcattttgccccggcggaaaaattccctaagaaaatgaataaaaaaagcaatgcaaacgcattaattatttggacaaaacagccgaaatgccgccgctcacttgagtaaattttttgaccaaacacgtcttcccaaccccagcatttccgaccagcacaactttgaacagataagcataatcatccatctttaattgggagcagagaaaacacaaccaaacaacaaagcacaccaaaccaacggacaactcagtaccggcgtcccaattttatgaatttatttataaataagttcattagatagtaaaataactggtttttcttaaattgtggttcgaactttttaatttcaattagaaaaaaacatgaaaagacaagaataactcgattaaaccgtaatcatgaaattgttcccgaacagaaatgtcataacaaccaatcgtcaaaagaaaagaacaaacgaacgaagaatcttaaaccaattaaacaaacaaaaatatagcattatgtttagaagtcaattcggatttctacgactttatgagaccacacagattcccttcacttccattccatcggattctcttcgtctccttcaatttttccctcccaattcgctgtcaacttctgccattttcttcgccttcaaaagaacagtcatcatctgaaacagaaagaaaagaaattattgtgctaattaatgctaattagacgaaatgaccgcagcatgaataacgtcgggagtcgaaacgaaacagcagcggtcactgtcctccacaatttccctcacgctttcctgcaaccctttgtcgcaagtgacaaacagcgccatcacacccttaacccgtgaaactgttttaaatgggttttgggtacttttcgggcttgttgcacggatttgaatgtatataaaaaaagaaacaaaaaacgggcaattgtgaagatcataggtcccgaaatttttaaattttttttttctaaaaattttttaaacaattttctaggggtgttttgaggcgctgagcacgaatccggactccatttcaaccaattccgaatccctaacccgaactcgaacatttttcgagaattaaattttaaattttttaaaaaatttctcttaaaacattgttttgtgttttcggggttgtcaactttagataaacgccgtttcaaaaccaaaaaatggtcattctgtaaagatacgaacaaaaaaagaattttgataattttgaattttcgattttttgttcgagttcggatccggcattagaaattggtcaaaatgaatggcagattcgtgatcagcaatcccgaaaacactaaaaacaatgttttaagagaaactttaaaaaaaatttaaatttaaatctcgaaaaatgttcgggttagagattcggaattggtcgaaatggagtccggattcgtgctcagcgccttaaaaccccccctagaaaagcgtttaaaaaatttttagaaaaaaaaaattaattaaaaaatttcgggacctatgatcttcacaattgcccaaaaaatgcagaataatttttgtacttctttgtcacttatttttaaattcaaatcaggcccaaacccaaaacaggtatttgaatccaattaccgtcgagtttttcgacttgccaaattccaccatcggtaagtcagaatgcgtgtccccacaaataagcaccgtccctttttccagggattcgccgagcgttccaactattttcgccattcctttagctttggtccaaactgaaaaatgcattttccgtcccataaaaaaggcattcaaatccacgcaccctttccttgttcgtgcaccatcacttcgacttcgcatccattcgacggcgcaaagtgcagaaactaaatttggaatttatttcaagacattgttgaaaagtcaacttgcgaattcgggtcaactctttgcaccagctgaatgacttcgttttggtatttctgagacagtgcaacatctacgtgctgtcaataataaatgatttatggcgaaagaataaaaaaaaatttaccttagaaacagtttgtacgcctaaaaatggaaattataaaattcaaaaaacaagagaattactaacccaaagtcaaacggtcgaccttccgctggacaccactaccgatgagagcgaaatgggcgtattcattgtcttgcagcaaagtggccatctgatggagaaaagaattgcgcttttcctcatatttaccttttcagaaagactgtccaatgcagttaaacccgcgtcagaaattccttaaaacaataaaattgttggaacgataatcagtgcaccttcgtcatgaacaatcctaaattcattgttaatttattaatatttgctgaacaaatgtccaccgttttccgtcgaaccaccattctcttccatacgagcctccaaatacaattggcccgtctttcggcagagcgatcaaatcgagaatacccgggcctctcagaggacctaaaatatttggttaaaaaatcgtcgattaattaattaaataaccggctgtcagtacagcactaagacgagtgtaggccttgaattaaaaccaaaaaaaaataaaaacgaacgccaaaaaacctgtgaaaatttagccaaactaatcgcagtgtaaattggctgcaaattggttgcatatcgagaacagtaatccttaaaga

SEQ ID NO: 9721 - DNA, 806 bp, Heterodera glycines
gaattggtcgatataggtcccatctttgttatcatcgacatcgaaaacccccagttatttgttttcaggatcctttaaatcaaaaaaaaatatattttgaaaaattttgacccaaaactgggatacatactccactagtaccaaaaagatattaattaatttcgttagtatgaattcgagttttgggaatttcaatattgtcgaaatggataacagaatcgggtacttttgagttttgttcctatacctcaaaattttcttttatattggtgggcacaggaacagatctctatcatgttttgcgaacgggaattggggatgaacctcgactctacttttgattggtcaaattttatgttcaatacaaaattataaatggatattaaaaaatatatatataaactatcatataaactagttaagtacccaaaaaaatattatttgtgaaattactttgtacatcaatttcttgaagtcgtcaatggtgccttggttttgctccatttttgagatgagaccttaacagagatttcttaaataattttgttttttttgttagctatctatccctaccattccagtccgtttccgcatcaactgcctcagaaaaaatagaactatatctgtcccgttggtcccgactttgttgcccatgttgccgttcctctgccatgaatatgatgtcaaaaatgaatgagtcaatgagaatcaaagaatgcaacttcaaaatttgggcgctacttaaaaagaggtccattttgaattttttttgcacttttttttggtcaaaattttttttttgttta

SEQ ID NO: 9722 - DNA, 5384 bp, Heterodera glycines
  unsure (1)..(5384): unsure at all n locations
atcttgtcatttcattacaaattcatattgatgtcatatcctcctgagtaaaaaataagaggaataatttaaagaggcaacgccttaattacaaataaaaaataagagaagatgcagtaatgacacatttcaattaaacaaacaaataaaaattgaacgattttggattcatttaacatttattaaatatggtaaataattagtccgacaatctgatggaaaatgaaattaattaatttactaagcatacaacagaccgacccttagctgaataaaatttttgttgttgttaaaaacagtttttttcctaaaaataattttcctgttagaatatattaaaaataatttgttcccgagaattccttcacacatttccaaacagtgattaatgggacttaattattcaaaactgtgctcaattcgtgcctatttaagctgcagcaatttctaaaaaattattcattttctttggcttccccaaaaatggcaaattttgcccctttttcccccatttttattttccaattaatttttattttccaattgctcggcaccgttttctgtgctactgtttatttgaaaaaacagtacggtgaaaacgatttgtatgttgagtcatggggcaaaacgaactgttcactgaacggaattgacattgcggcgcttggaattggccgaccatgtgaagaatgaccagatttaggtaaaaaagtgaactaaaattcattaaaaataattacatttacataatttatcaggcagtgaattattggggcgagcgaacgcttttcatgcgcgactcaaagcatttcgttgaccgtcctctgctgaaagatgccaaaaaagtcgtcgaggaattcaaaaccatttttgaagtgacggaatggagtaaattcgcggtcagcgaaatgagcgaagcgcaagtggacaaattggccaaatttgtccaacaaaattttggaatggccgacgaagcactgattgagtaaaatttacaagatataaataatggaaataaatgtttattataattaaggcatgttccggaagattgggtcgaatctccgccaaattttaaggaaatcaaagacgaaaagttggcgaaatgggcaacggaattgaacaaaatgtggaaggaaatgagcaaaaaaatgccaaaagacgtaaaattaattataaaattatcttaattaaaaatgataacattaagatggacaacaatgccaaccaaatgcattcgctgattcatttgtccaaccctttctcgttttccggtggccgatttcgcgagtttcgctattgggattcctattggatggcacgaggactgatcgcatcaggtcaaagtgatcaaaaagtgatgaaaatattttaattatttaagggatgacaaaatcattaaaaaatatgtgcagaattttgcggaaatggtcaaccgatttggcttgtgcccgccgggaggacgcatttattacaacaaacggtcgcagccgccattcctcacattgtgaattaaattacaatattttttaattaaacgacaataaatattgtaaaataattaataataaattgttaattaagtttggtcaatgattacttcgctgccaccggtgacattgcgttccttaaggaaataatgccagcacttgttaagctcaatcagtataattatattaaatttaaaatgtcctttatttatttctttaattttcactaatacttgaatttcatttccattagccaaaagaaatggtctttttccggtggatttttcatcaaacggttgagaccattttgcattgcaaaaattgcattgacaagaaaaaccctaaagaataatatcaaaaaatgaagatttcaattaagacaatgattgttcatcgattgaatgtgcactgatctttttgggattttcccattcgttttaaggtccttgtttttgtggcgtaagaatttcaaaaaataaaattttacaaaaatgataaaaatgtaagttaatattaaaaaaaatacaaaatacaaaaaaaattcggccctgatatttttatttgaattattataattaaattatttacatttgcttcttttttttgtttttaaaaccgacccaaatatatttgtttgcaatgctcaaattgaatgttttctccgattcgatttcttcaataaatttggcattgttttgatgcaacgacgaaccatctgatgaattggaaaccgatttaaaatgataattggtatttaaaaatggaaaaatttacaaccatcggccaacaaatcgacaaattcggcagccgtttgtcccttcgcacccgcataagccatggccaacgcaatttaataattttttgctaattttgcattttaatcaaatgatacgtattatcatctcatgcacacgtccctggaaattatttttaattcaaaaacaattaaaaccaaaggtacgaatatattattaaaaaattccgatattacagaatttttacgcaaataattccgttcccattcccacaataagctttagaccaatttgacttaacaaatgggactaatttgtaaattatagtgctaatatcgctcacttatcatgcagttatttactgatttttccagaacattttacactgaccttatcattttcaatggcgggaagtttgaaggtatttattccagatctgatgaaattaaaaataaattggaaaatttaaatttgtgatttttaattaatctattaaatttaataaagaattctttacgcactctccgcttatggtcaccgtaatgccattgaatgcattttcatttgcgcactcccaaataaactgctgcaaattcggtgttggaataccacgggaagggtaaacggagaaacggaagaagtcgaaatttcaaaactaaaatataattaataaaattataaatcaaatacttatttaattatttatggttgatgggtaattaattattaattaatctgacaatattttctattcttttttatttgccaaagtttctttcacctgctctcnaacactgttttcatttgggcgtcacaatttccatagaaaaacgaacttttcggctgctcaaatcaattttcacttttgccttacaatttttgtctgctcctcacgcgacgcatcgtcccaaaagtgcgagagtgcgtaaagagaaattcaaatttaaatttaaattaatcattttcggaggcacagtaatttttaaattgcttttacgtttattttcgtggccacaacgattgagaaaaaattcatccaggtttcattgagttttatcgatcgaaattttatttttcggaattttctttgtattttcgcattttctttgctaaaattcaaattttgctcaaaaagtaaaaaaaaaatcacgaaaaaagtcgcaaaaactaaaaaaagtcataaaaatcccaaaaagtaaaaaaaaaagtcacaaaaaactgcgtgatagaggcttcagacaaagtttagaacactttttaaggcattttaaggccaccatttagagtcagcaaaaaaaaagtcaccaggcccatttgacccaaaatgaggctttttgcccaaccaggttttttgtattttgtattaggaattttcgagtatttaacgacccaaaacatatttttttttagaatttgaaaaatgggttcgttaagactttctcgactcatccctcaaataaagctccccgccccctccccgaaaaagttgaaaaaagagtttacagggtaatctattaggtgaattcagcattaataatcactgatgctaagggctgggaattatatggaaatcctatattttttctgcactgtggaaggcctgaaacgcacgaaaaaaatgtttttagcttggtttgaagcttctaagacggagttatatatccatagtttccatatttttccatatttcgcgatttatgtccatatttccatatttgtccaatttatccatgttttggcatttcagtcaatattttatgtccatattttggcatttccaaaaacctctatttgaacggcccccagcggctaaatttgacttttgaccccaaagaccggaaaattttccaaaaaatcattttttgcaaaattatcatgagatattgaagaaataaattttcttaaaaattagtaaatttatgtaaaatatgcaaaagggcgaaaatttcgcttttcggttgacttttcgctaaaaattattaaattttagggttaacgtgttttttcccctaaaattatattaataacgtatttagccatttttcaacgttttactttacattttgtgaaattgaagaaattttgatccttaattttgaaaaatttatgtccatatttttgcaagtttatatccatatttcgcgatttttggtccatcaagtcacgtgaaaatgctctcaagcatcactgtattcaattattattttttaccacacaggcgaacgggttggccaggttcggtttcaactaattatgacaatggcattagaagccgccttacacattagtgcagaaatgcttgcacttgccgtgtcggtgctgggtcgtactcaaaaaccatcaaaataatttttttttttttttatacaactatgcttaaaggcaaccaaatttaaaaatttttgatatctttcgatgtccctaagttttttctaatatcatgcaaaacttcaaaaaagtttattaaatttcaagaaagttatgaccaaaaatcttgttgaaaatgtacctcgaaaatcgatctttttaaaaaaggaatacactggtggaaaaaagtcttttaccaaacccccgaaatttgttcagtggcgatttttgtaattaaaaaattttcccgcggagcctatcggcaccgccggcccccccccttgttcctcaaaagttctttggaaaaagcacagcaaaaaaatcaacttcgatttttcatgctcagaatatgccaaaatatgcttatttctaatcatggaatcaaaaaatgacatttgaacattttaagcgagttttgaataaattttgtaaaaatgaggctttttgacccaaaatgaggtcattttgcatgccaagtgaggcttttgcaaattttaatctggctatcctgtttttttccccgaaaaatttatcttatttgtaagtgcaaatcgaaatttaatccacaattatttttctttatttttatttttatataaaatcattggggatcagggctgggaccgcgccgcgatgtgcgatccgcgattcgcggcatttttttttgcgcgacccgcggtcgcggccgcggcaaagtaaatgcgcgatgcgcgggcgcggtttttttttttgcgagatgcacgaaattttgggctccgcggaaattttggac

SEQ ID NO: 9723 - DNA, 1377 bp, Heterodera glycines
  unsure (1)..(1377): unsure at all n locations
cccccggccccgggggacgggacaggttttcggggctcaccccccgtccccgtgattcagacccccgcatcccccgccnncgcgaccttcacccccgcgggggcgcgggggtgaaaaatacacccctgagaatgacatattcgtggataaaaaatttataaattttgaattttttttatccatttgacaaattttatgaaataaagttaatttattagtggttagtaattcaacattaacagtcctttttgttatgagttcgacaccggctgacgttttctttttctttttatttttttccaattaatacagggtttttctttatgttcttatttctaagaaatgttctaatttgtggtaatgcattaaaaatacccttaaaaattgactatttttggcatatttgtaatccctaaatttggtcattttttagacaaaatctgtgcaattataccaaaaagaattaaatcgaggcgatatatcgaataaaggaatgtggagccaaacacatcattcaaaaaaaaaaattaatttttgtgaaattttttggagctaattaaacgcaaacccccgcccccgtccccgggggcgagtcatttggtcacccccgtccccgcccccgcgactctgacccccgcaatcccccgcccccgtgaaaagccacccccgcccacggggctcgaaccctacttccaatgcattaaaaaaaattaaattataattagcatcactaataattaaagcgaaacgtccgaatttggcttacaaattagttggcgaaatgtttatgggtgaattggcgaaacatcctaaatcggattaaaaggtaacctcgcgaactgtagtcaaaaagtacctataaattagataatattggatagaccagggtcgacttctattttaaatttttaatattatttgcgaaaccgtgattaacatttaaatttttaatattttattttaccataatagaacgttaattccctttaaaaatattagataagtatggtaaataaaggaagaacttcttaccttttttgattattttaaaacttttttatgaaaatgtattaattttatcactgcaaatttaaaaacaactttgacctccccccaccaactcaggcttgtcgggacctaagtcgggaactcttttcgcttcccggtctggcgccatgaagtttgggcaccgggaagtttgggcaccagagtaagggatttcaaaaaaataaaacaaaataaagatataaaatgttatataaatcattaaatttagtaaatttaacacccttgtgtcttaaaatttatatgctcgtgaaaatcaaaaaaatttatgtatggaaacctagcaatcttattattaagtcaaatcttacg

SEQ ID NO: 9724 - DNA, 2276 bp, Heterodera glycines
ggaataatggactaaacgcattgttcgggatgctttggacgattggtgaattgacttttgatgaataaaagcgtccatacagtgaaaataatggaattgtaatataactcagtaaaactgcctgaaaatgttatttattttgaggataattaggtcgtttccccaaatccggatcagggtgcttggtcaggcacgtagccaggaagggggcagaattctacccacccccgaaatgaaaaataagaatttttcaaggaaaatcatttttcttaacaaaaggtattaaaatttcaaaataaaaatttttttttcccggcggcgcctatcggcacagtctggggtccgggtcgttttcgtacgagcacaagttgttggctaaaatttttttgcaaaccaaatgcaacaatcttggtatcatttggtagtcctaagtgtcctctatttgcctgcaaatttcgaaaaatttcgttacggttcaaaaaggtatggcaaaaaatgctcgaacaaccagttttttaactcttaaattttgcaggctaacacttaaggctatcgaatgatacaaagattgttgaattttgcttacaaagaaagaaaacggcttggtccaccttattacattcagtttacatgatcatttgtctcaaggatttggaaatgtggcattgtaccgcacagatcgatcgctgtcataatttggaacaacagcatgctttttttgttcaaaaaattgccattcttggtatccattttataaatttgttcaggaaacaaatgcgggcccatcattttctagaataaataaaataatattttaatttcaaccaattatttgacatatgaaagatttattgtgttttctacaattatttaaagagacatcgtttatatggctgtcaagaattgaaatttttagaagaaccgtaaaccgaaattgactataaagaatgctttttaacacttcctgcatttataagagaataatctggccaagttttaatttactttattattcaattgttatgaatttctaaatcaattttttcggcactttgacataacattcttcccaccccaatatttcatattggagagcaagcagcagtgcctaaatgcgccgcgagagagaagagagagatagagaaagcgagagagagagacagagaaggaagagagagaatgcgagaaagagagagaaagcgagagagtcggagaaaaaagcgagagagagagaagagagagggggagagaaagcgagagagagagagagaagagagagagggagagaaagcgagagagagagagaagagaaagcgagagagtcggagaaaaaatcgagagagagaaaagtgcgagtgagaaagcgggagagagagagagagaagaaagccatagagagagttagttaccgtatatttgtttgggttcaatgcaatattctccgttcctttcaaaaaatcatttagtgtcggaaattgctcaaaaatcccatcgtaaaattctctccgaatgctaatgaatgagcgaatgtgtttctcaactgaatgcattgaacggattgtttgacagagcgccacacttttgtcactcaaagttgaaggaatttctaccaattgtgcagcaaatggttgatgcactttaaaaactaagtagagaattagtcattaaaataaattgttagtgcctttcttaattccgccaatgaaacgaaataaaaaataaaattataaagtttaaaaaaacaaaaacaaaacctcaaattttccttattaagccttaaaagaaaatattatcaagtttaaaatcagttttattgggttggtaagtccgtgcgcttttttcagagcatgttatttctgctgaagcgttatcgatcgattatgctcatcttgtagcacattcttttctctatcaaatgcactgtgaattagcgaaattaatcaatgtttagcaaagttattgaactttgaaaattgataaaaatgagcacagcgggaccacttttaaaaattttctttcaacaaaaactaaaattagtcggtatttatttatatcatttgaagccctttctttactctatctaatgagttttattcagaaaaatttatcaatttttaaccaagatattgtctgttaaaagtatgtgcaaaagtggagaaaaatggcattttaggcacattttttggtccgtgttacaatttgtcaaaaatggcactccagaagcttgattttgaaattttaccgcatccgcctataggacggatgtggcacttttt

SEQ ID NO: 9725 - DNA, 2068 bp, Heterodera glycines
tttattgaagaatgatgagtgggagcaaattaagagctggttggggtattgaaatgtgctgaagaagcaacaaaaaggttcaccgcagagccaatttcatttgtcattcctcaagcaagagcattacatgatgagttgtacgaaatgaaaattgttaaccggactgtggagacaatcagaacaaccctttattttgcggtcgagcggcgcttttttgggctagcgaatttgaagtagaaaaatttaacttaattttcaataatgtttggtcttagggaatatgcgctagcgacttttttggatgtgcgattcaaggacaaagtgctgactgaaaattccgcaacttttcgcgctcgagtcactgtctggatcaaaaatgaattgaaggaatgggaaattgataatgacctcgatgaactacaacaaaatgaatttgttcgtcctgttatgtcgccccaacccgaaaatccgccagctaaacgacgaatgtcatttttgaacgtctgaaacacattacaggcgcaaacacaagtgaacagggtgatttttggtctctaaaaattaaatttataatgaaattaaggcttccaaacgtcgcaagatgatgacattgaaaaagaaattaaggaatttctcgcgctggaaattgcgaacccagaagcggacccgttagacgaatggaagaaaattgctccccgattttcaatccttgccaaatttgcggaaaaatatctttcagcacctgccaccagtgtcccaagtgaacaaacattcaaagtcgcccgtgatgtttttgattatcgccgttccaaattatcaccagaaactgcagaacagcttatttttctgaacaaatctcttccccagatgaattacaattattgaatcaatttttctgttgattttattaaaattgttaaatttctacatctaattgatgaaattttgtgggttttttcccaaattaacatgcgaaaatttaaatttttaccaacccggaaaccggtgccgggcccggcaatttgaaaatccggtttgaccggttttccggtttgaccggtttttgagagaccgggcccggaaaccggttgcttctgaaaaagtcagcccggcccggcccggcagatttggaaaatccggtctctaattttcactattttaagtgacgaaacgctaaaatagtgatttctagtgacgaaaaacgacgtctaaatgaaaaaattttaacgcagaaatgcgttttttgagctcctttcttcaaaacaattgagcaaaaaaagttttttcactagaaatcggttcccaacatattagccatttttatttatatttagtaaaattttattaatttgaagaaaatttacccttcaattcggaaaatttatgtccatatttttgccattttatggccatatttcgcgatttttggtccatgttttatggccaaatttcgcgttttatatccatataattacaagcgctaatcatcattggttgctctgaactggttgagaaagattcaaaatcagcggctcttaaacttcaaattattttgaagaatattatttgcgaattaactttcgctaaagtataaaaacgtatttactgaattagagcggctggaagtggagagtcgtcatataaaggtaagctgggaatattattcaataggtctattataattgaaaagagatataaaataatattgatatacaggggagtccggttcttagtcataattaataaaaaatattcagtataacgttctatagtggcgtttatattgtggtcagtagagtggtggtaggatcagattcaggtctggccgtaaatgatattcagttacgtccatcggtaattcgtcattacggcgatattttcagtttcggacttccgtaatccgtcatgtcgggggtcaaaaaagtctcgtaattagtagtaatcagtcattttcaaaatatttttttaatttaaaaaatttttagatataaaaaatacaatctaaaaattgttaagagtaatatatgatccgaatatgtgcattgtttttatgaggtgatagtcccaa

SEQ ID NO: 9726 - DNA, 2501 bp, Heterodera glycines
attaatcatttttggacaaatgatcgaatattacctcacctgagatttgcttttaacatcacttttttttcggccctttttttccaaaaaatttttagggaggaaagaagaggggtcccggcggtgccgttaggcgccgccgggaaaaattttgaaaatttgagtgagatttgttaacagattttcaacaaaaaaaggctggtttttgggattactaggctcaatttgtacggattttctttaaaaaaatgataaaatatgtgtccattaaaataaaactatgagtaatcatattttgtcgataggaaagccatgagaatacaaaaagaaaattcaaaatattttaatttctgtagagggattgaaccaggggaaagaagaagggaaaagtcaaggagactagcaactaggctatttgcacaattgttatagttgctttgaaagaatatatttatgattattttttaatttttccctttaaatctaattttcatctctaatttttcactcagacccccattcttaccagtgcttgtttttcccggttcccggttgccctaccgggaccgggaccgggacctgagcttttcaaaatccgggaccgggaaccgggaccgggacctcggatgaccgggaattcccggcccggtcccgctctactctactttgaacaaaagtacgaatggcaccaacttttttaatagcaattttaattccttataaaatttcttaattattttttacaattcgaaatcccatatatggtgccgaattttccagccggtgtcgcattttatggctcccaattttcggaaaattttttttcgttgctctgaagctgccggtggagaaatggcctaaattaaatgcaacaatttaattttttttcctgagccttctagttttttatttttagcacctaaaaacaaaaaattttgaaaaaacctattttgtccaaaatttattaacaaaatgcaatgaaaacgaaaaaaaatacctaagagaaaaattttctcaaaaattcatctccaaaatttatttatttattttcttgaaagaagtttaaatttaaaaaattgcgtatctcaatactaatttgccttacttttgttaatttttggataaaactttaagctttacactctaaattgaaatttttaagaaataatgttttattttggcagttttcgagtgagttaacaaattgatatttagcaattaaaaaaataataatttgtacaaacatttctcatcctgtcgatcaatgtggttgggattatcagagtcaattcctggcccaaaattaaacggccaagaaaatttatattcttgatcactattcaaataccattcacacaaaataatggctaaaattaatccacaatttggtgccttttgtccggtcaaattagcaaccaaatccatcacttgacgcaatcaccaaaataatgggatatgacaacaataagacagcaaagagagagagaacatacaaatgacgactgactacacgaacgacgaacaccacataatctcataacactaattgttgcacacataaacaaaattcctttcccttttttcactaattagcgctgcgataaagcaacattagcagcagcggcaacagcggcggcggcattatgtactaacagcagcaggtgtctgttgctgtgtgtctatagccccaggggggatggggcgggggggggcggcgattgggtgcacggacggcagcttaatgagatttttgggattgagcgcgcaccacagcgggggggggggggcattcagcgtcagcaaatgtctctctgtctattgcctgaggcacaattctttgttttgtaattttttagtactttttttttgaaattcctaatcacccattgtgcttaaaattgttctctgtgccttcaaaaattttatgcttacaaaataagaagccgtttttacggtgacgtaaaagcgatttatgctaatggacaattaaattattaaggtaaattaatcgtttcctcctcgtatccaccccctcaatttatgtaattagcggtcctccctccctcggataaaaaatatccaaattcatctacatacacaatcaactttcttgcttgctgaacgggttggggttgatccttcttgcaagacactcacacataaataatgcgccaaaaatgggaagtcgggggcagagaatcagaggagggcttaactgatcagtaccaatcagcatcatcacaatgatcatttgacttttttgatcaacaatcctgatcactttttgaagtgaaaaagtgaattgttgcacacaaaaacactttccatgttgcgcagttggcggggcgcgatttgcttaaaaaatggttgaagccgcttctcctccccatttggaatggggcaagcgctcgcagtactttgacgtctgctgttcgttatttaaacgataatactcaggggggataattatttcttgcaattatagattttttttttgttgt

SEQ ID NO: 9727 - DNA, 2039 bp, Heterodera glycines
ccctcagcgcccaaattggtccgtccgtccttccatctgtcattccccccccacccattcataccaaaagctgatcagaggggagggcactgatcagcattgcacccagatccgggagatcaaattgggcggatcatgcttacacacacaatcatatttgattcacgatcacgccatggataatgtgccatgcctcaggggatttattattaactaacaatcctcagggggtgggcgggtgtcatcccattggatcagcccgggctaatcgagcattgcgataggagaggggagggataaagtatgtagtgatcatcagtatggaatctcatggtcattgtcatcaccgcacaatcggatttgtcactctgatcacccattcctaccaagtttctcggcggagcggctatcaaattgccagtgcaaattggtaaatacatacgtacatgtttaatgcgacacaaacaagagcccggggatttcaaatttgccaatcccgcagcgggaatgaaattcaaagtttttttgcgggacgggatcccatgggattaatcccgcaaatcccgcattttccaaaaaatgcgggattgcggactgggatcccgcaaatcccgcgccgagccctaatacaaaccctggcttgaatgtgggaatgttatggcattttggtacaatacgaaaatttcaaaaagcaaacaattatgcctctcagttgatgttttttcaacattgttttttgatagattatgccatccttaagtggatggcaaaatttatcccagaaatttattttgaataaattccattttttccatcctttgcctgttttaacgaaacttggcccgcaaattaaaaaaaaaatttgaaaaatcttaattagtaccgtcgaccatagtaaaaaacaaacatccgcataaaaaatgacgatcatttatcaaccacaaacatcctctcccctccccgctgcgacgatcagtttcatatataatatatatcctcccaaatatccgggtgctatgatgattagtgtaaaagtgaaagtggaagaggggacaaatggggatcatccaaatgatcagatcacccaccatccatcttaaccgccaatcatggggggggggatcttccccgatcagatcacccaatcgacccctcccccggcgggggaaacaatttaatgcgcggacaaaagccgtgcacaaagtgtcactgctaagacaaagcatcgacaaggccagcagcaggaagacaaatgattctttggcgcaatgatttgtcatcagtgtcattcttctgacagacgacaagcgatcacgacgacattccacgtcgttccacgaccgcgtccgcgccggcgctgagacagcacaagcgcttcgctttgttggtgccatgccgcacattgcctcgggcgaaaagccgattggtgcgcgcgcgggcgtgcgcagagggcgccaatggcgtcgccagaatttttgcgtgttggcgctgagacagcccgaaaaaagcgcttttttgggcgctggacatttgagttcgatggcaagtttgccttatggaaaaacaaaaatttaaggcagaaaatgatgccccaaatgttttcagacacatttaagaccacattttttggcaaaaagtaattttacctaatggaagggtaaagtctttcaattagtgtttcggttttctgtaaaccgatcggttaccgatttttaccgttaccaatttattacgggttttatgttaaaattgacttctaaacggatagcacagtaatttacagtgttttatcagctaaattttaatcacggtcaatcttaaccgctgcccgggacattaattagtaacaaaaccatgtagcaaatacctccccccccccgttgatctatggatagccacgccgaaaaatctgtccaattttttcgcttattcacacatttaaaaagtgcccccgccctataggagagaggagacccagtttagcgttgtagggcatttctccgccaaataaatcactcagtgctgtcccgattttctac

SEQ ID NO: 9728 - DNA, 2133 bp, Heterodera glycines
  unsure (1)..(2133): unsure at all n locations
ctcgncagcgggatcagcaaatttggaatttccgggctcggattcttgaaagactgacccttacaaaatcctttttaatcattttaaaaagcttcatttgactcaaatgttttcccctcaccaaaattgatgaccctcatcactcagaacatttaattaatttatggattggtcgccacttttcctgttgatcactttgaaaagccctctctgagagggaagcggcaaaacttcccgcagagcatctttgccgattgccttcctgttgtctaaatttgttgctgctgctgtcggttgattgatcagcagcagcagatcacccaacaacggcgggaggagaagcaaatccgaaaaattgagcaaaaaatgggtggatttggggggggggaatgaaatgcaagcggatgaatgaatgaatgaataatgttcatttcttcgcctatttttctcttcctccattgtcatcacataaattcctcaacatcaccagacagacagacaatcactccaattcatttattgaatgcctaattggcttaacaattccattccatcaaataaaaaagaatctcttttctatctaaaaaccaaatccttttaattgtaggatcacttttttacagcaaaattttatataagttgttcatcagtctaagttttcggccacaacttgcatgttaattttttgagtataaaactgcgtctgattaaaagcaaaatttaagtcttggcatttttttaatggtcagaaccaaaatttttgtatttgcatttcttttctgctcaaacccaaaatttttgctcattggtatctcatttatagtcaaaaccaaaatttgcatcattggcatttttttttgatcagaacccaaatttgcgtcattggcatttcttttctgatcagaacccaaatttgcgtcattggcatttcttttctgatcagaacccaaatttgcgtcattggcatttcttttctgatcagaaccaaaatttgcgtcattggcattttgtttctgactagaacttaaatttatatttcttgggcatttgatttctaatcagaatcgaaatttgtggcttggtatttcttttctgatcagaaccgaacttttttcatccacttcatttttccactttttcttcataaaaagtgctgatcagaaaaaactatgaccgcatcacattcattgttttggctccgatctggatccgccgaccgcatccaaaatttattttataacaatttgctgtaacagaaatgtcatccatccgttcagcctaaccgaaaatcataattaattgccgtgatcagcttttgtctaagtctccccccccccgatcagttctacttttgttcacttttcgcttctttatttgttcctaatccgcggcgacgacgtccaccgcgccgtcaaaacttccaaaattcctcggtccgaaaaacatggccgaaaaaatgattggcggggagggggacgacgaattatataacagtcaaatcattttccacccccccccctccgaaagttcagcgaacactccaaaagcatattcactcactctgtctctgcctttctgcccattttgcctcccctccccgtacgtgttcgatcagcacactgaaaaaaggatcacccccatcccttccccctgcccctcccccgccgcccgccgattagcagcaaaaacaaatcacccccgccccgcatatataaaagctgatcaaccctagcccatccattcatcgtgtccgtccgtccgtccgtcccgcatttcatatcactacagccacaacagagagagcccaacgaacatcatcatcatcagcttgatgatgatgatgaaccattatgaccaaatttttacacaaaaaaataaaaaggggagggtgcggggggaacggagactttcgacttttcctcgccggggcggcggcgtcgctggtggacgactacaggtttcggctcggcagaaactaacagcgagcacacatttatatgtgcctgccaacttttttgaggggacggggcggggggagatggggcttaatcccccctggccccctctccttaaagccagccgcttttcccctctggcgccgtcctctcttcctacgcccctggcctccgcgcc

SEQ ID NO: 9729 - DNA, 5313 bp, Heterodera glycines
cccaaggccattgtcaaccactccgatcaggcgccatgcgcgtgttcgtgcaaaaactgccgaaaaagcaacacaaatggactttacaactaccgacaatacaacaaacacggatttgacaacgatggacaaggcaacggacgtggatttggcttatgaggacgccgcgacacaaaccgagcagttgaacaaacagctgaaggagcaggaacaaacgatcagctttctacgactgcagctccgcaacagagacgcaatgatcgccgatctgcgccgtcaattggaagagcaagcgcagacgaacccgccaacacgtaaaattctgcagaatttttagagccgtttatcatccaaattgtttttagcttccacacggtgcaaaaagaatgcgactacattggagcggacctcacggcgaaatttggtcgagaaaatcgttgatgtgatcgatcgagaccgctcccgatcagtgagccgatgttcgctgcaaactctacatcgtgaagtccgccacaaattcggacactacacaccaatgaagaaggaacaactcctacaacaacaaacaatccatggagaggatgggctgcttttgctgtcacaactcgggacccaaaaggcttatgtaaaaatgttttgcgatcaatcgaatttgaccggataatcctggcgccttttcacgtcttccagggcattggaaatgcactgatcaaagagctcgaaggatcaactgaaagcgcggaaattgcgaacggatttttcagaagcatcgcggccaggagagaagcgttcagaaaaaagacatgacggggaatttaatcagaaaagttctgattcatgctgaccaattggagaggctttactcagctgaatggcctcaaattatttgcaaaaccatgggacacttggcaaagatacaaacttttacaaaagtgctttttattttctttcttgaaaataaaaataaaatttaaggcccagccactgtcgccacgggatttggacgaattggaaacgtcgattgatcaatttcggacatttctcaacgatcagccacggatgcgcactttgctcgccttaaaacctaaggtccacttgctgttgaaccattttgtgcccttcgcccgacaacaccaatttttggcacttttggacgagcagggtcaaaaagcattttgaaattttagcccgaatttttttaggcgatgaagcattgaattcggtgtggaggcgtttggaacagctgtggaaaacaatgcctgacgaagaacaaatgcgtcaattgttggagcaccattttgtctcaaattggcttctcgacacgggaaagctcgacgaaatgaagcgggtcagtttggtgaaaattgggtttcaaataaaattcccatgcctcaggaccgtgaagaacaacaggaacaaatcggaggccgggagagcgacgaagaaagcgatgtagaagaagaacaattcgattttgaatagacacagttcgataaaaggtttttcttcgtttttacaggaaataaattttttatttaattttcgagcttcattaaaaactgtgttatcatttcacttatatttatttgctttaaaaacctcaaaatacagttacagcatgcatgggactcgaacctgagacccccccttttggtgactaactcacagaccactaagacgaaaaaaccaacttaattgtacttggagcccaaaattgaatcgcagtgttctattgagaaccgcccacttcggcgcggtttttcagcgcctcttataacatgacttttcggtgccgtcattggaatttaaaagtttttgaaccggtttgaaattcgaaaaattgagtgaaaagggggctcctggtcttgtaaaacggtcaatttcggacaaattcggtatcattcgaaagctcttgatgagttaaatctaaaaataaagtacggtagccatctctacacatttaccaatacaagtgccgatggaacgactaaagagttcaagaacatctgtcgacataaatagaatccaagtcacatcattgcgcaaagttacgacaaccatcaaaaggcgtgcagttgacacgatggaagcgccccctgtaatgcgtgctacttctcttcaaagcatcagttcgcccgcactttcagaagtgccgtaaaaaaatgccagcaatttcatgttgatgaacacgggtcgtccgagtacagatgggtcgcaaacggaaccgcgtttcaaagccgaagcttggaatgtctacgagagaacgctgggcaattaagacaacaaaaaatttttagtggatgatccgttaccatcacggatctataacaaacatgttggtgctatatatttcagtctgtaactgcagaattcttatggaaatataaatatattccttttattgagaaattttttatttaatttaaaatatttgcgttttttggtgaaagtctcttaaaatgaatgcaaaatttaaaaaatttcctgccggcccaaaaaattgcctcaaaattgattgcaaaattaggtcacttttggacaaaatctgttaacaaagcacaccaaaaattaaaaattttccccggcagcgcctgccggcaccgcaggacccacctcaaaattccacaaattttgaaaaaagcccgggctcggcgggcgcccgacaaaattttggaccgggccccggaccgcccggtaaaacgggctttttgaccgggcggcccgggcccggtgattgtctaagccggagccaagaattttcaaaattctgactctaatgcctattttggaaaaatttacattcttaattctggtttaacctctatattcgaattgtctaaaaatgtttttatttaggaaagtttctcgtgaatatcatatataaaatatttaaattcaaaaatcagtaaagacaaattctgatagcttaatcggatcacaataacaaattcttcccttctctgcaattctttctcaacaatgcactcatttttcgtagttccaacctttccaaatattgggccatcccttctttttgtttcaaatagatcactgtcgggtccatactggccaaaaggcatttgtccaagcgacagccgcggcatcgagttccatctgaaaaattataattaaatttaattttattactatttcttttagattaatcgttttttaacaacctttttcaatttggcagtttttcgtcccataacaattgaacaatgttttcttgagaataatatgacgaaagaattgcttgcagccttaatttataacaatttgtcggtgggggtcggtttagtctggccgttttagtctggccagtttagtcagagggtcaatttagtcagagggtcggtttagtctgacaagctgtttttgtccataactcttacaaatatttttttgttaattatagccgcctttgttcagtcaaatttatattcttcaggcaaagtaaaacgttaatttttcacgtttttttccatagaaggcttcaacggacttttgctttttcatatccaactgtcttccgcttcatcaacacaattcgatatgagaaaagtcatttgatgcagacatcgcatgatgcgtcgctggtgaagtcgtgcctcaaaaaacatgcaaatatcgtgccgtcgatgcgagaattctcgactattgcagagttacaataacatcaacaatattaatcctgctcaccaaaatgatcaagattaccatgccaacttaatcccgataatatcatcattttttagttgagatttctccaaattatgaaatacgcctgtattcatttttcaatgttttgttatttttttcgttgaaaacatattgataagtatgttatggtgtcatatatcatcaatttgaccaaaagtgcgcagcattataaaaaaaataatgtgtcgaagcgaaaataaaaaaaacaagaactgcgaagaaacagcagacatgtgagagtcagacactacataaaaattaatgaaaataaatgcgcacagtgcgccaagagaaaaaagtgataaaacagtgatttttatgaaatttctaatgcttttaacttggtcattagtaaaccaaatagagcaattttggtctcattttgaaggggaaattcttaagaatatgtttaactatcgtttttacgtaccaatatcatttttaacctttaaaatgacggtaatttattaaaattttcacccagttgaaaaaattttccctatgttcaaatgttcttgtaattttgcatagggccatattttgaccccctctagcgattccaagtttatttaatagaacttgtttttaactcgagatcggctcttccgtttttacaagggaaattctcgacaatttttgaattagcgtggttttttggcgttttgtctgtgcggacttttggtcaaattgatgatatatgtggcgttaaattaaagatttttcgaaaaaagcagaattgaatcaatttaggacaaaaacagcttgccagactaaaacggccagactaaacagatccggtccgaaatttgtaaataaaaatatttaatgtatttaaaagagaatctgctgaacagagattttcattcaaattaagattggcagtttccgtccccgttgaaaaaaatcctttcagttttcttttctgcagaaagtgctgtactttcgccgactccctgattcacactcacatttaagtatattaaattataaatattcttttttcgtcactcactttcgcaacatcggattctgtaataacagtacatgcttttccttccgcacactttgcattcactcggatgccttttcggtcgtcccaccactttggcattttgcccttccgtgccataagcaggcatcattgatgaattttggctaaaattttgtgccactaaatattcaattgctgtcaaattgtcccgttgtgggcccaacaaaacacgatggatgaagtcaaactccttttgggcagcacttgccaaagacgatgattttaatcggctaaataataattctgctgggccactttctccattaatcgaaaaatttataaaattgcttagaaatttaattttttgcgtttgttagatataaagcaaagaaggaaatcccaatatattaacctcctatttctttttggaatggaatctgttgtagattttttcagttacttattgattgtaatatctttattttattgatcatttaaatgcaaaataatatttggacaaagcaaagggaaaattttaattattttcttttcaaaaaagatatattgaataatcaataattaactgctttttaaatgaa

SEQ ID NO: 9730 - DNA, 4601 bp, Heterodera glycines
  unsure (1)..(4601): unsure at all n locations
aagtgaaaagtggtgggcctctctaaaaaattttcaccgggtttaaaaaatctagaaaaattagtaagcatttgtagtgttccgatacgtatccctgcaaaatttggtgagccgctgatcaattacaaattatttatggacgatcaaattttttgaatttttttaagtgcaaaagtggtgggtgtctgcaaaaaattttcaccgggtttaaaaaatctagaaaaattagtaagcatttgtagtgttccgatacgtatccctgcaaaatttggtgagccgctgatcaattacaaattatttatggacgatcaaattttttgaaattttttaagtgcaaaagtgaagggtgtctgcaaaaaattttcaccgggtttaaaaaatctagaaaaattagtaaacatttgtagcgcttcgatacgtatccctgcaaaatttggtgagccgctgatcaattacaaattatttatggacgatcaaattttttgaaatttttttaagtgcaaaagtggtgggtgtctgcaaaaaattttcaccgagtttaaaaaatctagaaaaattagtaagcatttgtagtgatccgatacgtatccctgcaaaatttggtgagccgctgatcaattacaaattatttatggacgatcaaatttttagaaatttttatttatttttgcaaaattaattcattttttttctgttggccacacttgagtctgggcccattctaaatgcggtattcctgaaattaaagtgatcgatcataattgtgcatttaactgggccataccaatgtctgggcccattctaaatgcggtatttctgaaaattaaaaattttttgaacagttggccataattatgatcagcatatgtgttcatttggctgggccataccaaagtctggcccattctaagtgtgtcctgatcattggcaattgatggtgattgattgagtgatcagcggaattgattaggttccgctattcccaaattggaaaatgagcaaaatcttttttaaaattgtttaaaattgatctaagcgatcggaataatgcaaaatgataaagaaagcattaattaactttttttttaatttgattgatcaaaagtcatattgattattttgcatgccactttcaaatagtctaatttcgaatttatacaaaaaatcactcatgatgaattattgaattgaattgtttttaatttacctgcaaatttttcaattctttaaatcaaaatatacataaatgaatttcataaaatttgcaattttcttttgtcagtaactttttaattgatttttgcaatttccaaattgttaaggtttgatcactttttgaccaattgatcatttttttatattatagtaaaagattgaccaatcaatcatccattaattaattataattacttctgcgagttggggttaaatcatgtgataatctgtgcactcattatgaaattcttatgtaatactacagaattttcagcttgaaataatcattcatttaattttttatttgaatatttttatgcaataaatctttttataattattatttaatgaattattaaaattaactcaattttatttaaatatccaatttttttttgattaaatataaaaaacattaactgagttacatattaaacaacatttatgacattttttttacttcctcttccgggagaataaacagattaaatggatgacgaaaatccncaagaagaaaatgggaccaattggtccgtcgtcgtccgatcattaattccctgtgattttcttcgaccaaaagacactcaattttttcactttttgttttaattaggtaattaaagagaaacatttcaatttattaaaagcaataaattaaacaaatttaatttgtttattttgaagctgcttttttatttcttttgtttgttaaaaaaaaattaagtcgacaattttaaattatttataaatttaatttttttccaatcagaaaaatattaaaataatgccataaaaagccttaattggcattaagaattctaatgctttaaaaaaaatgctcaattgacatgaaaaatatcccttttttaattttattcaaaaaataccaattttaaaagattatttttggtccaaccaatggaaaatttgaataccttttacgtaattttctattttaatcttttttttatatctaaaattcctttaatttccaaccccaattaatcatctattattaattgtgtattgtaagaaatgtgcgaaaatgaatgtttttcccgccgggtgcgccattgctatgtcacgaaaaagcgttaggcattggcactggcccccaccatatgtgtgaaaattagttttttttcccacattacgcctgtagtagctgcacttttcgcgcacataatcaacagagcggcctccgtttaatcacaatattaacactaattgcgtcaggcgaggaaaatatttttaatgagtttttatgcccccggggaaaatgagcattttccgacctaattagccttttcccgctgcttcatcatagtccattatacatttttgttcgcgttttaatgtcacaaacacaattcataaattctcagaaatttacatgactcacaatcagacgattttttaaaatcagtttgggtaaggtcgaaaggatacaaacggatatttaattaccgatttgttggatctcaaattaaattcctttatttttatccaatactgatatgaaagtaatttgcttttatgagaattgaaagttcaccctatgttcaagcctttttttcaaaattgggaaattcattccaacagcgcaataagaaatgggcaaaatgttaggcctcgggtggggatcgaacccactcgtccaccctatcttgtgggtaaccctaccacttaactaccgaggcatatccgccctttttttctgttatcatattaagtttttaccaaaaatttaaattaatttttattccataaattattatttaatacacaattaggaaaaatatataaataaaattttaatgcatattttttacttgaagcaaaattacatcaacaaatatccccttttcaccactaacacaactttttaaaaaatcactctcgcctcactcgctccccccccctaaaaaaatcgtatatttttttggctaatgacaaaaaaaaaaaaaattgcccacccctgtcccccgccgaaacaaaaaaaaaaaaaaaattgaaatccaaccctccgagaattgacgtttgcgaccttgggacctcgctcgcttagctttgggcccattctatttttgctttttgagcgagagcacataacctgtttcttcttctatggaacgtaatttgagcacacacaaccccagcaggcgcatttacatagtgaaaatatataagaaaataatttttttttaacctttcttggccacacaacatttggtcattgaacacacagaaaaatgtgagcctttttggccacgcgccatgtgccgtccgccccctacaggtggagagggggcagggtgtcatagaacatagaataaaaagaagaagcggctgtcaccaacaagccatcacactaattgctttggttggccgtagtcgtcgtgtgtcagcaattttaatgggttgtgtgagtgaggagctcaatgaacagcagcaaatggaaagcggtgccgaaaaggttaagccaaccaaccaacaacagctgtgtgtgtaagtgtgccgattgtgagagtttgtgatgggtgggtgacacagaactaagcaaccgaacactgccggaaaatgaatgttttttggcttaaattttttttgatttttgattccctacttttttataatcaaagtttttttaaatgctgtactctaattttaaactattagttattcatttaataatataattagggctaattatgattttttttttggtgaatattttgccatatcagaaatctcatttgctcagaacaattcaatgatttgactgaattttgagttaaaaaaacatttatttagcgcacattttcataaattagaaaatccacttgaattatatgtaaaaaaattaaagaaaattttaaattttgtttaggagttccgaaaattttaaaaaatgattaaatatgataaaaaaaatcccgtgaaaatgatggattcttcaaataatataaatatttggaaaattccttcaattttcattcctaaatattttttaaactttaatgtgactcaccctttaaaattgcattatttttatgaaaaaatagtttaaaaaaaataatttccaatttctcatatgaaatcagaatactttaaataaattgttaattccttgtaaataaagaattgcattttttccaccaatttccactccaatgaactatttcggatatgccattatgttcacatgccatacttttacaagaatgcatttatggccataatgataacacttttcctaagattttttggccaaccgccgcccattaaggccatttccgtgcacaaaaaatgcatttcctgaattagtggagcgtgtgacttttggaggaattagcatgctaatatatgtaagaacattaagtata

SEQ ID NO: 9731 - DNA, 3616 bp, Heterodera glycines
  unsure (1)..(3616): unsure at all n locations
attttcttgccatttttagacttaatataaagccattttttaatttaattattaaatttttntggattttcaatattttttattatttaaataaattagttaattaacatattttccatagatctgctttatttaagccgattttgactcaaaagtcattttttaatttgaattatatttttctttttttggttttcaataaattttattaataaaataaatatatatgtaaattattttccatgactttgctttattcaatttttgctaatttaatttgagccacataaataatattaaaatgtttttcccaaatttttttttgtactttgtggcatttttcgctgaatttttaagcatttatcttcccccaatttttcgtttcacaccctttctatggccttggcaaaattccatttataatccatttatgttttggcactggccggcacataatttggtttttcaacgtgccgaccgtcccttccttaacccaccatgtgaccaaattttttttaacaaaaatcatttttaaaattaaatttaaaatggaaattggcaaaattagcataaaaaattcagaagaaaagttgtatacatgaatgaactttctttttacatatttattttacataaagccacatgcttttcgggtccaatgttcacatatctttaatccatttccatttttaactcaaataaaattgctctaatcttcaaagtttaaatccatttccatttttaactcgaacaaaaattgcttttttgaatatttaattcctctttaattgatttggttcattaattattaatcagcctattcccataagtcattttaacttttaatctttggcagtatgagaaaatgttagaacaattttaattcttaattcacatcttcacttatgtatgtatgtattggggtaaagaataaattctgtcatagtgtcctaaaaaattcatttcaaaattaatgaactcaatttcaaaatctgaaatatgacttattaaaaagcctttaattttctcttacaaattttatatgcaaatcggcaattgtctgtttaagcgatttttaaaaatttcacaaacaattgaatatactcgctatgatagaacttattcctcacccccaatatatggatttaatgggattattctttataaagagtattaatttttgaatggttttttatgaatggatttacattttttggaagttaaaagagagtcaaaataatttttcatgcattattttataaaatgaatagttttatttgattttaaaaagattattttaagaattttgcatgctttagttttattttatttaatatttctaaaagttttcgacagattttatagtttaatacaaattttatttatttattttttaataaattttaatttttctttcgttttcataactttggctttctaagatgggcacttggtttgccgctccgctgcagaatatccctaataaataataagcattttaattaagcgcaaaaaaaagtacacaaaactgagagggcagaccagagaaacaaagacactggagaaacaacgttatttttccgtaagaagaataatgacaaagaaacaaatttaggaaaatattatacagccaatgaaagatgggcacttgagtgccaaagaaaaaaagattgcgcaagactattctaaaagtagagaatgtcgacagagaaaaagacagtagaaaatagtgggtgcggatgtgtgtctcctgcctcataaaaagtgccaaatgccctgagggcatttcccgcattggccacatgccgtaaatgaattggctggggcagggccatgagttgtgagtgagtgggtagcgccgagcggaaaacgtgaatacattctcaatgatacgacaaaaacattttcctcggcagatactgcgcgaatgaaaagggcactcatctcctaattaaggatacctaattagttttttatttttattattttccgttttattacatgaataataattaaaaatgttttctattttataaaattgcttattttttaaatgaaataaattactaatttattaatatgaattatttttaatataataaaagggaaaattccaccaaaagtgtaagcggcaacaatgcccttcttttggttattttatttttgaataaataaataaattttaattttgatttttttaaatgctcaaaaaaaaaatatttttggtatataataaaaaaaaaattccccatctatcatttatttggatcttatttgattttttcttgactaaaaatgaatttcattttttatttaattataaataaatgaaaatttatttatttttgtgtaattaaatttcccaaaaaaaacaatgataaaaatatttttgtttttcttatataaacatttccagtacgcctccctaatcaaattctgttgctcctccaaccaccaccaccttttcaccaatggcacattcttttcaacgaaaaatgccgtaactttttgttttcttcccatttttttttctcacaatattcaaaatgccaaactaaaaccaattcaaatatgatgccgttgttgttttgcgtttgctgcctgctgtctttcggcaacaaatttctctcattaaaatttctgtgccatgaaaattgagctttttctcatcgcctccgcatccctgccggcggcgcggagtgcaaaaggcaaatgttataaaaacgccttaacccccccccccccccctccctccggggccgtcctcgtccaatccaatgacatgccatataagactgataaactggcactttttaatccattcatgccgaaaattgtaaaatgatttttcaccctagataattgttgattttggcaagcaagttttagtttttttcgtgtaattcttggtaaaaaaaaattggtttaaaataaatatattctttcgagtaaaattggcacgcaaatttcatttttaaataaaattgttgaaaatttttgaacatttaatgagctctccagctactcttatatattttgaatttaataatattttcaaaaaattaataatatttataaaaaaaataaatttaaattttcgcttttgttcaaaattaaatttggttttattaagaaaaaattttaatgaataaatttaattacttaaatgacatgcctaaataatttcttttttatttctcaattattttgtgaataaaatattaaaaaaatttttttagatttttccaaaaatttcgaaaccataccttgtgaaccattgcaatgggacaatccatgggcaagccgcacaataagctgaagggagacgatgtgaaaaagttggccaaacagacatactgtatgtttattttttgtaataaaatatataattattatttttttcaatttagtcactgaaaaagaaatccgacaatggcacaaaggctttgtcagggactgtcccaacggcatgctaactgaaattgtaaattaaaatttattttaaaaaattaattaattatttttcattattttaagggcttccaaaagatttacaagcagttcttcccccaagagggtccatctgattttgcagcatatgtgttcaaggtgttcg

SEQ ID NO: 9732 - DNA, 3807 bp, Heterodera glycines
  unsure (1)..(3807): unsure at all n locations
ccaacgataacaacacgccaagcagcacagtgttcagaaaggggacagagaaaaggagtagcagtgcaggagcacagacacaaaacaataaaaggtacaacacagcagtgtgaagagacggacgaacagcagagaaagaggggaacgaacggcacagcgaaaaaggaactaattgactaattagcaacaatgtgcgagccaaagcccaagcaaaataacacacgattagagcatataatttacaatgcgctaatgtaaggcaacttaatttgtaaagcataaaatattttttaaaatggcaacaattcgaagagtaaaactgctagtaaaaaattgttcgaattcatccgggttgcttaattaaattcgacttgtccgatcactgaagaaccaacccaatccgatcagaaggaatgtcggggcatttccaattgtataggtaatattgcaaattgccatctccgatgccaaatttgagatcctccagaattcccttgttttccatcaaatccaaagcattgaatacgtcaaagccaagctgattgtgaaacaaatttggatatacccaaacgaacggaaacaaaaagaaaaaaacgaacatttcttgccaaaatcaacgcatcgttcaaaaggtggctgagcggaacactcccggcgacattgtagaaagaataagccgcctttatgcttttgtggtgggaatggtgcatcactgtggagggaaggctgtagaagctgaccaagtcggtgacctctccgttgttctgcaaaaatgcctttttattgtcccccgtctcgcgacttatcagtcggttttcccacctgaatcatataagtgtaaatgacatcatcgcgnggcaggaagaaatgttcgaactcttcgatggtgaagatggggaccaagtcgaatttggtcaaatatccgctgagcaattcgaaggcgcttttggcagaatctctgttgagtagcgtcaattgagactcggtgttctgaaaatgcaatttacaaaggctgaaaatgttcgaagactcacttcgggcagtttatacaattttatcatacgaggaagcgtcatatttttgccaatatgcgaaaaacttgactcgacgagctttttcgggttcaatgaccggtgccaatacctaaaaaagtaatatgtatgactattatgattcaaaaaaattgctaccggcaaatgcccactggcttaggaatgaaaatcccagcggtgaaagtcgcttgaaaaatcccaaacaaattgactcgtcgggtgatttctttgattagcactggcgccagtcttttggttcgcagctttttgtgcacacaaaggaaatttatttcgacagatttgacggttttgtcataaattcgaattgtggcaggaacagcagcgataaatgccaccaattttccggaagtaacggcccttaccccacaatgccattgttgctgccaaccgtgtggcatcagtgccctgaagacaaaattgagcaaatttgagaaatgcgggattatctctgctggcagtcatttatttattccgactgaatccgtacaaaaattggaaattagtcttttctaaattaccatatgctaaaacctatcgattttgaatttgcagaaatattattatattttcatgatgtaaaaaacgttgaaaaagatgccctaccatcgaatattaccaattttggttgtcctaccatttcagaaaatttttcccataatcgaagcgaaacatattcgcgtcgtcctcaacataattctcggtcaaaagaatgtacagctcatccaattgttcatccgcgttgagatcaatgtcagaccaaataaacttttccaacaatgaatacggatctttttttatggtcgaaacatcaagcggaggatcaatgtaattgttttcggttgttgttgtatcttaattaagtgcaatgaaaaaaggcacaatgcaatccgcctacttaattttgggacgggttgtgtgttccaaaattggtatttgtgatgctttgcttcgaatggatctcttacagccgatgaactggtcgatgccgcctggatgagctgaagcttacgagcaaattccgctgctgccatgtcggaattaatttgtatgggttcgacgtcgttcttaacattttttcgctttggtttgccttttgctgctaaacttttcgcaatttgttgtttttcatcatcattcatttggggcttttcatctgataaatcattttgagtctcatcctctttttgttccaatgttttgtcgtcgtctgccatttagaataaaaatgaaagaaaattttacagaatactcatgttgctgaaaatgggtaatttgataatggtcgaacattaagatggaaatttcctaagttcctttctaaaccttaatttttgcagcacatacatacctacacatccgcattccggatccgaggattccggataatccacaatatgtagcattaattagtaatttagattatagaataaaaattggcataatgtttgtaaattaattatttttaatagagaccggcgtgggatcctgcgcgggattttgcgggtcccagtcgggatttgcgggattaatcccgcgggatcccatcccgcaaagaattttgagttccaatccctcagcggaatccgcaaatttgaaatttccggtctctaatttttaagcttaagctatagcagataagcttggacacggcgattcaattttgggctccaagtataattaagttggttttttcgtaggtggtctgtgagttagtcaccaaaaggggggtctcaggttcaaatcctcctcatgttgtgtgttaatttcaatttcttcgtttaaagaagaaaggaaaaattattttccattaataaaagttttcgtgtcaataaaaatcatattcaaaaagcgttggttaggtacatcatcgataattttatgaaattttccagacttataactcgggcaataataggccaaatataataattttatattcattttaaagagaaaattctggagaatattgtaagttttatttgatttggctttaaatagcgcacttggctaaaaaagagttaaatttattgaaatttttactagggtcaaaaaaattttcctcgggtcagattttcttaaaattttgcataggcccatattttgaccccctctatcgaatcacattttattttttacctgtctagtttttaactcgagatcggctcttgtgtttttacaagggaaaatcccctaaaaaatttaagtatcgcaaagttttggcgttctgattacaaaataaataataaacttatttgcactgggagcccaaaattgaatcgccgtgtagagtaattaaagttctgcttcttcacacccagagaactgatggcaaattcattcatgcaaattatcattgttccttcataatatttgagcaaatctaatacatattatcttaaaatttatgcatttttaaattcgaaaatgggacagaaggaatcccgtcatgcgtttgtcaattgtgccttgataaggcgagaagaatttgaagacaaaattcaggaactcaacaaaaagtttggtccattttttccttaaattctttagcgtaattcagatgtgctgagtgttttgaagaaagtactttaaatatgctctttgctacaaaatccacagaagaacgagggattttatggcagcgttctgtccgaattcactgctttacggtttcactttttgggttacttttaaaatgaatggtgatttcaggttttcgatgaaaaaattaccgaaa

SEQ ID NO: 9733 - DNA, 886 bp, Heterodera glycines
ctctcgtcgttagccttgttgttctgatcgacccaccaaacctttccaatttgacggcagggacgccttttttgaggagcgggggatgtagtgatattttgactttgaccattcgatattattttaatttattatttttggcattttgtttagttatttttgttgagctttttcatttgcgtttttttttagtcgttaattgtagtaatttgttttaataatgattcgtggtaattgcggatatttgtgtgctgtggaataatcttgtttgtgttttaattgtgcagtcaattgcatttattgcgaattgactgagtcggcataattggaaagaagccgaacgaattggtcaaagtccctaataataatattgtccccaatctctcctgtcctaattaaagactgttcccgtgcccctgccctaattaatctaaggcaaataagcagcgaacagcaccgaacggcgagaagtttttactattcaccaacatttcaatcactgggactcaacccaacagcatttcaatcactgggactcagcccaccaacatttcaatcactgggacaacccaccaacatttcaatcactgggactcaacccaccagcatttcaatcactgggactcaacccaactgcattctaatcactgggactcaattctcctgcatttcaatcactgggacaacccaccaacatttcaatcactgggactcaacccaccagcatttcaatcactgggactcaacccaccagcatttcaatcactgggactcaacccaactgcattctaatcactgggactcaattctcctgcatttcaatcactgtgactctacccatcagcatttcaatcactgggactctgcccaacagcattctaatcac

SEQ ID NO: 9734 - DNA, 4319 bp, Heterodera glycines
  unsure (1)..(4319): unsure at all n locations
actcaacccaccaacatttcaatcactggggactcaacccaccaacatttcaatcactggcactcaacccaccaacatttcaatcactgggactcaacccaccagcatttcaatcactggcactcaacccaccagcatttcaatcactgggactcaacccaccaacatttcaatcactgggactcaacccaccaacatttcaatcactgggactcaacccaacgcattctaatcactgggactcaacccagcaacatttcaatcactgggactcaacccaccagcatttcaatcactgggactcaacccaccagcatttcaatcaccgggactcaacccaccagcatttcaatcactgggactcaattctcctgcatttcaatcactgggactcaacccaccaacatttcaatcactgggactcaacccaccaacatttcaatcactgggactcaaccgtacgggggccttcggctccattccagtcaccaaaattcaatctcaccaattcttcgaaacccaatatccggaaatgaatgataaaaccgacagcggctcgaccgcttagcggcctcgcactcttcttttggcattttcttatggcataacagttcttccttgtttcttgactttttcttacgcacaacatttttcttctatacaaatttttcaaacaaattctcattcattcatttaaaatttcattaccatttacataagcaaaacaatatctttcatatcaaaaccaaatcaatttataacacaaacaacaaagaaagaaaaagaaacatttttaagactgttttttacacaaaatgacaaaagaaaaaaatgtaaaacaaaaacatttcattttccaaagcatttatacaacacaacacaatgttaatattataggattttcttagtgaacaaactaaggagtgtcctctttcttttgttaaatattttatacaataaaaaatgggttataataaggaagggatgcgagagaaatttcccattatctctccctttcctttcttttactctcttttcttttccattgcaatttactctctttttttcccactccctccttctcccacacacacgcacgcgtccaacagactgctgctgcacagcagcacgcgtctgttcactgtatgcccctctcacccgccgctgcccgcgtagacagacaatcagacagtgcactatttcccaccatccctccctctaacctctacatcctaggaggagaaatcttttaccttctttttctgtgctatttcttttgccttcttcttcttcttaactatttattttcgtctcttttctttatattctcttctttttcaaaacaatttcttttcatctcttttcaaattcatttttaacgcaaaactcaaacaaaacgccacacaaattcaaacactggacacacacaacagacactcaactttaatatataggatttcagaaaattacaatagttaatttctaaaaattcacacttaaacagttttgaatcgcttaaatataataatataaacgcagtttctcattataggtttttaattcatcatcaaaatataccgcccgaatttctagagagaagcttcagagttttccaaaaaatatgctggtacccaaccacaggcactaaaagaatctttttacaacgtcatttcatttttcccaagaataattggcaataagaaagaatttccaatgttttttggcacacctgggcaaataataaatatgcaaaggttttataattttcttattaaaatacttaattatataatggaatttgtttaattcgtttttcctttttgttgaaaggaatgaatttaatgatgatttcagaaaattaatagggtttatttctaaaaattcacacttaaacagttttgaatcgcttaaatataataatataaacgcagtttctcattataggtttttaattcatcatcaaaatataccgcccgaatttctagagagaagcttcagagttttccaaaaaatatgctggtacccaaccacaggcactaaaagaatctttttacaacgtcatttcatttttcccaagaataattggcaataagaaagaatttccaatgttttttggcacacctgggcaaataataaatatgcaaaggttttataattttcttattaaaatacttaattatataatggaatttttttaattcgtttttcctttttgttgaaaggaatgaatttaatgatgatttcagaaaattaatagggtttatttctaaaaattcacacttaaacagttttgaatcgcttaaatataataatataaacgcagtttctcattataggtttttaattcatcatcaaaatataccgcccgaatttctagagagaagcttcagagttttccaaaaaatatgctggtacccaaccacaggcactaaaagaatctttttacaacgtcatttcatttttcacaagaataattggcaataagaaagaacttggaattgcaatgattagccaccgatttgacttttacgtggacgaacacttcaaaactcgcaaatggacgctgaaaatcatggaaattgggcaggaaattggagagaatggcaccaaggaaatggaaattgtcaatttggatggaaatctattgccaattccgcaaatccaagtgccacgcaaagtcatcggattcgaagccatttcaataaggtgatgagaatgattttttggtgttttcttttttttaaacgattcatttatttttttacagatacatcgaccacaatgtcatcgcttttgtccaccattttcgccaacttttcgccgcctctccaattaatttgtccatcgaaattacgaatgaccgtcgcatttcggagtcgattttgcacaacatttggccactgctcgaaaaaaacattcaaagcataagattgtccgacgaaaatttccgccgtttgcgcaaattggtcccctcatttctcagcgattgtccatctcttcgctttgtcttttcccattttgtggatatcttcatcgaatttccggccgatgacaatgccatggcatcggatggacaagcattggccaaatggcttttcattgcccgtccggacgatgtgccaaaagtgttcaattgttctcttgccaaaacattgaattgggcgtcaaaaattgaagcattgaaagcggtaataaccaaattaattaatttaattgtattccaaatttcccacttttcaggcttttgcctcggcttcatctcctgtcaatttcatcgctgttatttcgttttttcatttgtctgctcaacactctgttgtgccatttgtgctgaccaacgaattgactcgggaacaatttgcgttgaaaagaattgacaattgctatcgttttttgttagtgcgttgtccaattgcgcgagacgaaagcaaatggacaaaatgggagacggaagcgatcgggaaacggtaaagaattgttggcaatcctgaagaattggggtttctatttaaaaatgttttaatttgctctcaaaatcaggttccggggattttcgagggcgatggtcatgaattaggacttcgtaatcgagcaagtccgagttagtttcgtgataaagcaacccccgaaaacccatggaaaatgattttgagaccaaaataaaaaacttaaattttaggggcattccggcgactgctttctttgaccagtggaatctaattgacattcgaattgatggtgaggatgacatcggggacgggtcggtgaatttttttttctaacattcaatttatataatttttcgtttcttagacttctcgacgcaactcccggcccaagtgatcagcngnngnngtgnntgnntgnnttgttgngnngtgttcgncccctttgnnttgcggtgttggnccctgctttgncgtttnnnnnnttgttcttttgttgcggtgntcncnnnttgtnttncncttngtntntntgcctttnggntnnntttcgcgnttttctgnnnccgttnttggctttnngnntgtttnngtnnnccttttngnggtttgccggcgttcttnttggnnncgtggntccgncgtttcgggttgnnnngcccggcntttttggctgggnnnncccnntttcgggccttggtnctcntttgtncgtttctcngtncccggtcccgctccgtngngtccggnnntttcnnntttgcggttcccgctgcgggnctggnnctcncncttttttgcgggccgggntccctcgggnttcttcccgcnnttcccgcgtttnncntttgcgggttcccgcgcgggtttttg

SEQ ID NO: 9735 - DNA, 1113 bp, Heterodera glycines
ggatttttgagagtaaaacacataaaacttaatccaaaaatttaattagtggttatttaaatgattatcttaaggatatattttcccgatttattgcatttttaatggaattttcggaaaaaaacgccaaacatatattttgagaaaaactcaaaaaaaatatgaagtctgagaatttttctcatttctcgcatatcgtaatattttggcataatgtgttacatcacgaaattacacaagtcagaactatagcaaatcgaatttttgattatttttgtgtcacaatgtaaaaatatttgtttgcctttgctaatgcctttaattagttttaaaattcatattcgggtttttcaagagattaaaaaattctgctgtttatgtaaaatatttggtcaaagagaaggaaaatttattaaatttaatattttacataaaaagaatttggaaaatttgactaaaattttatcgcatttttgtaattgattttgtgccaacaataaatttcaaaaaatccaggtccaggcctggatccaggtctcgaggagcctggatttttcctggacctggattttcctggatttttgtccaggaaatccaggtccaggtccaacatggaatccaggtccaggtccaggcttttttcaaaatgttatctctaccaaatatgtacataaaatatgtaagaaaaatcccaaaatatgtacaaaaaacccctaatatgcaaataaaaatttttttaatggtattttttgggaaagaaattccccgtaaagtatgaaatagccacaaaatgacataaaaattacttttttggtatttttaggcaacattttcaaacttattttttctttataaattttcaaaatatgtaaaaaatgaaaatatgtacaaaaatatttgccgaaattttggattttttttttgaggatttccaaaaatttctgtaaaactcaaaatatgtacaaatatgtaagaaaatcccgaaacatgtaaatatcagtgattctttttttatgtaaatacatgtttttttcctggattctccatagcctaattagtaggaaaacactttcttttttgttttgagaacaaaaagcgggaattttattcaca

SEQ ID NO: 9736 - DNA, 3468 bp, Heterodera glycines
  unsure (1)..(3468): unsure at all n locations
agtaggaaaaacactttcttttttgtgttgcgaaacaaaaatcgggacttttatttacatatttggngattnttctacatattacatatgtacatatttttatacatatttgggacttttcgccattttttcgtatatattttgcaatttttgaagattttnaaggaaatttttattaaatgccccaaaaaatccaaaatttagcaatttttcgtacatattttcatttttttcagattttgagaatttatagaaatttcttgtgaaatttagatttttttttgagaaatatacctctaaaaaatcaattttttttttcaaaaacataccaaaaattaatttttaaagtactaaaatgtgattctaggcctatttgggtcatttttattgcattttatgcctatttcaccctttacgaagaatttttccaaaaaaaataaccgttaaaaaaatttttatttacatattttcgtacatatttgggagtttttgtacatatttcatacatattttagcattttttatacatattttatttacatatttcgcgatttttcttacataaaaaaagaatccctggtaaatatgtataaaaaccccaaaatatgtaaaaatatgtaaataaaggtcccaacttttgttcgcaaacacaaaaaagaaagtgtttttcctgctatttagagcaaggagaagccaggaaaaaatatgtatttacataaaattggcagccataaaaattaaatttaattgggtccaaaatttttgagacggaaccggccctttgagtacaaagacggaactgccagacggaaccggctccagacggaactgacccacttcgtcagggattggttgccgcaaaaatattttttcggattcttcaattacagaccgaggactatcaaatatttcggccattttggcctcagtgccatatgaccaatatttaccgaaaaaactttaaaacaattaaaatataagcaaaattaagttttttgattaagtttttacgtgaaaaacgcatccctaaattacctattttattatctgaaaatgaacaaaatcaattaatatttgagtcatcaattaggtaagtttaattacagcatggagatcatttgtgagatcacgtcttcttctgttgcggctgcttctctccgcttcctcctttgccgttttcatctcccgcctcgcctctgccccggtaattggccaccagcttctggaactccgcctccaatgtccgtcgtgcgctgtcactgtccggaatttgtaaaatgtttgccaatgcgggcacatcaaaggttgtgtcgaaggccttaaaatattgagatttggataatcttccttttttctaccattaatgcgccatgaacgcccgagtcgacggcattcgtaacaaagtctccaagacctatctttttcagccatttgatcacccgctcatttgaccagaccattagatctacataattggagatcgtcaattatttaatcgcgtttcgacaaattccctctttttcacctctgttgtcgttttccgatgcgtttcgccgttcttccaatttcttccaatcataattcaatttcttcaggcacacaatgccgtagtgtaagcttgtccttgaaagaaccatcaaaataagccaatcaaaataatgaaaagccgaggataatattttttgactttttcattcaaattcttttcccaccggtgaaaactgtcgatcattttcatttcgccgagatctcctttgctcaaatgctccaacattcgcgaatcaaccttgaaacggaaaaattaatcgtaaaaaagaaaaaattcgatcaaaacaagttgtcgccccgggaggatttgggttccttaatttttacatagtcggggtagaattgggcttctaaatcccacacaaagcgacctcaccaggcactccatgaactcggtgcggtattttccaagaccatgtgaaggcagccattcgttgcgaagccattaatctttcatttctcgattctttcattgactctttttgtcgcctccatttggcattttgtcgctggtgccgatcgccatgccattgagttccgtgctaccgccacattccaagtcggacaacggcatattctctcctccgtttgcaattttccttgaagcagtaaaaaatttaaaaaatgggaaaatctgactaataattaataaattccgtccaaaaattgacaaaaatggatttaacccaaattagcacatgtcgttttaccccgaccgtcccacctctgctcgagtgccatccaatcattgagggaataggaggtgatgttcattaagcattgaagatggtccatccacgttttctctttcgttttagtcgtatcagaattttccaacaacggcacagcgagacgttgtcctttgtataaatacgtcaattgatcggtttggcggcaatgattggcacagagagcatccatcacattttgaccgatactgaaaaaagggttgatgtaaagacagtaggacaacaaaacactcacagcatatccaacggtaatcctttgatcacatcaaatgtaacacgcaccttcgcatcgccaatacgtacaacaattgtcaatctgaatttaaattcatgttttaggcgatgaaattaatcaaaaacacaccgtccttgcgtcttagaactgccgcctattccagtaacttttgtagcgcgacgtttgtcaatgtgtccatgcaggtagtggcggcaaacaaattcatatgatatgactgatcccatggaacctgtaaatgtaaacaaaaaaatgaaaaaaaaatatgcacaagatgataaacacctgaatacaacatgccaaagatccattggccattgacaaacaccaagatgtatttcagcggtctgtaggagtgggctttgatcacgctgtcagtagaagtggacgtagagggactttctgatgaactgctgttggaaggcgaggtgcttgaatatgatgatcttggtgatgaactggatgaacccgacgaagtggatgagccagacgaagtggatgaacccgacgaagtggttgaactggaagtactgcttgaggaatctggtgatactggcacggcaaactaaattgtaaaaacgtctctcaactctcaaaacaccaacaataatcctaccgcttaaattggactgccgcagtgatttcctttcgctttgtaatggaccatcagacattcgggccaaaaatttccattcggagtgggctcgtcgtaaaggaattgacgacggacgaccttctttgcggcacttctgaatacgctaaaacaggacgttataaaacgcgagtttagacaaagaagagttaaaaaaagaaaaaaaagaggaaaaaagaaagtgaagccaaatgatttcttttgcttacagcgcttgcttatatacacattgacacagcgcaatgccagcgctatgggtcaactcc

SEQ ID NO: 9737 - DNA, 1178 bp, Heterodera glycines
  unsure (1)..(1178): unsure at all n locations
gaaaagagaaaaattttttaaaacctaaaaaaactcattataaattccaaattgtcgtcagcagcgcctataggcaccgccggccccaagtttcccctaaattctcaaatttggcctaaaaatttaccaattttcggtaaaaagttgttaaaaattatcaaaatttccaatttttccctggcgcttgtcggcacggcacagactctccctgttggccaaaaattttttgaaaaaacaggccgcaaaaaaaaagcgattttagaagcaaaaaaaaggaggtcgtcggtttcatggctggaacccttcatagaatttcggtgccccttttcaggcatggattaaattattgtaaataattcaattttaagaaaaggaatgctaataaaaacaaattattttttaatcataaatcgattttttttgatcaattttcttgaaaaaaatacaaaaattttcctcaaaaatacttaaaatttagacaaaatgccaaaaaaaagttaagacttttccaaatattttctcgagaaccctactgctgctggtgccgctgataatcatggtggttgtacaactcgggcggcgagtttggcacgccgccgcccccgccggcgccgcctgtcaacgcggcgaccagcaaagcggcggctgttgtcgccgccgacgccccactcgcgttgctgttgctgccgccggtgagcattgtactgctcgccgctgtcgtcgccccagtcgctgtcatgctattgctgctgctgtaataatccgtgacggcgattgttgttgtgctgctgcttgttgttgcagttgctgcagtaccattaccgttgttgcttaacatcgttcgtgcgcgcacacacagactgatcaatcaatagttgattgattgatttattgatcggtgttgtttaaatgatacagtacacttttttgctgttggtactgttctgccctctcaacacgacgtacggtagcgtgtgccgtgttgacacaattctctctcacacaaagcacacaatattatgccggctaagggaacagagagaaattaaccaattaattaaagttgcacgtaatattgngagtgatncaagggaaaatgtataacaaaaagatctatcaaaaattaaattttaattttggcagtgatcaaagggcaaatacctatctaaaaatgatcg

SEQ ID NO: 9738 - DNA, 4237 bp, Heterodera glycines
  unsure (1)..(4237): unsure at all n locations
gacgacaacagttggcttcttcaactgctgctggatggatgctaataataatgggtgggtgaggggaaggggaaagggtggggatgaagccaagagacttttgctctgcaaaagagcctccacaaatcacacaatcatcagctttacatacttatgagtgggtggagggagtgcagcaaaatttggcattttttgcgcccccccccccgccttttcctgcccaaaaagggtgggggtaatgaaggggtggcattttggcattttgggagggatgtgccgtaattgtttcatagggtgccataaatgacagcgcaaatagtgcagaggagaggaggaatgacgtcataggatgggtgcctatcttctcaaaaaaaatatttataaaagtgtattaaattaatagtggctaaatgccatccttgacaaaagatcaaccccgcccagtggcaatctgtcaattgtgggcaggggatgaacaaagggtaaagggcatgttaattgatgatttaagcaaatgtgctggatttccagggtgtgtgatgatggcgaacagcaggaactgtccaggatttcggtttggaggggatacggtctccggggcgacgactttttttttgcgcttttcacgcccttttttgcgccgtgttttaaaaaaattttcggagagtaggggggggggggtggtggtccggagatgccgacaggcaatgccaggaaaattttaaaatttttgccattttttaatagttttcatcaacaaattgctaaattttgtggattttaggaaaaatttagcgaagtttttttttgataaatttggatgagggggatcaaggagggagggccaataaggaaaaccgaaattttcagcacaaaatacatttttacctcgaaaatttctagtgtggaaaaaatatgaaatgtgcaattttggacaaaaattgtcttggaatcgaagcattaaacagagagtgccaaagcttgaaatggggggccgataagacacataaatagggatgggatttttagtgataaaaaatcccaaaataattaactaaatagtgaccaaaaatgccaaaatagtggcaaaaatagtggcgaaaaagttccaaatttaggggtgtaatttcctaaatagctattttttaatttgaaataatttaaaattaaggaaaaagattttattcactgattgcagttacaaaatattttcttagcaaatattgaacaagaaaaaaaaatttgggggaagaatttttgtgaaatttttccaattcttaggggtgtatttttgaaaatttttaggtcgattcttaggggtgtatttttgaaaattttttaggtcgattcttagggggtttatttttcgtttttattgcaattttgggaagttttccaaaaatgccgaaatagtggcaaaaataatgacgaaacgccaaaatagtggcaaaaaattattttagtggccaacttccaaaataatttttttttagtggcaagctccaaaatagttattcctagtgatgaatagtggcactaaaaatgaaaaattttcgaaaaagaatgtgtttttcgtgcatttctcgtccagttaaagccgcagaagaaatagttaaaaaactaagaatcctcaccctacacataaaagggcggatgtgcctcggtagctccgtggtaaagctgcctactgaatgggcggacgattgggttcaattcccacccgaggcctaacattattttgcccatttcttcttttatcaatattatgacaatcgggggacagtgggaagtgaaggggagaagcatccagaggtaaagcaattgaaaagcgccttagaatggtgccaaatttggagagagtgtggcgtgccataaatggcaacagttaaaggaaatgcggtggcataaagtgcctcccgatgcttaaaagagggtgtcacaatgatcattttgggaaaaacaggcacgcccaaatgggaggaggggaagaggggaaaagcatggagagagtcaagggtttgagattgattgatgacccccccgaaagatcagtttttctcgagatttgcagcgatcgggaaagataattgacccattcagagattcatagcaaaagcgggattcacatttatcccaatgttcagacagtatttcctaactcgtcaaatactctcagtcaaagagttgatctaaaaattcgtggactaagactgagaaattgttcctagagcagtccccaaggtacgataattgaaccaatatataattgagccggaaatccgagaccaagataatgaattgttcaccgagaatcgggaccaaaacacaaaaaagttggcattctccaaatcgagactgatgtctatgtggaaaacgaaacatggagaggggaggaaaagcattggaaaggaagaagaggggaggaaaagcattggaaaggaagaagaggggaggaaaagcattaaagcctaaagtgggtgggggtggtgggcgtgtttgttgtgttgacagaaatccaaatctgtgctttaagcatcatatgtggaaggacccgatgtgatttgaagcgacaagccatgccatggctaggagcgggggaggggatgccaacaaaagtcgtttccggttgatcaatgggtacgccattgttggcattggcattttttgccctatcgatggatggaattggcatcaatcaatcacccccaaaaatagtgggggagtaaatatgttttaaaaataataataaacagaatttattcaacaattgcaaaaatatataaaaatatatgtgcacatcagcagtgttcttactgtttgaatgatgggcaacaaaactagcccacaaaaaaagacttagtcaaagaagtatttttaagttgttgatcgaatgcgaaaaggatttcattcgaaaattcttaacaaacaaaaaaactattagtctaattaataattataaaaaattgttaaattgaaaaaatttggggaaaaaactgtagaaatctaccccttcattgcagttttgttttcacaatataataagacaaaaataagtacggtaggcctaaaaaagtacatatttattttaattcattactattattaacagaattttggtcaagatctttgatcagagcagctgatatgatgtgatcagaccgaaacaataaaacatgcatggttcatgatgatgttttaagtgatctgagactgagagagaaagacgaagccattaccaggataataataattttaaactgtgaacatgtcataaggccttacttaccatgattcaaatccatcacataatcagagtttggtttaaaagtaattggggcgcaaaatttttagatttttaaatattttgaaaaatttataagttttgaatacctgggcttttctgaccaagccggttcttaaaaaaacaaaaacaaatgaattttaaaaaataaggacaaattttcactaaaaaattgaaactttcagtttgaaattttcaaaaatctatgggaaaatatagaaaattccgaaaatttgaaatgatttttctactatgtattaaaactaaaaaaaaactaaatttataatccatccttttatccgatccacacacacaccacattattcacacattcgcttcttcgcccgaaaaatttcacagctttttgtgctgttggcaaagctgcttttgtcacacagagattgactttccacgacacacaatcactcattcactaattaggcgacttttaaaccatatttagtaattagtggttaattagtttggtcggaagtaggagaagagatgtgcattttgtgtatattttaggaatttaattcactctgaagaatattgtgctcgctaattagttgactgttgtccaattggatagatcgcccattggagggagtagagccaatttctataactcattagtagtttattcgaaacttttctaattgcttccaaggatgacgaaataaaaaaaagactcgacaacaaaaataaacaaaaaaaaaaaatctttttttttcacaaaaataaaaaaagaagcgaaatgagcataaaattttaaaaaccgaaaattaaaagaaactttttcatggacgaaaattaacgaaaaaatgacaagggaacaaaatgaaaagcgaaacgaaatttcgttcattctgnggggttttgttgcgcgtgatttttcaaaattttatttgatcgggagagcgggagggggggggg

SEQ ID NO: 9739 - DNA, 942 bp, Heterodera glycines
ggggagtggggggggattttttaaaaaatgagaaattttcaaattttcttggcatcccctcagccctggaatttttccaaaggcccagcaacagcattttttcttgctactagtggaaagaagcatggaagaagcatcatatggacagagacgggatgtccggcgcgattttagagcaaaaaatgtgtcaaagattgatgatggtggtggaaaattttttgggagtactcctcccatcgcgcaacccttccgccccccaggggagagagagagagcattaagagtacctgctgctgatgatgatgcacagcccccgaggggtgggcgggggggggggcaacgcggtggtggtggaaatagtggtgatggtggtggtggtaggtaatttctcgaacgacgacgacggacaacccgacccgaccaacacaacgacaaccgacgaccgacgacgacgaccaccttgtgtgcgcgaaattttttggggagcgaaaggtcaacgacagattatgcgcggcgcgggagcgccgcaggggtaaagggagcggaacaaccgaagaaaaaaaaaggaacagcaaattttgggggggggaagcggaaaagcacaaagaatgaatgagcagcagcgagcgcttaatggaggagccgatgggtgggtggggtagtgatgaaattaatggaaaatgaagtgctttgatttgacagcctcatgggactgagatggaaaaactgatctggcagattcccatcgcttcaaatgggtggggactgaattgttcaacgctatgagttgatacaactaaaatgggagggactgaaaattgatcaaatgtgatctggcagagattcagccgtccgcccaaatggaaggggggacttaactggtcaacgccggtttggcactacgaaatgagaggactgaaaattgatcaaatcaaagcggag

SEQ ID NO: 9740 - DNA, 5189 bp, Heterodera glycines
tcgtctggacacaccgactggacgtgtgaatgccccccccccaatctcacctctgtcatccacctcgtgcagaataagcgcctgtttgctatggtcgctcaaagcgcgttgtggtcgcgtcacgtgcccaagcacgtcaaacaaaaaaccttcgacacgtgtgctggtgctcgtacccggtcgtaagtcgtttccatcgtcgttgataggtaatggcaaattcgtggaaatataacctaaatgatagcggcgcgcttttaaaaaaatggggaacgggaggggggggggggggtccggcggtgcagacaggcgccgctggagaaaactttgaatttaatgaatttttaaaaagcgaggcgtgaggggaagggatgtggcttttttacgtaagattccaaatccctcctccgaagaccaacccaaggcaatgcccgctttctcagcagctgctcgctgttcactgtagtcgtacccctcgaacatgtacagcgttcttccctccgcttcatcttctatttgcgcatcatcaatgttttctttgtcgtcgccctgtcaaaaagtaataattatcaaaaaaataaaaaatggtcaacttttatttgccaatgtccgttttgatcggtttgtcccaatcgctcttcaagctgtttgtcggtcagaatgtgaaactgtgtgtgcttcttctgctctttctccaggtcggtgagcccctctagcaaaagtttggacaggtcaaacattagtgaagggcctgagaagatttcaaaaaaacctaggaacaaaatactcgaaaaccttccttttcgtcggttcccaagacattctcggatagcttcagcttctttactgatctctgctttatcagctcctccaccgtatgttttgccacgagacgaatgcttttaacaggtctaaatcgaaaaatggagaaggaatccgaagactttttgttctttatgagggaatctaaagattttgttctttgttccaaagagttttgagaaaaaagtcaaacattttttattgaaaaattcatgttttttttttgtataaaaataataaatataagacccacttgtcctgcccgatgcggtggcaccgtgcagccgcttgtttgtcgttctgcggattgaagtccgaatcgagaaaaatagcagtgtctgcggcggttaaattcagaccaagaccacccgctttggttgtcagaagaaaagcgaacacgtccgaatcaggccgttgaaagttttgaatggctttctgacgatccggttgactaacggttccatccaattgctcacagatgtatcctgtgcaaaaggaaaacttaaatgcttattgtaatgtaaagaaaattggagcctggaaaggcaaaatccaattatgctgacaatgagtcccgaaatatacaaacaaaagcgtgattttcaattctatcaaaaagtttcataaaatataattggggatttacctcgaagactcataatgtcgtacacaatgtccaagaagcgttgcatttgcgtgaaaataaggacacgatggccctttttgtgcaaataagccaacagtctgtccagaatcaatgcctttccgcttaattttggccttcctttggtcagttttgtacttcttctctacctgtcgttcaccaaatgttctccctcctcaaacggttccttttcgattcctcggaacaaataaggatggtcacagcacttacaaagttgcaccaaagttgacatcagagactgtcgcgcctgtttctccgtccgcatgtttttggcaaagaaagctattgaaaaagggggacgggacgaaatctcgccgccggaatctcgccggccgaaatctcgccgagacaaaatctcgccgccgaaatctcgccggctgaaatctcgccggccgaaatctcgccgcagaaatttcaaaaaaaaaaaattcaaacttagaaatttttcaaggaaaaaattttagaaaatttttttataagaaaattccaaaaaaaactatttgctaagtttttttgaaattttttcaaaaaaaaaacagtaaattttcataaaatttctaaaaaaaattgctgaaaaatttttcaacaatttttttatttaaattttcttataaaaaaaattttctaagaattttttccttgaagaatttctaagtttgaattattttttttttgaaatttctgcggcgagattccggcggcgagattttggggtgcaccccttgaagtgtgcactgccgggtaaaaacgtctttccgtccattttcattgcattccattcttccatccatgcccaaatttgcccccttcagatggctgctcagcggatgaaggtgtgctatcgcctcggctcctccgcggttgccgggtcttccactggtgccaatggttccgccgcgtacggtcgcgcttctgccgtcggtagcgccgctgttgcctccggaccgtcggccgatgcggtcgcaggcggagccgcgccaccgccgctgatggctgcgccattgatcgcggcggcggcggcgaatgccgcggcagtggccgccgctgcgcagccgtccgcacagcaacgcgccgttgccgccgccgcgccccaacagccgcagcaaccgcagacggccgctgttcaactcgcactgtctgcggccgacttctcccacctcttccagcactaccaaagtgcaatcggacaactgcagccgtcgatgggcagtgctgcggccgccgtcgccgctaaccaagcggcggcagctcaaatcgccgcagctgctgccgcggcaccgtacgtttgccaaccgttggcggccaccgcagcgacagtgctcccatacggtatgagagtcaacaaaatgaattgcttttgtattctgcttttgtcaaataattgcttccacattcgacaggttccgcccggcatcaaccaccgccccaattttccgcagtgactgccccccaggcgcagtcgctgtcccaattcgtgccgaccgcgatgcatcccttcgtcgacccgttgatcgcggcggcgaccggagctgccaacgccgctgttgcggcggcggcccatcagcacagccacgcggggacgatggtgacgggatcatctgctggaggaaatgcatcaacagcgtctcacgtggggccgcaacagaatggcgcggtgccccaggggtggccgacccaacagcagcagcagggctcggcaaatgccacggcacaaaaccaggcggcgacgttggcacaaaacgcaaacacaactgcggcactgttcccgtgggccatcgcggcagcggcacaacaagtaagctaattgggtttgatttcttgactggtctctctgatttttcaggccgccctgctccccggcgctggcaacaaccccgcgggcgccgctgccgaccttttccttccggcgaatgccgcagccgcggcggcggtgcagcggcaaatggctgctgcggcggcggcgcttcagttcccccatttgttttctgcgcccgtccaagcggcggcacaacaaacggccaaaaactactcacaacagctgcaactgttggcacagatgcaacaacagcagcaacaggtggaggagggcattttgttggagatgagggaacattggaatggacataattcttttttaaataaatgctccgtttctgttacactcaattagcggagttgcacattgaatttgggtgggaagggggggtggagggattggaaatgtttttacattcttggcatttttgtaatttttggcattttgtcccccaggaggaatgggctgcccaagtgctgaacggtgtccggccgatgaatgcgcagcagcagcaaatgctgcaacaacagcagcagcagcaacaggcgatgatcgcccgactcaaaaatgacgcggccattctcatgcaaaattcgttggccgaacattaccttttggagaggttgggcaaaaaataaaatgcgaaaaatattgaaatttggtcgagttttttaatcattttttgtgaattgcttaaacacttaacatttgcctgtaaataaatacctattatctaaacatctaggattttcgttctataccaatttatttgaattatgtaattacgaaaaagttacctaaaaccggcccaaattgatggcacttatggtgccataggcaccattggaaaattagaaattttaactgctgtcacgaaaatttgcctttgtcattgtcatcatccccaggagcaatttggagcatcagctgaacaacagtggcggaggcgctctgctgcttaacacttcgggcatcggtgccgagtcgagcaacggcaactgcaacagtttgtcatcgtcgggatcttttgttgtgccgaacgtcaccggaggggcgagcggtaacagtgggcagcaaaatcatcaccatcagcaacaacatcaacacaacacggttggcgcagatggagcaggaggaggcacttcggcactatccatgtccgctcggaaaagttcgaacgcgcgctgtgcggtcgtccgtccccagcagcagcaacagaatgccgcggcacaccatcatcagcaacaacagtcgtaccagcaaatgcttctccaacagcacgttgaacaacaacagcagcagcaacagtttatggtgtcgacgggtgggagcagtacgtcggttgcgggcggcgttgccaatgcgttcgaaatggccactgctgctgggctggactcatgttacgcgccggttgcgctgcaggcggctgccgcagccgccgcggcagcaaatcgcaacagcgcagcggcggcatcgaacccggcgatgttggcacacatgcttgacttgacgtgcgtttaatgcaaatcatttgcctgtcgatcatccgtatcatcggccccatttgccttttttcagaaacgcctctttgtacgcggaattgggcgccggcggcggtgccggtggacccgcggcaaccggcgccgcctacacaaatgcgccttacatgtgaatgaatgagtgcgtttgtttggcttgtccgtgtgtgcttctaccaaattcatcaattttccttctgtacacaaaatgtcttttttttccactttcctcctcctctatgtcgaaatttgtcccaacaacagaggtgcgggactcgaaacgcaacacatagccgaaagtcggaatttcgtccgtctctcggcctca

SEQ ID NO: 9741 - DNA, 867 bp, Heterodera glycines
aaataattttccgggacgggagtcccgaacgggaatcccgtaaaaatcccgctcccgttaaaatcccgtccaattttaacgggagtcccggcgggagcgggagtaattcgaaaatttaattaaatactcactaaaatattttaatgcacaaatttgaaggacaatccttttattaaacgcagaaaaattataatatgcactttactcgatgtatcgcctgatttaaattgcaacgtacctcattaaaatcattttcatgatcagtgagaccgattttgatcacttttttgctttccaaaacatttttcacggcgcactttttccaaggactttgggccgacatgaaaaaattttaaaaatttgagtgcaattttgttaacagatttttaccaaaaactttgcgattttatagcaagtcgacgactttttttgtttttaaaagaacttttttgggggacaggggggttcggcggcgtcgataagcgccgacagaaaatgtttctgtaattttaatgctatttgttaacagattttgtctaaaaaatgaccaaatttagagcttttgggctatttttaaaaaaaagttttttggggccggcggagccgataagcgccgccgggcgaattttgaaatttaggctctattttttaacagataataaccaaaaaaaattaagattttcgtataatttttgttttctttggtatttttcaaaaatattttaatatattcattttcatgatttactcatgaaaaattgaattaatttaaacgaaatttatccgaagtgagttcaatttgttaataaattatgccatgaatggtcaatttttattcaaaaatgacctatttttgcaattttgagc

SEQ ID NO: 9742 - DNA, 2627 bp, Heterodera glycines
  unsure (1)..(2627): unsure at all n locations
agcgcccagcgccgcgtcttgaaatgttcgtcgacgtaaaagtcaaatcggcgactgatcattgaaatgccaaggccaagttgagaaggcggaagcaattcgaagacacaaagccaacaatcggcggagatgaaactgaaaaaagggaaaacaaaatttaaatttcaaattccaaattattatttttcttttttacatttgtttttttgtttttttgaggcggtccaaataattccggtcagggacgttttcgtaccgccattttcgtaccgccgtttcattcataaatttaatgtaaaaaatgcataaatttaacaataacaaaatgggacaaactagggtcgcatctcatagtttcgggaaataccggcgaaaaaattgttaatgttttcgggattcacattgggattggcataattgtgatcattttgggggacaatattgacatcgttataacgttggacgagacgaagaatccgtgaatcggcatcgcgatacttccttttcttttggggtgcggcttctcccatcatgcaacgtgccatatcagcatcaagcgccttctgctcacatctgatcgtgtcaatgaatcgccaaattgttggatgagtgcagctaaattgccgctgaagtttccgatggaatgcctcggcgaagttgttcgtccgatcagcaccatccaaggtgcgctgatgaacactccattcgtgtgggtcaaacagaggcgccgtcattggaacattgaagcgcattctgcccgtgtagttgtccagaaacctagaaaaaaaaattcataaaactcgtcttcggacttaaccaattgaaaacgccattaagttgtggcggaatttgtgcttgaagagcattaaggccattttgaaggtggtgcacaggcaggaaggccaatgatgtgatcatcttagacttctcagcgaaggcaggatcagtgttgtaaaccttaatgagtttgaatgggaacggaataataaaaaattctaaaattacacgagtgaggccaaggattctgatctgcctcttcatgttgcggacaaggtgaaaaaaacagtagcggacactgcacgccggaagcactgtgcggaccgcaccaaccattgccaactcgaagtccatcgaaattgtctgcggcgcgaaattcggccatcgttccaaaagaagctgtaacatgcgcgtataaattgcggcacacttcgatgttaaaagacagtagcaaattggaaatacccaaccatctctcctaaaaagattgaacattgtgataacacaattaactttactttgccaacaacacataaatttggctgaaaagcggcggtgtcaatgcaaaagtgccgtccgcgtaaatgtctttcatctggtgagtccaatctgccgtagacgctcttccaaaaatgagaatccttaatagtgtaaatgaccatcatttaatggtttaaacgataaatgtcttaccgttggggtccattctgtccgtgaatttgaaaaacgccagtgtccgccaacaggaattgctcatcgtcaatctcagtgcgcttataaacacgataggtattcggaatctctaactgctccaaattgagaggttcgactcgcggtgcattttcatcacggcgcaaacgtttgatgacctgaataaaaagaaaacaaaattttttacaaaattgtttttgatagtaacccaccttttttgtggcatctttgctcggaaaagaggctagcacaggtgtgcatgtgttttgaagcacttgagcacgaatggtcgcaggtgcttgcacgtctcagcagcacgtcgcttgagtccagttacaagacgctgacattccacatgcgcagcgttcatgtcgcacgaatgaactccgaccaacttctgcacaacgttatttaaatccgtgtgcaagcgtcctggattttaaaagattttcaaaattcaaaataatatattagcatacccttgcattggtctgccgggccatgaaactcacaccgccaaaatttcttaagtccatcgttactgaatttgtggaacacataaagtgcaccatcatgcaccaatttatcattatttcgttttgttttaattacttgctgctggttcattttgtagttaataaaagcttaactgtcaaaacattaaaagtaatttaaaaaattaacaaattatttgaatgcaattttttccatactcactcgtacgaaaacggcggtacgaaaacgtctccggtacgaaaacggcggtacgaaaacgtctccggtacgaaaacggcggtacgaaaacggcggtacgaaaatggcggtacgaaaacggcggtacgaaaacgtcctggcccgttataatctccctatttttcgagaaattttaaggtctgccacaaattttttttgatcttttggtcccgaatgtactgaaattgtccttatttctaagattttcttattttcaggcttcacctaaattttttagtttttttctgattaatgttttatttcgctggttttgagaaaaaaaaaactttaaaatggccattcttatgtaaaaaaaaatgtatcaaaaactctaattttcatttttttttccnggtggcacctatcggcaccgccggttcgcaaaa

SEQ ID NO: 9743 - DNA, 1260 bp, Heterodera glycines
  unsure (1)..(1260): unsure at all n locations
aggtcctgggaaaaatataaaaatgtncgggcangacactttggggggccctaccctaattttaattaataaattatttaaataaagccttgaggtcccactatatcagggttcggatcgaaaaattttcaaaatcagaacatcgggtccaaaaaatcagattttggggtcgaaaatcagaacattttgcaaaattgcttcaaatcgttatttttacaatttattcgatcaaaaatgtattaaatattatatttttcacctcccatgatcagacaaatctgacaaatcaggacattttaattttatcagatttggacccttcaaatcaggacaaatctgataaatcaggacagatccgaaccctgcactatatggccaaaaaggttaaaaatttggttttttgaattcttcaggtcataacttttttgaacctcaacgataatttttcagaattttgaagactaatagatgatacttagagctttcgaatgacaccaactatattggatttggttgacaacgaaaaaagctatagccagaaaagtgctggcgcccaactgagcgagtccgcacgaatataatatcagatttgtaaaatcttttattctattattgattttgaaaatcttagatttttgaaattttgtcaatatggtcaaattttgcaccctttcactatgggtacgcgccactgtgcagagaaaagcccagtactgtctcgtcgtttctctttttctttgtaatttctctcactttatcttcattttcattatgtaaaaaataacatttacttcgtgatgtttaacttttttttcccgatgttaaatccacaccaaattttgcaaatcgatagagaaaaaaattctgcataacacattttatgttttatacactattccattgagttataaaataaaacctaaaaacgtatttatttttctctcatttttacgtactatttcaatgcctctaacatatgaaaaacattaattcgcaaattctaacaattttagtttataggctacaaaatcattttggacatttaaaatcaatagaaaagttattagctttaggattttggtagaaagcagctgcttagaacctgagttataacgtaatgaaaatttgaaagtcacacaacttttttctaaaaaatcaaattgcttagttttcgcttagaaggaggttctccttttctttccntttttagatatcccttaagggggtttagttggagatgaagcgagttatggcagatca

SEQ ID NO: 9744 - DNA, 4037 bp, Heterodera glycines
ggaaaaactatgaattaggcccgcaaaaaaaccgcccaaaacggctttaaataatctctaatgacctctaatcatcgtaaaaaatggtcactaggtgcggaaaaatcaaaaaatcgttttttgaaccggttaaaatcacgaaaaattgcacaaaaaatcaaccataaaaaccttttaaataaaaattttcgaacaagtttggtatcattcgaaagctcctggtcagctaagtctgaaaaacaggtgtgaagtcgaaccgatgccatctatgcactgggactactgagtcccagtgaaaatgtacacttcagtaacaaaaaaaataaaaaaaatttcttcttagataatgaacgaaaatcgtttagccttgaatatcgagtattgcgctaaaaaaccgccgcacattcggcttcgcatgctcccttttgcgaaatttttgcttttaaatggtatttcttttggtactgaagtgtccattttcacggggactcaattgtcccagtgttcagatgtcgtcggttctcttagctcatcaagagccttcaaatgataccaaatttgggtgatttgaccgttttaaaaggtcaagtgcctcccttttcactcaaattttcgggttttaaaccagttttggcatttccgcacctctggagtgatttttatgacgattagaggtcattagagatggattggaatcagggctgcacgcaactggatttgcaattacggaaatccgtaatccgtaattacggcgattttatcagttacggaaatccgtaatccgtaattacgggggtccaaaaacaccgtaatccgcaatccgtaatttttaaaaatcaatttttctcagaattttagaaaaaaatttttaaatagtgattaataaaaatcaaaaaactgattttcttgatggagtttcttcattttttatttaaattttaaaaaaatttataattttgtgtctgatcaaatcattctttttgaatttatgggttgatttttgaaaattttttgaaagtctgatcattataatcggatttatgtatatgtatataattatttcaacattttaatagccagaaaaaaattacggggggggggggggaatccgaagaattttttttggtaaaatttatttaatgttatttaaaaaagttcagcgccggacagcaaaaacaggaattgtaaccatttttagccaaaaaaaaaagactaatttttgccattttgtagtcaaaattaaaaaaaataaggtaaaatcgagtaaatcgtggtccggcggtgccgataggtgccgccgggcaaattttttttttaattttaaagattttattaagaaaaatcgacaaaaaaatttaaaagtcccaatttttcctgtaaaaatttttaatttttcatttcgggcgggggaaggggggaattcctcccctcacctggctaaggttttatgaattttcataaaatgcgtgaaaaataggtgtgacataaaagtgatgcctctattttctaggccaactacccaaatagccttaacaacaacaaatagaaaattataaatctattttaattcttaaataaatcgaaatacgggtagccctttaaataaaaaatagaaaaatttttttttataaaaataatcttacaagaaatcgtctcgaaaaataatccaaaagtcaaattacggatcaaaattaaggaaaaatccaaaaaatccgtaacccgtaatccgtaatccgtaactcccaaaaccccgtaatccgcaatccgtaactcccaaaaccccgtaatccgcaatccgtaattgcgtgcagccctgattggaatgcggtttatgtggttttttagcgggcccaaattctataatacagcccaaaatacgaacacgagaacgagaacaaatagggcatacgagaaactagatgagcaaaatccctgtcatagctatgtattcttctcattttataataataaatacgaacactctttctttagcaaatatttaataaatattttgattagcaaaaagtaaattttattttatttagattatgaaaatattcgtaaaaaggttgacaaataggtaggaatgaattgaataaattgcaatgaacgtgataaaaaggatgataccaaaaaggcacaaattagtgagcttattgaaggaagctggaacttttataaaaatttggtaccctggatttagagcattatcgcatgattttattatatttggatcacgaccccattaaaaaaaagaatttatcatctgagccagatttttgaaatcttcatttaattgtccaagggtacctaaatgcatatgtcagtaaattccggcttttattttgagtatttagaatgcatgaaaaaatttggaattaacaaaatgtaaataagatgtaaagatatttaatacacgttatacgaacagtagttatttcgtttattttgttctgttttaaacaataaggaaattcaatttttaaatgtcaaaaaattcttttttataattaaacaaaaagatttttgttgattcgatttataaaccttaatttcgaaaagtcttctaaaataaagtgtatttgaataaagaaatcaaaaaacagaatgtcagaatttgattggtttatgcaaccttacgcttcctaaactcagtcattcaagatcaacacggtttttccaattttctgcaaaaaaagtgtcagcaattcatcgctttcttcactccacaataatgcgacctgtttttgaagagaatatgtgaaatcaaatataaaaatagccaaaacaagaatttcaaagtaaaatcctaccatgattagaacatttaataagtacttaggaaaaacctcaaaatatttaggaaatatcgaaacaggcccaaaaacagaaaatgttgaaaacaaaacttgggtaattttggttggacaaagggaacaatttacccttaaagaaaaaaaattcagatttccttctgaaattttttaaatgcattttctcgaaaaaaataaaaatttcagaatcaaaaattgttcaacaagtaaaaagtaacttagtgtaaaaatagagaccgcaaaaaggaaccaaaaatcgcgaaaaaggcactataataggcacaaaaaaattttaaaaaaagcatgaaaaggcacaacaatcccgaaaaaggcaaacaaaaaaaggcatttaaaaatttttctaaggtttttagggagtaaaaaacgtattaaccaaaaacttaattttgaaatgattttaaatattttaatgttttcggataaggaaaacttttaaacaaaatttttaacaagaaaaaaaaatgaaatttaggcgatcaattttgagttcaattattaggggtatattttttaaaattttgcaattcttagtgtattttatgaaaatttttcaattcacttctttagggtgtattttcccgatatttttaatggaattttccggaaagaatgccaaaaaaggcaccaaaatcggaaagaatgccaagaaatgcaccaaaatcggaaaaaataccaaaaaatgcaccaaaacggcaaaataggcattcaaggcacgaaaatcccgaaaagggcaaaaaaaaagcataaaaaaagtcaacgtagaagccagaaaccaagtggaaaatgtgatgcttaatatatcgaaattaatgcgcagaaaaaaggcatatgcctcaaaatgcggtctctaattagtactataaaattttaaataatatttattaaagaaccaaattattttatattttaaatatgcatttagttatgctcaattgtaaaattaacacgctaaaagcggtttttcgaacctttcccagctaaccaaaattgcaaaaatattaaaatataaaatgcaccccctaatcatggtgtattcaggacggaaatgccttaaattccaatggctattcattcgttaaataaaaaccaacttcttcgtttgagacagtgaatgtagtaatgtttgggcaatttttgtaaatgaaaatgagaagcgctgcagcggaagggaatgccaaacga

SEQ ID NO: 9745 - DNA, 1363 bp, Heterodera glycines
  unsure (1)..(1363): unsure at all n locations
aacataaacagaatgtgattggctggctcttttatggatatatttttaaaaactttcaaaatcagcgncctcgaaaaagtatcatctgagtaaaaagaaaatcaccaagattgttgtttcanatagattttgagtntaataaaaatatatgcgttttaataatttacaaatatattttcatgcaatttatagaattttttttgtctaaaggtacncaagttggcagataataaaaatttctcgttctctcgaaattgctttatccaacgtaccttgttatttttgtgtgaagccgtgcttggtggtgaattgtttagccttaacacaaaaaatatgtaataaataattgtatgatatgtctaatcaactgtgaagaaaaactcaaaacctaatcatttctaaatcggaattttccacccaaggctagacggattacggttctgtaattacggtgattaacacccaagtaattgcggatcatggattacagtaatttaatccatggctgggacttttttcgaagcgatttaccaaaaaagtatgggaaaaaataaatgcaaaatttttttacttttatattaaatgagaaaaattttaaaaattaagaaaaatcgtttaaaatatccatttaatgcaaatttttcatatctaacaaaagtttggaattttatttaaggccaaaaaatgaaaaaaagctgctcaaaaaataagtgaatttcacaaaaaagtctcattttttatcaatttcgctatcacaatgctaatcaaaagcatttcaatgctttttggcgtaatttttttttctatcaaagatttactccttttcggatttttttcgctaaaaagcaaaaaagtgaaaaaagtcataaaaagcgccaaaaaatggaaaaattgaaaaaatgaacattttgggggcattttgccaggaatttgatcgtcaaataataaacttttgtaaaaaaaaaattcaaaatttctcaaaaaatctccaatatatgtgccaaaaacgaccaaaaccccaaaatatgtttttattcgcgaaaagcccaaaatatgtttttatatgagctaaaaactcgctctgattgaaaaaaaacaggtaaaaatgctatttttgagcttttcatatgatagcatatgcgcaaaaaaaatatgtaaaaccatataaatccgttctacctttttttagactttttcgtattttttatacatattacgcaatttttgagggttcttaaggaatttttcttaaatgtccaaaataataacccgaatttcgcaatttttcgtatattttttataattgttaaatgcaaaatatgtataaaaaaataccaacgtttgttctcaatgtcagagacaa

SEQ ID NO: 9746 - DNA, 1842 bp, Heterodera glycines
  unsure (1)..(1842): unsure at all n locations
atttttatgaattttaataatcatttcataaaatttaccattttttattttattatgnagaggcaaatgaaaaaggaatgttttttatagatacatatatgggagggattggctgcccaaagggcgacaaacaaaaagncgatgggagaaggtgagagagtgtgtgttgaacggagggcggtgagaaacaatggagacgaaagagcaggcagaaaagaacaggggaaagaaaacagaggaacaggtttccgctgccgtggggaatttccaatcgatcattctcattactaaggcccaacttccaatttgggaattcaataactttaattcaaagctttgattatcttttaatcataaaagtaacacatttccataataatgttttaatttaattgattcccatatgaccaaccaactaattaatgttttgcaccttttctctctctctctctctctctctctctctcttttctgtgctattgcggcgccgcgacgagacgtcggcgcccagtcaaaacaaaagaatacttgcggcgcctaaacttgcggcgctatcatttcttctttggggtgttgaaattttgtcatagcagagaatttttagtctattgattgtccgtgatctcatggattttacattcagatttctgtgagtgatcagaaattgttgatttaaaaatggtccaaaagggttcaggaggcaatcaaaattaaccaattattagagaccgacttttgaggcaaatgcctttttttcttatcaaacataaataacgcattttccacttggtttgaggcttctacgttgacttttattatgcctttttcgggattttcgtgccttaaatgccttttttggcatttttcccttttggtgctttttggcttttttccgaaaaattccattaaaaatgcaataaaatcgggaaaatacacccctaagaaatgaaaaatttttagaaaatacacctcctaagaattgaaaattttccttaaaaattgatcgccaaaatttcattttttttcttgataaaaaattttaggtttaaaaattttcttattcgaaaaacattataaaacatttaataatcattttaatgtccaaaattaagttattttgttaagtttcacgtgttttgctccctaaaaatccataataaaaaattttaaatgcctttttcgggattttcgtgccttttttcaattttcgtgccttttatagagactttttcgcgatttttggtgcctttttagtcggtctctagcaattatataaagacataatccatatcattacatgcatttcggtcaaagagaaaagattctgaaaacatacctttttcaaaaaattctctaaggccaattcaaaaaaatgaccaaaataaattaattttttaaataatctacataatttaattaatattgcttaaatgagaatttaattcgcaataatttttaaataaaatttttgttactatgacaaaattttttcaacaccccaataattaaaataagcaaaatgttaagttaatgaaatgaacgttccttaattgtttgaatttgggtcagggttcggaaatggaaaaatttttaattcatgtaaattgcaaaagaatgttttaaaatagtttaatatatttaaaaaagaataattatcatcctttccgtcacattcttatttaaagcaatgccgaaaatggattttgacctcttcgatatgttcgcacccattgtgggtttgtttgttaattttttcattgttaatgcttagaaaagtgcttgattatgcaaataattttatcgaatgcgtgtnaatttcccanattattatgtatactgact

SEQ ID NO: 9747 - DNA, 1306 bp, Heterodera glycines
gcgggattttacgggagtcccgctcccgactcccgcttttttcggtgaacgggatttttaacgggagcgggattttacgggattcccgttcgggactcccgatcccgctcccggaaatttttacccaaaaacgggagtaaaaatgcactggtaagaattgatttttttggtaaaaataatgatttttcattgaaaatctgttaaatatatagccaaaatttcaaaaaaaattcccggcggcgcctatcggcaccgccggatccttaaaatccttaattttcttaaaaaacttgctcaatttgcaaaaattggtcatttttgaacagaatctaacaatgtattgtattaaaattttcaatttttttcccggcggcgcctaccggcaccgccggcctccctcctcctccttggatcaccaaaaagttttttcaagaaatacaccgcaaaaaattttgtaaaattaataaagggagtcaaaaatataaagttaataaatgttttgttcgaattaattataaaaaataatttatttaagcaatttgaaaaaattttctgatttttgactcaaaaataagattttttatttctaatttctcctttataaatttttctatatatttttaatttaataaattgattgtcctttaaatttgtgcattaaaaatatttttgtgagtttttaattaaattttcgaattactcccgctcccgcccgggactcccgttaaaaatggacgggattttaacgggagcgggatttttacgggaatcccgttcgggactcccgccccggaaaattttgaactcccgatcccgctcccggaaatttttttttaccggactctactaattacgaataccaaccgttttaagccgcgaaccaacgtatcacgctcattttgataattatataattccttgaaaataaaataaaacaattattaaataaaatccataccttgatttgtcccactaaatttttgtttctcgaaaaaacaagttcccgcgtcgcttgcttaataacgataattagggtataagattttttaaatgggcccctttaaatataattaaaattttatttttaatttaaaaatttaactcattaattatttaaaaaattagtttaaatatgcattaatcaacatttaccaattcgtcatgaagctctttgtcgtccaaaatttgttcatttaaagtgagttgttgcagttttgacagcaccaaaagcaagccactccgtattgaaactgaataaattattttttaaatggtttttattgcaaaatttaaaattttaaataaa

SEQ ID NO: 9748 - DNA, 1274 bp, Heterodera glycines
agtgtaaattttcccaaaaatttttaatatttggggtgcaatacaaattaccaaataatggcagtgtctcattaagaatttctttataaaaatgttcatccgtatgtttttgaaggttttcatcaattttggtgattagtgcatccaaatgaagaatttgtttcggaaaatcgttcttcacaaattgctccacttgatggtccaattcctttccaatctcattaaactgttggaaaataataaaattaattatcatttaaacgcggaaaattttaattagtttatatttgtaaagctgtgacataataaatccacagggtttgggcaaggctatgaaaattattttttcattaaatttaacgaaaatttgctgaactttttctccaatagcaatttttttttttacaaaaacccatctttttatacaaattttgcaaaatcatgttcaaaatttaaaaaaagaggcggatgtcttaaaaaaaatatagcactaagcttcccgttctacttaaatttcaaatattttcaattatcccaattccgagaccaaagattatgactgtcccgtcacgaatcccgaaagtttttttgaaaaatttcatgctaattaattgtttgttttttgaaaaattatattttgacgcaaccaaactttttttgagattgtgtcagttggctcttcggcatcaatgcttttggtgcgatcagttgcagttgcaaactcaacaatgatcagacaaatcaatgggaaaataaaaatgctcataaaattcataattaaaattttagaaatttcttagtgtttttattagtctaaaaatgatagaagaatttttaaacaattatttatttctttttatcatcagaaaactatcatttttaatagtaaattttataaatgttgtttttttattgaattaatattattccattggacggattaatttttatacaatttaaaaattttttttgccaacattattacaagtaaaattaaattgttttgttacattgattaataaatatttttacaaggaaatttgcatttgttcaaatgaaattcaaatgcatttcataaaattcacatgagccggaaatccttgttgcttgttcgttgataaataatgaatattaattttttatttggttgaattttatttatttttctttaacccttgtaaatttattaaatacatattttattttcaaaaatatattattttataaaaatagtttaaaaacattttaattaatttttaataataaaaatttaa

SEQ ID NO: 9749 - DNA, 932 bp, Heterodera glycines
cctccctctctctctttccccctttactctcttctctctctctctcttcctttttttcttttccttttagtctttccttttccctttccccctttagtctcttctttctctctcttccctactctctctctatttcccctattctctctctctttctctctctcttccctacgctctctctcccccactctccctccctctctctctttccccctttactctcttctctctcttcctttttttcttttccttttagtctttccttttccctttccccctttagtctcttctttctctctcttccctactctctctctatttcccctattctctctctctctttctctctctctttcctactctctctctctcccccactctccctccctctctctctttccccctttactctcttctctctctctctcttcctttttttcttttcccttttctctcttttcttccctttcctttgcttcttcttccttttttcttccctcttttaaacgtttctttgctttgtttccattaatcccttctctttttccccttttctcaactaatacccaaacaataagcatgcattttggagcaataaatgttttccgtttccctttccgaaattcccttctctttcccccccccccccctttctttccctctcccccctctttttttatttttccgtcaaagctaattaggagtgccaatttgccttttcgattggttcctccaaaaatgccgcaaaggtgcaattttccaggaattttatgtctaagtttgtgccgtctccggcatcctaatggggggggggaggacggaagaattccctttgaccacccccaaaatggcgcaatctctttggcatatctcctataatgaaaataattgcgggtgcaatttatgccttaactctcttgggcactctcccc

SEQ ID NO: 9750 - DNA, 3231 bp, Heterodera glycines
  unsure (1)..(3231): unsure at all n locations
tcgtgaataatgcacaaaatcattcttccttaaattttcacatccatttcccgccgatagaattaccgncttgtcctcccccccctcccctccgtcccgtccctccccgagggatgaaagtgccatattatcgtcgtccgttcgccgccactttgtcttgtttcccctccgggctcggatttatttgtcttttggccgtatcactccaccgactcagtttggctactgtttactttagtcccattattacgtccccgttataaattttcagcctaattcgtttgcctgaaaggcaaaatgccaaaaattaacggattttgccacaaaaatgccattcacttcgtttcgtctcttccgaaatggttcaaatttcgctttcgcttttcctttccttttttccttttttgtttaatgtctatcatttatataataacaaattggcattttctctgtttttttgtgattttcatttccattttatcgaaattcagctgttttttccgtgtttttctccacctttcctttcctttccctttctctgtgttcgttttcttttttaaatgttttcagtgaattattcaaagtgccctctctcctcttccccccgggggcatccattagtgttggtggccatatcattgcgtactcatcataggccatacatatattgccaaatgcgtggagggcacgcaattttggacggaatgccaacgagtgaaggaattggagtgggcactttgctatacttttataattggatggacaaaggagagagaaaccggggacagatagcacattggcatggaatgaggtgaccacaaagacaccatagagacaaatgagcggagtgaagcgggaagaaaactccatgtcgtgccatttctgagttttttggacatttcatggaccttaccgaccctcccccccccctcacatcggcacttttttgccaaaaattccgacaattcaaattttgaatcctaaatagaagaaagaaaaatatataatgaagaaaatattgatagagagagtgtgaggaggagagagggaggaagagagagagagtgagagaaaactcattaagcccaggagaattatcaaaaaagattatattaaagacatttccggagttaatgaatggccaaaccaatcgttggcgcgggggacagtcaaataaatggacaaagtcgccccgggggatgtaattaaataataattatccgtctgtccttttttttggtttgttttttccgcgtggtgccattcaaaaaagcattacccttactctttaatgaacactggcagaaaatgataaattacttgaaaatttaaatttaaataaattgtctttctttttttccctaagcattgattaaataattatttctccttccccccccccccctccgttatgcttttgacacgttttgaatggcttttggaaagtgttcattttttcttctctctctaaaacaaaaccattttaatttactataaaatggggaaagtttaatacaaatacaacaaatgattaatggaaaacttttttcacattttcatatttatttataactggcaaaatttaaaatattattttaaatgtttttttatcggaaatttgccactttttacagccaatcactggcaaattcaaggtaaaggaaatattgtgtcaatctcttcatctcaatttgatcagcaaaacattcgttttgtttgcaattttcaaagaagaaactaataaatgtttctgatcgcgaaaattgtgcgggggcgacgattgcttcaccaattggagcaggaagaagagaaggaaaaggcgcagaaggaacgcgagaaaatcatggcgaccaaagcgggcggcggaggtgaaaagggacaggggacaaagggactgagacggaaagtgccgaaagagaaacgagcaatggcattcctcgggactgagacagaaagtgccgaaaagggataatagagaaaggagcaatggcattcctcgggactgagacagaaagtgccgaaaagggataatagagaaaggagcaatggcattcatcgggactgagacagaaagtgccgaaagagaaacgagcaatggcattcctcgggactgagacggaaagtgccgaaaagggataatagagaaacgagcaatggcattcatcgggactgagacagaaagtgccgaaagagaaaggacaatgtcattcccaggaactgagacggaaaatgccgaaaaaggatagtagagaaaggaccaatggcattcatcgggacggcgaccatgggactgagacggaaaatgccgaaaaaggcagtagagaaagaagcaatggcattcctcgggactgagacaaaaagtgccgaaagagaaaggagcaatggcattccccgggacggggaccacgggactgagacagaaaatgccgaaaaaggacagtagagaaaggatcgatggcattccccgcgacggatggacaatggtactgagacagaaaatgccgaaagagtaaggagcaatggcattcccgggaatcgaacgatagattagtatcaatgtttcgcaaaaagaaaaaatagcacgagaataaaaccgaacatttgttcccccccccctttgatcgagaatttgaattgggaacagaatgaaattatgaaaaaaggaagtcaatcgtatcccttaaatatttcgtactaattaaattctgctgcagtttacacatgcacgacagcaggacggtccagcagacagcagcagacgcggcagaacagtcaggcgacggaggaatacgcgggcgaaagcgccgggggcaccgaagggccgacgacggcaccggcggagcaccaccagcacaaccaacagcagtatcagaaccaacacgcattgttctgcgcgtgtccgagctcatcctcggccgtttctgcgggcggagttgggactgaatatgcgacggtcggaagcattgaactgaacgacattggcactgaagcggtgagtggtgttgattacttttttcaagcgaatatatcaaaaacatttttgaaatcaccttttttacttggttaagaattaaaaaattagggagcaagctcgtttccccccccccccccgagaattttttttaaaaaattttgctaacagaaatttttcaagaaaaaaatcttanganagttttttcataagaaaattctacgaaaaaaaaattttttttgagaatttttatggtgaat

SEQ ID NO: 9751 - DNA, 2116 bp, Heterodera glycines
accaaggaaatcttaaattttcagcaaaaatactatttttccttaaaaatttcgggcgcggaggggctttgggggcggtacgtaccccgcgtacccccccccccccccccctgtgaccgtccctggaggaacgatgggggggggggggggaaaatgaagtgcacccaaaaaatttagcctattaaaatatttagaaaatcttattatattttttgaaaaatttccgatttccaatttccgaaaatttttggggcctcaaaatgccatccccggtgacgatgcttttaacggaaacacttgggcaggctcatttttgagagatgagaatctttttggcgtaataaagccgaaaaatgatgccaaatcattgaccctgctattagcccattttttaaatcaacctttagcttcctttctcctcattgcacaacaatcaacaacaaaaaatgacgacaacaaaaacaatggacgcaaagcaacggcgacagtaagtgactaattaaaatggaaaaattaattaaaatatttcttttttgcattcttatcaaatatatttctatacaaattttctttaccattttcttttaattggctttttctcatcaccaattttctaagtgttgctaaagggcaaagtccgattttggcaattttgggccaatttggcaatttgggacgggccaaattcaatcgtcccactataattgagtgagcgacgaagggacacccgatggaaaaaaagacatcgttccgtcatagcattctcaaggggttgccaagcaattccgattcatttgaaaagaaaagcaatttgagggagaagcggcgaacggagaaagaagctaaacatttttaaatggcaatgccaaaaccaacacataaaaggggaaactttttggcattttaatgccaaagaatgacaataaatatttcaattaaaagtaacacctttatctggcacggcacttacatttaacaatttgttgaatttgtatctgtcgtgcttcccgcccccaaaggcttccccctccctctccctccccccttagataattgctaataaaagggaatttgtgcaagttagactcatttttccctttccataaatgccgttaataatggacaaagtctgtctgtccccgcgtcatttgtcccctgccaaagtgccggcccatttggtggccaccacctcagttttattggccgggttgggagcgtcggccagcggcagatggaggcgttcgttcaacgatttggcccggttggactttggaggggtacaacagcagcaggacaaagaggaggacgacgagcacagccggtgttcacagcggggccaaaaatggcattttgccaaactcaaaaattacattattctcatccaatcttgaacattgccaaccaaacaccgaactcgaaaacgccccaatttttacgttttaattttctgcagaagggccgttcgacagcgcaccgattcgtcgctgccatccgtggacgaggagctgaccgcgtacagcaatcacaacgccaaaatgcggcgcacttcgtcaatgccttccgtggtcgaatcggacacacatgggaaagaagcttttgccattgtaaaaaagggtaatcgtttagcagattaattaaggaggatgtcaataagtggtgattaattaagaatgaacttttattttttggttttctcctcggcaggtgccatccttcgtccgataaagcattacaactacgaagaccgtctctcaaagctgcacaaaagggcgcttcgcttcacatggcaacggttgcagacgcggaacggcgggaaacgaattgagacggtgttcgaagaggtcggcactttagcattggcactttggtgacattggcattatgtaaatgttgcaggtatttgaccgtatgatgcgatcttttcccgtcatgcgcgagatgttcaacacacggacgttcatctccgcaatgtcgcgttgcgaagtcgccacccctcgagaccatgtaagtgtccaattaattaaagtagagtgagttgggaccgggatcagtttggtcctggcttttcttgatctgacagttgtcttttgtgagtaaaatctgtcaacaaattcaa

SEQ ID NO: 9752 - DNA, 832 bp, Heterodera glycines
gtttctatttgagcagagagttcccattacaaaagatggcacagctgcaaattgtgaacgacagcgagggagcaatggagagccataagcaatactcaacagtcgcagcaacagcagctttgtaggatgaagacggataagagcaacaagagcgaggaggaggagagagcagcgggaggagggagagtcaacgagggggtccaatgagagataagaggggtagacaaagtgggggagggagaatgagagacaggggggtagacaaagtgggaggagagtgggagacaatgagggggtcagactaacccggggggggggtgggaaagggatgggttgtgttccgtttgagtctaactttctaatagccttaacatacaatacaacccattcataattcagtttttggccgtaaataacacggaaaatcgacggaataccattgcttcgtgtagtgacagtccgtactctgaggaagaggaggaggaggagaggaacaacagaacgacagccgagcgcaacagaacagcgaacaccgaaggcggcgggacgacgacggcacggcgcaaatcaatcagccgaaagcggcgggaacagcgatgcttttcaatgataacggacaaaacgggcactccgagcaaattggagatgaaaatattacacgacatggcttcaaccgaactgtgatggatggagaagcatcggcagaagacaaataaagggaccatttccaattcggacttaatcaccatatttttttgatttttgtttttcatatacggaaagaaaagagagaaaatttttctaaattataatgaaatgcaaaatacctatt

SEQ ID NO: 9753 - DNA, 1579 bp, Heterodera glycines
ttgctcagtgatttttgtaggatagtcagtggaaaagggtggaggtttaaatccgctatttattttattttcaaaactaaaaatagtaattttcgaaaatatttttttaaagatttctgccaaccaaattaggtatacaagcttaatacatcaaaatgctcacaatttaagcaattggatttacctgagactgaaattgttttatattatttattgattcaaattcttttaattttagcttgtttttcatagttccacggatttttcttgtaatggtggatttcgacacatcgtctttatacagtgtcaaggccattcttatccttgaccaggacgggaagaggataatggcaaaatattacgacaaacagctttttccactcgaaaaggagcagaatgtctttgaaaagaatgtttttcagaaaacccacaaagctaatggtattttttcattaatttaataaaatttgacaccgaacatttagcggatataatccttttggatggcctcgtttgtctttatcggtataacgtcgatttgtttttttacgtggtcggaagtgcaaatgaaaatgaattgattctgcaaagtgtgctcaattgcctttacgaagcgttttcgacaattcttcgaaaaaatgttgagaaaaaggctctgttcgagcacattgacacgtcttttctcattatggatgaaatttgcgatgatgggttcgtttccaattcacttttttaaaactttctgctatttcagcattattctggagaccgatccccaggcagtggtcgcccgttgtgcggtcaaagcggacgaattggcatttggcgagcaaagcatttcccaagttggcatgtcgctgttgggctctgcgaaggaccaattgaaatggtctcttctgaagtgaccgaaggataaaccaattttgtgattaatttttgttgtgggaaaataacaaaagtgttttatttgtattttttctataaataaattggttattcgtactttacttttacctcaattgataaaatttcaatttgttatctgtgcatttattcggatttattgtgtttaaatcttgtcagatgtctgaccggttggccctttgggaccgattgatggtgttggcttcgaaggtgcaaaaagtcatcaatctgtcgtccaaaatttcatctgtccagaacacggaccacatgatgcaacagccaacggaggaacagcgccagcgaatttatcaaagtccaatttttatttgaaatgaatataaattattacacattaacacaataaatacaccatactaaaaatgacgttttagctgataaagcaaagtctgcactgcttcatcttctgctcactgattgtctagcgaaaaatggtgggacaaaccaacgaaatggttgtgagggaaaattgttcaatttcatttactttcagatgaaacaaccgtttttgaccgttttaaaatgttaaaagaggaaaacaattgtaaaattgctccagagatgttcagcaatttaccattggcacgattattagtcaaatttgggaagggaatgacaatgagacgaggactcgcgt

SEQ ID NO: 9754 - DNA, 1213 bp, Heterodera glycines
ggtttaaaaggcaataaaaaaaaatttagtcagaaatttgctctttcgtgcattgcaagtgcttattgacgcggaaataacgccatctgatgaattactctgtaggaaacgaaaaaaacttattcggttaaataattagggttaacatttgagatattaatatttcctgcatcttacaaatagaacgaacttcagaacttacatctagaaaaaattttcacttacattaatagtaatatatattttgcttttttagatagcttcgagcagcaaaaaatgtacgaagaggcgaagctaagcggtttgagcacattgtaagttcggtttgagggaggggggggaagtgatggtcgaactcgagtgcttttcaagacaatggttggaacgtcagagatcattgaacaagaggggtaaaaagcggaagcaggaagtggacacgaaggcatcgaaaggacgcaaaatccgttacgtggagatcccaaagttagtcaatttctttcccgccacccccgaaagaattgcatggacacacgaaagacgggacgaactgttcagatcgttgtttatttagagctattttttaatttgtaccatcgacaatatttatgttaaattttgaatctacaaaaaaatacgaaagttgaaaaagcaatacaatcagtgatcccgtgtgtaagttgagtatcgaagtaccaaatggaacaaatcaaatgtcactttccgcttaatggctcattctttcatttccaaaactttctcataaaattccacggcgtctttctccgtttcgaagtgaaaaatataggccaaacttttttctttgtcaatccatgcacatttttgcggttcttccttgagatgttcaaaaatttgtttgtcgaatacaaaattggagtctgggtggccaattcttccagtacaaaatacatttatcgaacctttgtcccatttggccttaaaacaacaaataagtgcaattgttaaattgtcaattttctggacctttttaataaaatttgcaaatcaaagccaccccccccccatttttttgaagtcgcacttcaacatctagagatgcaaaattcaattcatacgtgaatttcgttgacatttagggggtgaactgcttcaagctcacatgtaataaatgggccttggccaagtgttctggagaatagtcttttctatgcaaattattaataagtgaaaagtc

SEQ ID NO: 9755 - DNA, 1258 bp, Heterodera glycines
gaaataatgtaccttcataagctagcttctcaatttttggttttgatttagcataattttcgttaagccatttaaatgtgaatttttctctttcgagtttgacactaaaacgaaaaaaaaatataggtatacacgcactcaaacaaatatttcttacaaatgtattccatcaatgccataaactttgcaatatataaatgaagccatcaggtaatccgattgaaaattctgaaactttaggttctcttatgctaaagtcattcgtaagacagttcttatagatagacacggaaaaaacgaatgggggtaaaaatgaatttgataaaaaggatttttttctaactgttttaattggtaagtgatcttcaaatcataattttaattggttacttctagaatattaggtgattttttcaattgtgatttatgagaaaattgtatttttcaaatactttttaaatttgaatttttatttattaacaaaaagccaaatttttcttttttttttacttcaaaatctgagatctataaaattttaaaatacaaaaaaaaaattttacccgctgtcttaatttttccgatttatgatgcttgaaaatccatgcgcatatatattttacagcttaagcttctctttgcagaaccaatgaaaataaataataaacctatcaatttttgtctttcgactcgcttgaaacttctaatttattaaaaatatacattgttcagattacactcacaatcttatctacctagttattttttcatttgatcaactacacgattaaaagcgtcaatcatgggcaagggattccaaaattttatgtccaagaaggacttccatccaagtgcatggtggaacttaaaaagggtaattcctcacaatcagttatatttggctattattttaaaaatttacagaaatgggaagctgagcaaaagaatgacttggagaaaagaagacaggatgaattgcgtgtccaatatgagaaggagcaagaaattctcaacaataagtttgtttaagaaaacattttgcagcttacctaaattaatttttctttagggcacttcttggtgacgaaaaagcgaggttgggcctttctttcatgtacgatgcgcccgctggcattaacaaaaagaaggaggaagggccggaaccgaaattcgaatggcaaaggaaatacaatgcaccgcgtgaagaatgggcgaaaggaaatgaactcatccaggaccaacctttcggaattcaggtgaa

SEQ ID NO: 9756 - DNA, 1509 bp, Heterodera glycines
tccccccccccctggatacgcccttggattcaacgatctcccagagggattttcagtttatgtgtaaaagaacgaatgatttacaactcgaaagaaagcatctttaattgtgctaaatccatcctaatgtcaacagtccgatcacctgacttaattgcctaacggttcataaaacgttcgaacgcattcgccatcatgaactccttcttccggctttcaggcacaacgtcgtccaatgggatggaatagtcgcggtcaccaatgagcactccctaaatttagaataaaaataaaagtcatttatttcatgggttttcaggtttggtaaaattcggtagaattgcagtcccgcaggaaaattaagttaaattaaaactcaagaaaggaaaacttcgaaaaattttttagttcgaattcgggtccgggctccagaatttgtcaaaatggatgtcatattggaattcagtgacaactaaaaaattaaggatattttcagattccggtttttccaaggtttgggttccgacccctggattcaaatcccaatttgtaggaatccaaataccgggtgttattttaggggcgggatcccggccgggaataggatttttacaagaaatgaaaattgcagcaaaaatgcatttgtcctaagaaattgtctaatctatggttttataatagctgtgactttttggcaagcaataattttcaatgaaaacatcaaaatgaggcaaaagctttagtttagattaattttgatagatttagggcattctaattgtgtaaaaattctagaataaattgtaggaaatgcagcagtttattatattaacaattcaaaccttctcttcgaggcgcttggctagctcagaagggcaggaatgcatgtacttgacgggatactcgcaaatttcacgcattctctggtatgggttgtaatttctataaaaataaaacaaaatcattgtaaatgtaaacaaaacaaaacatacttcccaaattccatatatgccttgcgacgaacttcgacgtaaaagaagtaaaaggaaaggccaatgagaccactgacccccatcgcacagaaaacaagagacttggcccggatgtgagccatataacgcagcatgtgctctggagggcggggtaactttgcagcgggtgctgacattgttgattgcacttatagatctaaactcataaagccttttaaatataatcggaaacgggttttcaatattatgaagccaattaacaattaaccgaccaacctaagttttggactttttttacataggaattagtatggaaatttggtaatactggagaatctgggctccacccaaataatttttttttttttttttgttataaaaagactaacccctggttttcgggtcttctgatcacgaatatgatatcagacttgcaaaaagcattgattctatcatcgattttgaaaatcatagattttcgaaattttgtcaatatggtcaaatgttcctaaaaatt

SEQ ID NO: 9757 - DNA, 2884 bp, Heterodera glycines
aaaacggccctttcctccaaaaccggctcaccacggcgtgtttgtatgtttttgactctaggccatatttttcattttctcactccttagcaagaaatgcttctccgaggacaccttgcaaagttaaccctttttgaactcctttttttgttcggccttttccggtgtaaatgcgaccataactcagattccaacaacttaaatccaatcggttttcctcttgtgtaagtattatctccacaataataaaactgttcctttgtagagtctcaacttgggattcatttgatttccaagcggctgcccaaaagggttcgtcgtacacgccaatttttttttttaaagaaatgagttttcagcgttcgatattttccgccaagggcctgtcggttggaatacttcctcgtcataccgacgtctgaatgcaattgttgagggttcgcttattagacagagcagagacggtcgcaggatttaagcttggatgggataccgcccctgaaaactgaaatggtgttttggaggggggggggggggggggtaccaaaaaaaattcctattttaccatgaatttcggcaatggtcaagaattggtgtcccgacgaaaaaaaattaaaaatttcgtaggtgttttttctaggcttaaaaaatgcgctgatcattatttaaactcgcctgaatttctagtcgagccttattcccgtcttccgaaggagagtggcaggggtggtggagtcgtaccccccgcaccgcacccctccccctgggaccgcacctgagacagagcaataaagaaatattaccaatttgaaaaaaaatcattaaggactttctgagtgtgaaaaaagacgatgcgatcgcactgttggatttggtgggtctccggatgaaagaggcgagacgactttggatgcactggtgatggatggcccagggcataaaagtggggcagttgcggaactacggtccgaaataccttataaagtaatttagatgcctaactataagtagaattttgcggtcggggtcgttttcgcgtggccgttttcgcgttgggggaggtgaatgttattgatgtcgttatagagtgcgccgtcatgttctaacttaactttgtttcgttttgttttaattttttgctgctggtccatattatataatttaaatagccttaatttagtttataaactcattaaattataaaataaaaactcgttagttaaacaaattttggtaaaatataatgtgagttatgaattctcttttatatgcaaccacgcgaaaacggccacgcaaaaacgtcctggcccgagaattttcacgcgaaaacggccctcacgcgaaaacggccactgccaaaacgtcctggcccgtataaatagggacctaaaataggccgctgcccgtcaaaatccctccgcgtcataattagggatacgatttatagttactaaaaagtgccaaaatagttagttttagtttctaaaaacccccaaaatagttgctaaaaatgggaaccgcccactttggcatgaatttgaaaaccaagcgaaaattttttgtttttgttttaaataatatgatttatatgctaacaatgatagctgacaatttatattgggacacccaaaaataggttgaaaatcgggaaatctctaaaaaaatttctaggagttagggaaatttttggaaaaaaccttattgtcaacagaaagagcacaattctctacaacttaaaccgctgagttatgggcacttcaattcgatgtctacaaaaagaagtgtatttcttaaggaaatagtgaattttcagtataaatggtaatgcaatttattttctattcattcattaagtcattcatccacatttatcgaatggtcgttcttcgctcaaatccgttcctgcgcggcatcagcaaaatgatcagcttggcattgtctttgcacggtctttcaaaggcgacatgaaatattcgttaaaaagcttccctgattcgtaacttgattaaatttactatgcttttaattagatggttgcaatttatagacaattaaaaatatttttattttttaaatccttactctggtgcccaaacttcccgccccccccccccgtcaaactcacaatcagtccactccaatagaatttgatttaacaaaaatctattcaatcaaaaaaacataaaataacccaaatccaaattatggcaccatggttaatcgaattattttcacctgagagaatatctttaagaaaatgcggtgaaattttgcagggcttatttgtacagaattataaccccaatgaaagcgtcaaatatatttatcgataattttatttttttaaatataattattctttcttgcatcttttattttttccaatgcttttcttttcttcactttttaatttatttcttcttttccttgtcacatttttcttcgttagaattaattttagcttttagttttttctcactttttatttattttacatacctatttataattcacatttattttatgatgctaatgattctattcaaatgtacagtttttatttaaaaaacattaaattaaattatttaatgaaattaattcgattctaatattttagaagattaaagcatgcattttcttaataccagtttatttattgtttttaatttatcatacatccaattattgtgcagccaaccgtaagaaacatttttttgttatttttcaaatttaatttaaagttttcatttgacgaatggcactgacggagtgaagcttatacagttttgggccacaaatgagacggataaagcaataaaaaagccttatggcattgaattttggcttgcacatgacgggggattttgtgacggagggtgggaga

SEQ ID NO: 9758 - DNA, 1869 bp, Heterodera glycines
gttgcctcggcgcgaatttcggcaaaataaagggatttcttccctgatcccggacatgttcggatttttataagatttcttaccattattgcaggatcttctatttcactaaaaacaaaaaaattttgaattctgtttaaaaattcacaagtttgcatttcttatggtacaacattgactcattgggcttccctcagacccatcgaccatttctgatcagtgatgttgacacataatttgatgaaacaataaaatttccagacatcaaaaatgttcggatggcattttaagtgaatcttcggcattattgaccatggcgaaacaattactgatcactcccggcaaatgatcggagtgatcaatcaaatcactccgtatttagcctgggcgcgtaccatgacggctccgatgcaaatgccaactgttcggcgcgccaaaattttctgatggcgcccatttcggcctcgcacacattcagcgaacagttcggcgacacttttcccaatgcctttgtgctcagcgaatgctcaatgcgccaaattgagaattttttaaggcaattaattcattaatgacaaatgcctaattaccggtgtcggttctcgtttttttttttgaaattttacaattctaaatcaattttcaaaaaattccgacgatgcataatacctcaaaatattagattttttgtgaaaatcttctaattaataagtttaatggactgaaggttcgaaccttttcagcgcagaaattttttgaactctgcaaaaaaagttttcgtcataattaattagcaatcatttatttttcaagttcggccgagtcggaatgccttaggctaaacagcggcgatgatgagacagacgaaaattttgctgatcagcagcagtcatcagtggtgatcagcagcagctccgaattcaacaacgcccattcatctttatcaggcgatgccaacaccattttgccaaaactggaacaggcatgatcaatcaatcaacatgacaatcaccagggattgagctgattttgaatttgtgcgccatggatttccgactttttttttgatgcctcgtgatttaaaatggaaataaatacagaatttccggatttagcgaatgccagatgaggctgatcaacatcagcaacatttgacgggtgatcggattgctgccgccggcgctgatggtgaatggtggtcaacaatgatcagccgaggccatggcaggcccggggagcagttcgactcatggaaacagtgccaaattgtgttcggcagccattacggtaaaaatattggcattttaaaatccaagtcctcaaatgattttttaagcgaaataattcaaaaaataggcaaaatttcttttgttggccattgtttcaaaacattatgtttccttttatattactgtaattttgttattgtaataattctattactgtagcaatcctgttactgtattactcaaaagtacaataaatattttttgtaattttcaggcaattgccgggtgagtgatttgtgcaccaaatccatcgagcagaaaacattagccaaaacctttttttgaagcggaaggatttcatgctgctcaatgccgacccgtgccgtcgcctgtggtgcaaaaatcgaaaccaacgccgctgggccccgtgcgaaacgaagggatttttgccgatgatggacggcacgcggtgcggcgatggaaaggtggagaaaataatggaaaaactccagaatttgtccttgaatgcttcaaattacgcctttgaaaacttaaattgattaaagacaattgaaaatgccttaaaaatggctaaatggaatcgagttactgtaataatactgtcctactgtattttagt

SEQ ID NO: 9759 - DNA, 2950 bp, Heterodera glycines
gaaaagaaggggagcccctcccaagcaaaacaaataaatttatttatttttcggcagaatcagcaggcagggcacacttctcctcccgactccctcactttgctttcccccccccccccccccccgaggggagagtggggtacccgggccccattttcgggaacatttttgttgttgcaccaccaccatcaccacctccacctcgacaacaactgggccaaaaatgcacaaggccgggcaaactttcagcagcgccacccatttacggggggggggaagtaatgggagagggatgggtgactctaatgactgactcttttcttcctcccctcccctctcccctcacattttgccttttcttcccgtcgtctctttggcccataactcacttaaatgtatgtattttttgcaagaatcggaagtttaaacaaacggcggcgacaaaattcatttcttgtctccaaactttcctctttctctttttttatctctttgtaactctttctttcctgtcccttcttaattcccgtttaaactctcttttctttcgctcccttcgctttttttacttcctctccccctctctcttatctctctctccccctctctcttatctctctctccccctctctcttatctttctctctctctctctctctccctttctcttatctctctctctctctcttcccttttatctctctctctctctctctctctccctctccgtctctcttatctctctctccctctccgtctctcttatctctctctctctctccctctctcttatctttctctctctctctccctttctcttatctctctctctctctccctctctcttatctttctctctctctctctctctctccctttctcttatctctctctctctctcttccctcttatctctctctctctctctctctccctctccgtctctcttcccttttatctctctctcccactctctctgttccactttttctcttttaccgcctatcacttctgctttagttttttctttgcttccctcttttcactccctttcccctcattttttgctgctttttgttttcccgtgatttttgcatccaaaaatcccaaattattatgtatgcatgtgtataatttgttatattgttcccataaagacaaatgtcaattttttcttggcaaatccaaaagttggcagacataatttttttttaggtgtatccaaatctggcacataattagtcatttctggcataggtatacaaattatggctcgacgtacgaaatgcaatgaaaaatagcgagatattcatttttggcactttttatgtcctttaggcaaaaaaaattgttataatttatttgaatttatatctttaacagtaaattagtatagtactttcgatccaattttggctgaattcaattccaaattaaaaatagaaaaaattaattatgcacctaaaataaattagcgttttcaagaaacctatattaaatttcatcgcatatatgaggcgatgcaaacggaaactttgtggaaaattgctaattttttgatacttttttccccgaatcgcacactatttctgccaaaaaatttctttttaaccatccttctaaaaaaccgattttgtgccgttaatttattaatttttgtaattttttaccccccccccccccactctctttctctctttctctctctatcttcctatctctcccctcttctcttccgctctctctatgtacctccttctcattttcacaacgctatttctttatcaaagatataaattgccttttttttgttattatcatgttacttttcatttttttcgtcacctcttcatagaaattgccaacaattattctccgccggtaattggatataattgacgtaattaggccgcctacagcaagcagcgaatgaacgaaattgagaatatccctttctctccgataatgccatggggccattaatttacacagcatgaaatattcaaaaagcaaacattggcgccggttgggacggccaaaaagtgcaaaatttgtgaaacaaaagccgaccaaaaattcatttttagtctttattttacattattaaaaatttggatttaaaaatataccctaccaaaaagtatcgccttttgagaaataagcttcggggatttttcaagattgcacggcattggcatggcaaaattctaaaaaccccaaaaaccagggttaattgtaggtaatcaccgattctactgtcactgagaagcatttctctagctatgtatcccccgacaaatgattcccgacattctcttctcgacggtcggtagcaactccaattcatatagattatatttcccgcatatcctattccatttaatggacgaaatttcggtgatggataaagccttctaaaaaattttaacaatattttataaaaattaaaaaatttctctatggttcctattggcgaataaaagcgcattaaaaggcaagcaactatgattcctgcaaaaagaattcataaaataagttacagtataaaaaaaccaacatttttctaatttttgattctgtaggatacagtaagaaatcaatggactctaattgaatttatcattcatctattttagtcacaatttatgcctctctctattattatttcccaaaacaaaacattaacaaaataaacatttgtacatttgcttatttatcgatgcgctttttattttcagtactgaaaactatttttctaaaattggggctttcgagaccgcaaattcaaactcagaaactcgagaaaacaaaacaaaatcttagtcaaaggctaaaaaagttgaaaatctaacccagacgataaaaataagcgggcaaatgataaaagcaagaattctctagttaaaccagggttaccctttgtccttatttgtaagatttgtccttattt

SEQ ID NO: 9760 - DNA, 1568 bp, Heterodera glycines
ctccggcaatgccattcggtactcgtcgtgtgccatttgccaaaatttgtaccgatccgtcagttttgtttggcatgcgctggacaaatgcacttggccgttctgtgccgcgtccacagggcacatgataactgagaaaaggagaaaatcattttcggctgataaaaacttctttagcagtcaaaaaaatctttttataaattattcataatatgagcaagaagaattgtatagttgactttatccgtttacagccttagtgcactaatttgcccaccagggctgggccaaaccaaaaaataaaaagtgaatgaaagttgaaatcgcgaaaaaaggtgaaaatggagaaaaggtaaaatatgaaatttacagcaactttgttcgttaaacatttttttttgacctatcatttttttaaattgggaaataaattaaaaagtttagcaatagtcggtgccaaagtgacccatgccaaagtgacccatgccaaagtgacccatgccaaagtgacacatgccaaagtgacccatgccaaagtgacccatgccaaagtgacacatgccaaagtgacccatgccaaagtgacccatgccaaagtgacccatgccaaagtgacccatgccaaagtgacccatgccaaagtgacacatgccaaagtgacccatgccaaagtgacccatgccaaagtgacccatgccaaagtgacccatgccaaagtgacccatgccaaagtgacacatgccaaagtgacccatgccaaagtgacccatgccaaagtgacccatgccaaagtgacccatgccaaagtgacccatgccaaagtgaccacctatccgtgctcgtcggacctgacaaattcgctccttaaactgattcgtgcgcagttctggaatttgactgatttgctccatggacagcttcatctacagaatggaacagaaaaaaatgattaaaaaaattattgtcttgaaaagttttatgttcatttatttcgtaaaacctcacttgttttcgactcgaaaattcataaaaactttagttaatgctcaattttttttaattatttgaaagttttattttctaaatgagaaaaaataattttcaaataaaatgtttttgtacttttagggcagaattttacatttttgcctctattttctaaatatgccaactttaaatcttgaattcaatttttcgtgaattacgtgataaactctgttttgtagggttttaaattatgcaatttcatttcacataaaaataagaatataagcgatttaaaaaaaaataattcaaattaatttttgatttccttttcttaattaactatacgaaattaatttgttcattcagaaatcagtagggttaaaatttaatttctaacaaaaaacttgtaaactttaaaacgttcttttatattttcagaaaattaaatgtgtacgaaatgaagtaagtaatgagtgaaggaaaattattaattcatattagtcacaatttttccattcgaaaaattgtcaaatgttaaaaattaatatgaataatcgggaagtaaaagtaataataaatat

SEQ ID NO: 9761 - DNA, 1700 bp, Heterodera glycines
tttatgttcatttatttcgtaaaacctcacttgttctcgacttgaaaattcttaaaagtttgattaatgctcaattttttttaaatatttgaaagttttagcgcgccgaaaaaagtgataaaaacaaatctgaatttctaataatattcgatcatttgagtcaaaaaaagattaattgtttgaataattgaagaaaatttgatttgaaaattttcattgatttaatttagtttagttttggatttataaaataaaaaattaattttgtattattttgagtagaaaaagttttaaaatgtgaattttaaaatttccggttggtcccggccctgaagaaaaatctaggtccccggtcccggcttctcaggtcccggcaaatcacggtatcggttttgcccaaaattcctggtcaagcttcactctaatttttaatttgaaagtcaaattatttcttatttcttaattaactatacgaaattaattgttcattcatattaatttctaacaaaaaacttttaaactttgaaacgttcttttatattttcagcaaattccctcttttttcttttttttttaatttgccactcaattagcctccaaatttactaaaataattttattgaaataaatttgtgagataaatagacggtataaacattttaaaatttttatttgtttttttttaatttttaaaaattattttgctggttgttattcataaattgatattaattaaaaatgtttttaaatttatttttgtgcttattcatcttttttcttcattccgacattttattttattttttattttttggttttttcatcttcacatttttaaaactatgaacataaacattttttgctgaattaacagcaaatttctcaaatttctaaagatgaataatttatgaaaatgtttatttttttctatttaaacaaaattataatttcttttataataaaaaattaataaaaatatgaagataaaatttattttaatttaaaatttgttaatttaagttgattatgaattttttatttattaatttcatattttttaccgcactgttcaactccgtcaatagccaatgcttctcccctgaagagtaattttacacttttaatttttaatttgtaattttaaataatgttcaggtcgaatgacactcagttggacaagtgctgtggtgaaaaggtaaattcaataatacagtatcattaagttcggtacggtcatattcatcaatcgattaattaaataacgtatcactaacttttggtacgtcattaatctatcgtttaaattaaataacgtatcattaagttcggtacgggcattcattcatttatcaattgattcatttgccaatatattttgtcaaaatgttcaactttaagctggtctacactttgaacattaacgaatcgtgttcaattcgtggaaaaaaattcaactgttcattggcatggctgttggaacgatacaaactttcggacaaatacacaatcgaagcgaacactgaagtaaaataaatgattatttaataattcaagaaaaataataaaaataaaatattaaaaaaatatatttaattaataatccatttcaactgctatcattgctaataacttttttcttttctttttgacttttcaaaaataagcaaaatatttaaaaaatatattattttactattttt

SEQ ID NO: 9762 - DNA, 977 bp, Heterodera glycines
  unsure (1)..(977): unsure at all n locations
agttcgaggcaaactttgtcatccttcataagacggaaagtacgcggcaaatgatgaaatggttggtatttatcctcatggagccctntacaaatatctattggcactaaaatacttaatttcatccagaaaatgaataattttttatggtttttntggattagaaaataaaaacccattcttaggattggccgacatttgcggcgcccagtcaaagcgacacttgcggcgctgacacttgctgcgcccagtcaaagcgacacttgcggcgcagacatttgcggcgcccagtcaaagcgacacttgcggcgccgaagtagttacccacgaccttttcaccggattacggtagccccccataggtgtgggaggggtgcatggccaactgagcgccagccatttgagcgccgccaagtgagcgcgggccatctgagcgccagacttttcagtactgaagccaaaacctattgcgcgacttttttttgaaacccaaacctattgcgcgacttttttcttgcaaacccaaacctattgcaggggggtgcgcgacttttttgactgcgcgactttatgcaaattattttaattaaattcatttaattttaaattattttaaacgtcttaaaggtcaaagacgttgaatttaaattcatttaaaattctccaaaaattccccgcaccaagcggatccgaaccccaggggggcggccagactgacgctctaaccactcggccacattggcaatggatgataaacattaatttgctctcataaagggaaaatttgacgtcaccagcggcggtagggggcgagagcgggcggcgagaagggggagggggtcaaataaacaaatcaattaaggaggggcgggggtgttgaaaaggtgccaaataaacaaattaattaattggttgcgtactttgtgttgccgccctccttcccgcatgcccattatgtaatttgacaccttcagaca

SEQ ID NO: 9763 - DNA, 1767 bp, Heterodera glycines
  unsure (1)..(1767): unsure at all n locations
ttccatggcattgctctgtgccgctgagcctgactgtatagtgccaattggacagacgaaagaatgtctatacacacgaattgcaccaaatctgacttgccatcgccaacatcaaagtttgctagatactctgctctacaacatggaatatcggaaacaaattgcgggttggttggacagatttatgattttgtttaattaaatttatcttttctttttaatgacagatccctcatttttgccacatacaagcgctaagcatccgcgatggtcagccaaattcattggttcttttcgcatcaaacattcccgatcattcgtggggaatgccgaagaatggctgagcaacgtcaaatgttgctgaacagtgatgacccgcaattgtcgggaccaaaacaattaattgacattgactaatttcaccaaaaaaatatgataactttgattggcatattttcactggagataccgtattggagttttgctatatcctcaacgaaacacatatatttatgaaaaattggatttaacaggattaatcatgaaaaagggccaaattctacatttcgatgcctgctgttggattcggaaatgttattatatatatttttttggttatttatcaaaatgctgattcatccttatccgttttccagtccctctcatcctttttcacggatgttcgacagaatgcataaaaaaattccaaaacaattttgataccacacggaaaaacactttcaaatgtaaaataaagaaataaattaaccataaatattattataaatatacataaaaattatattaaatttaatttctgtctatgttattcggtgattttagactaaaaatgacttttttaattgtcaaagtcatttcttttttaaacgttgttttaatgtgcatcatttgtcaattgtcaacaactgatgaagcgtaaatttttttaaattttcaaattaaagtgttcatttgactgatggtggcggcggattcaaacaagtgcaatttagtctattggcacaatgccatgccaacaatgaatattacagaattgaatttcgtctgatggttcaggatgtcggaaattgcgaggatgggtgaaaaaaaaactataaattggatgaaaattagaaatttttttttataaattgttaatctgaattgatagcattctcatctgttacccggccctgcttcaacgagccaaccaattggacaaaagcggaaattcaaaagtaaaagaaaactcatcattagcgctaaaatggtaaattttgggtacctaattaaaattatatattaactctccannnaaattcnattnaaaaanaaantatncaaaatatnccaaannatnncaacaaaaatnntacaatcatttnncncnccattaaaattcncacantnccaanncaaacnaaanacaaannactcattttnnantcatcaattncctctaanaaattntttnaatttttattaatnttaancaaantaaattaaatttttaaatttaaaaattattttatancaaaaaaatattatantaantttattnnaatatttaanctatccnttnnntncanaacaacncaaattttctntnctttttacttnaatcaaactnctncnccattcactcncttttcatcagtggaaaatgntgaaaatccatattttatataagttatattctcgnctttcccancatnccattctccctagtagggggccgtgccatgcaaattgatttctccgttcaaa

SEQ ID NO: 9764 - DNA, 1037 bp, Heterodera glycines
tgtccgtattttcgtctgtcgccgaaatgtccgtattttcgtctgtcgccgaaatgtccgtattttcgtctgtcgccgaaatgtccgtattttcgtctgtcgccgaaatgtccgtattttcgtctgtcgccgaaatgtccgtattttcgtctgtcggagtcggagcctccggagttggaataggtgttgttgtagtcgttgttgttgtggtggtggtggttgacttaaaagaatcgaggcttaagaaaaattgacaccgaaattaaaaaacaaattctttataaaaattttgtaagaaaagtggggccaaatttaaaaaaacaattattttattgagacatttttttgtatattctggtataaaatttagaaaatatttaattgtaataattaatattatgctgattatattttatgtaataaataaaattattattaaatttaaatttaaatagttatttattaaatttaaatttaaaaaattattataattaactaattatatttaagtaataaatattattattaaattttaataatattattattacatttaatttaaataatcatttattaaatttatatttaaaaaattattgtaattaactaattatatttataaaattattattaaattttaatttaaataaaaatttaaacaattattatcttttaatgatggaccaaataaaaaaaatctcggtttactactttgttataaagcaattcggcattgcaattgtcttgcgtgcagtttttacattgcacaacataatcctttggctggaaagcattgttgtgaagtgccgcgcaaaatgtctgcaacgaatctctgcgatggaaatgagagtgtgagtcaactcagtcccggccaactcagtcccgtaaggttttcagggtcccactaatatagaggagggcacttaggggctattgaatggcaccaacaatgtatgttcggtttggttgagaaagaaaaaaaaaagaaagagtccggcggggcccaaacgtgccgagacccaaaactgactctagag

SEQ ID NO: 9765 - DNA, 3285 bp, Heterodera glycines
gcggagcaggacaaaacgtcgtcgtccgaaacgtcgtcggacgaatttttggaccacaacttttttttctttcttaaccaaattaaacaatcttggtatttattcgaaagcttttgaaaaatgctattagcctgcaaattttcaaaattttttattcatacacaaaaaaaccagggcaaaacaaaaaaaaaagttcgaaatactaggtttttgagttccttctggtcataacttgtttgaaacttaacgaaaatttttgaagttttgtgtaataatactacacacacacaaagctatcgaacaacaccaacaatgcttaatttgattgacaatgaacaaagttattgtttaaaaagtcttccgttccgacgacgtttcggccgacgacgttttggggtgcaccggcctccccccccccccgccccccgcccttccgggtccctcatcagacggggcaattaggtttttctttggcaattaaaagtgcaaatttggagaatgtacggaaaattaaagtcgattaggaatggacacaacaaaaactcatctttttttgtttttgcattttgacaaaaaccagctgcttgctgattcctctgcttttatttgctgaattttgccctcttcgacgtcaacaaaaaacaattatttatttatttattttttttgggtgtgccaatgaatggagaacattctcggctccctcatcaagcagataatggttttttttatggacgaacaatgtcaaaaattaacgaaatttaattataaatcttgcgaaattcagcggtacgaatttttttatttttaaattataaaaagaattaaatttatctttgaaatgcacaatattttttaaaccaatttattaaaatttttatggttgaaaataattttgaaaacaaaaaatgcataaaaagaaaattagcaaacataataaatttctttttttttgtcctcaatcattttcttcttccttttttcactttttagcattcttttcactctaaaattgtaaatttattaaaattaaattgttttttaattttaataaaatgccattacatccaattcttatgccaaacaagcaattcattgtttcacatggcttctcatcaacagtttttgcttaatgaatttaaatgatttacttacaaatgcaaagatttaataccaatgaatgatttttctgtttagacaattatttttctaatataaagtgttttaataatacacacacagagctatcgaacaacatcaacaatgcttaatttaattgacaatgaacaaagttatggttcaaaaagtcttccgacgacgttttggggtgcaccggttgccgagcccctaaaaatctcttaaaattttcaaaaattgacttaaaggctgcaagtttccgatgaaaaagcagttaaagatggtaaaacacaaatcgcaaaatttatccaaaaaaagcggtttaaaagcaaagtaaaaaaaattgacgaaaaaaattattttttcagtaaaacagtttatgaaaactcaattcatttccttacaaagttatggttcaaaaagtcttccgttccgacgacgtttcggccgacgacgacagtggaaaatgcgtcagtgataaaaatactttaaaataaagttgtatggcatttgtattgttcatgatgccgttttgaaccaaatatgctaagctccggattttttttttttgattttttatacttttgatttagcttaccaatctcattttgcttcattctctgaattttcttctgctaaaatggccgagaaaatgtaagtccttttttaaattgaatttgttctttgaatagagcccccccctgctttatttttttaacgcacttcggggggggggggtggctttaatggagggggcggggctattgtcgaaaaatgtgatgaattaaaatacaaccgcctcctctcatcttggtgtccttgttctgctgctggtcataatgcgaatttttacacagtatcacaatattaggcctaattaataccgtaatcgcactgtacactgtgtgttcttacagtagtgcctcttcttcttcctcttttgtcatcatcctcactctgttgctgctttttctccatccggcgcttggtggcccggcggcctacggcatatgccaggccggctgctctgcgctggtggtcgcctgttatgcggcggcgggcgctgtgttcggcacggtcacgaccggcattggcactccgccagcaatcattgcatgcaacgcggcatacggaacgtgccaagccgcatgctgggccgcacttcacgcgccgacgctttgatttgatgatggttcccaaaatttgggcaacggaatgattggctctgacgaaagtgccatttaaatgtgaccgattttgaattgccaaattggcaaattttctttctcttttgtcaaatcatttttaaatgaatttctatttttgtaaaatgttttttttgaacttttcagtccacctttgttttggccatataatgttgaaatattatttatttctttttttaattaaatgctccaattttgattgctttaacaaagacttcattttcgatttaattgataaatttgaattttttaccgatgaatgaatgaatgcatttgatcaaaaaaattattggatgtaaaagttgtgcggatgattcatttggcaaatttatttatccgacaaataaatgctaacagaaaatcaaatgaataatttatttttatttatttcaccatcggaacgaataaaataatatgaaatgcattttatttctgttattattccgagaaagaaattttttaaaaattgttttattttttgttaaattttacaaaataattttcaataaaaataggttttttttgaaagagtgtgtctgtcgttttttaaggaatttcgtgcaaaattttcaacttttccccggcggcgtttatcattcaccgccggcggaccataaaatcccttaatgattaatcaaaatttggtgctatgtgctatttcctctaccgatcaccgactttttttctccccgaagatcgcggcacaaccctaatctattcgataataactgacgtcacatttgctcggaggactttaatttttcggcatttagaattggaattcctccgattgtcccttttcaagtgatttttaggcatccaaattcgacacaaaatgactttctccatggaaattgtgcttttcacctcaattgttgctgcacaaatggttctgtgtgcttacggtatgagtgttgatgat

SEQ ID NO: 9766 - DNA, 5927 bp, Heterodera glycines
  unsure (1)..(5927): unsure at all n locations
ccgcttgggaaattttgaaaattagagagtacaatttgttaatttttgtcccaaaatgaacaatttttaggaatttgatgctgttttactgtgtttgaaaattgctagagaagatccaaattcataggggtactaaattctgatcactcccgaccaccattatggagagtgatctgatcagggtggtgcactgacttttttggtcagtaccctgttattacttcgctaaactttttcaaatttgtatctagcgcagaaaaatgataaatgtcttcaaagttttagacctatgtttttgttacgccaaatttgggccactttcagggaaaagtcgtaaaactttttttctatactttacaatttattttattatttaattacatgtaaaatattaaaaaattcgtaaatcaatacatgcgttaatattgtatgacgttttgtcatatggccgtcgtccctctgctgtcattataaacatgggagaagggagaaggcaggcaatggcattgtgggggggggggggagaaggccggcaatttctaaaagccaacaatgaaaataggcataatgtggggtgaagacaaaaaaaattatagtttttattgtattctatgaaatttatatggcagagaaaaaaagtaatagcattttgcatataatggaaacagaaataaatgaaaggggtatagaaaaaaatgaaataacacaaaaggaagacgcacacagccgaaagaattaggcaaaatgccacgtttggcaacgtggcaaatttcccttatttaatcagaaaggaaaggcaagaaaatcataattcaatcaacatttgaagcaaaggaatcaacaccagacatggccattctgctgaagtgtgtgctgctcctctcaatcatggcgattttctgcgactgtatggaccccggcaaaaaaggaaagagcaaaggtaaacccaaaaataaaaataatttttataattttattttaagccattcgaaaaaaggctgagcccgatgactattttaaaatgataaattttaatgcaaactaaaacgatgatttcttttcctaaattgatcgtgaagccccatcccgttcatttgataattctattgtctattaattataatgaatttatcaattaataatgtttatttacttaatgctcagatccgatcccaatcccgaaacaggaaggtgagcaattaagcaatgaaaacgaacttaaatagaaataaggatataaaagttatgtttaggttaggatttatagggctagaaaaatgcacaccccaaggattgactttttggccaaaaatgaaaaaaaatttgaggctcatcgaaagttttatggcaaaaattaaaaatctcatttttttttatcattttcgcccgcacaatcgcaaatcaaataatagaagaagtgatttatgaaataaataataaagaaagacaaggcaatttctgcactaaaatccgatgaattttaaggaaagccgagcagcagtgcagcgaatagcccgacagtaacaaaaggcactccgaaacgtggcggtaaattttaaaaatcaaaaattgaaaaagtaaaaaatatatatcagactaaaaacataaaaaaatgaggtccacggaaagttttatggcaaaatttaaaaaagccataatattaatttttaagtaaatatcgaatttttatacaatttaacatttattatgaaaaccaccgtagacagttttaggcaatattttggcaaaatttcatgtatcatttgaattcaagttcaaaggttgcgcgattgcttagtggctatttacatcttttatttttttttaatatatttttattttcattaaagattctgctgaattgaatattttagttacattaaatttattttaatgaaaaaattggtcagaatttttttttctgcaattaggatttaagcaagctttaaatcagagctcgcaagtgtagtgctgaatttttagggttttttaaactaaaaattttttcatttttgaccaggccaaaatctgctaaaatcacctaataaataaagttgccgacagaaattaataaatttttcccaattacataatagatttgcacgaaaaatattgtggatttttaagttgttttttaaattataatcaccatcaaactatttgaaacttcgaataaagttcggaatttagaattccaatcccccaatatctgaattcggtgttcttttatattaaaaaaaaatacctaaaacaattccaaatgtttttggtattttggctttgattttggttatattcctgcttccttccatttaaaatatgaataaaaaatgctttcattaacaaaaaatgcaaaattgctaatagaagaagtgatttatgaaagaaataataaagtaagacaagataatttcagcactaaaatatcaaaatctccgtaattacgaagttagagatttccataatctaaatccaatttatgcaagcccggatttaaaaccaaaatgaaccaatagcaaattaaatttttttatgtgcactgatgtaaaataataaaaagaagaaggtattagttaataaaaaattttaatgcatgcaaaaatggtaatagaatcaattaattgaataaaataatgataaaataagaaactgaggcaaaagcttttttaatcttaatctttttatttggacaattctaatttcaatttttcttttaattttaactcttcctgtttttctctttaagaacttgatacccccgaattttacaaaacgagcccaaagaacaaaattaatagcccgagaaagcccaacaacggctctccgagaaagggtaacagtaaacataaaataattaattaattaataagtcgaataaaactttgcaaatttcgtccggtggccctatgggtgtatccctgaattgtttaaatatgtttctgtaaactttgactattccgttgttttgagtgtgctttactttcgaatttactgacttgtaaaaccaagtgatatgatgaatttaaaaaatcgtgaaatataattaaaaaaatatattcaatgaattaattcctaaaaaaaataagtagaattatatttaaatttcatttcgctaactcttctttataaaaatccaatttttcaatatttaaaaaaatatgtcaaaaatttgaaaataaaaaaatccaaagtctgtatatactatataaaccttgtgcatatttcagaatattttatataaattctgatgccacattaaagttgcaacaaagttaaaatgtgcttacatttttcttaatttattcttagtaaaatgtaaaaccttattgtactatttatgaacattgataaaataagtccctttttattattttagataaaaaagctctacaaaaggaacgtcaagaagaaagaaagcaaaaagaaagagaaagagaaaaccgtttcctgcgaacgaaatcaacagcaggtgctaaaaatggctacccaacatttgaggataaccccgccatttgagcatgtgattggtcgtttgtaaaaactgccaattttatagactcgttagaaatttttgcatctagttttcagaaaattgtggcaatttttctgaggatttttggtcaatttaattggttttgtttaagaaaatttatgcaagtttttcgcgaaaatcgtaaatttgcatttgttatgaaacgacccaacacggctaaggagtagcacaattcaaaaaaaagtaaaaagatttttacacccaataaagacaaaatacctttccaaaggaaacaatatttacaaaaaatcttctcttcatttgtgtttttaaaattagctgagtcaatgggctagtcatatcagcgccaagccaaaataaaaaaacgaattaggggttttaaaggtcggtaaatcagatttgacacccattttcgacccaacgaacccgcattcatttcaaaaacataaaatctgaaaaaattaagctatnaataacatcgggttctgatcaaaaaaaaatcactttgaaaaatggacgacccacaagagttgttttttatatccaatattcttttaattttgtattatgaagcagtaattagaccactaatattttgggtttccattttgattcagattaagggatggttttaggtaatacgactgacgcgactgacgtggaaaccgaaagcgaagtgattccgacatttgttgccgaactcgaaggttcctctttaaaaaataaaaattttaaggtgtcaaaaaccctttacgtttcctgttcttcccaagatttcataagttttaatgagtatgagaatcaaatgatttttattaaagaccctgcacactagaaatcggaattttctgattgtacgggtaagggttacgggtttgacatcgatacgggttacgggctaaaaacccgtaaaaccttaacccgtaaaaacccgtatcggctgaaaaaaatacgggcccgtaaaaacccgtatacgggcccggcccgtatccgatatctgcacattgtcaacaccagccaatcatttttaacagcgttaaaaattatgtaatttccttattaattaagaaaatgcctagattcggtagaaactagggttaaattggactggatcccgtccgggactaatcccgcaatcacaacttttcggctctctgtctcgtggtgaatggaaaattagtaatttgacaaccattttccagattctacggtggaatatccaacagacattgaatgtcatgttgcaacaaaaattgaccttggacggaaatgatcagcagaaagcactgcaagaatgaggaaaaaagaggcacggaaagaatgatttgtgatagattctttcttctgtgcattttcatctgttgcgtaaatgttgagagcattcgacgaatgacgtgttatacaaatcagttattgggattaattttcaaatgcatccatcttttgaaacattacttcgctggccaaaaattacattgtatcaatttcagaggattttttacttaaaaaattggggaaaaccttcatttttgcaatttttaagcctaactatttattataataccatctgagtgggttacaattaacaaattgatgcagatggatatggattagaaatgggaaagtgcaaaaatcacaaaaaaaggtcttttgtcacagtgatttgatgttctggtcttcttaattctaatcatcaaattcatcatcaaataagcctaaagggttaataatttaacaaattaaaaaattcatttgtttttactttcgttttcttccccctccgttagacgtcgcatttgctcttccttttccttccttgacggactaaaggtgtctttgctcgacactctttttgatgattgaacttaataattccgatgattaaaatattttttaataaaaattcatcataattaaggctagtaaaaatattgatatgcaattgcgaaatatggccataaaatatgtgcctaaaatcgcgaaacattgatataaaattgcaaaatatggacataatttttcattgaaaatttttcaaatttcttcaaaatcattaaatttaagtcattaaaaatagatgactacggtattaaaaataattgaagaaaaaaagacaaataaatataaatttagtgaaaactgaacgaaaaaatgaaattttccacttttttacttatttttgacacaaatttccatttttacgaaaaatttaaatttaaacaatattctcgagaaagttttactaaaaaataacggaaatttttctcatctttatgggtcaaaaggccatttttgctgatgagggccgttctaatggaggttttttgttggaaaaatacccaatatggattataaatcgcgaaatatgaaaaaatatggatatagaaatctatcctagaagcttcaaaccaag

SEQ ID NO: 9767 - DNA, 971 bp, Heterodera glycines
tttcagggatctactagcgctgatgcgcgggaaactttaaaaacatcacacaggagttccggaaaacaggatctttaatcctaaaacataatatggatgtagttcagggttaccctttgtccttattttgagggtccaaatcttacaaattttaaatgtccttatttgtaagatttgtccttatttaagctatttgtccttattttcgtcttattttttggatttagggagaaatttagtttttaatgataatttttgaaagaaatgttttttgaagcgaattaatatgcaaaatcttaacaagattcagttaatattcaaatttttctcttccggcagcgtatattagagctgtatcatttattatttctaagaaatgttctgatttggggtagtgtcttattttcatttaaaagaggaaatttctgaaaaatttggctaattcctaacaaaattcattaaaataattttcccccagcggcgcctatcggcaccgccggccccccaaaactcctatttttttttcttaaaattagcccaagatcgcaaattttggtcattttttggacagaacttgttaaaaaattgcattaaattttcaaaaaatttccccgcggcgcctatcgacaccgccggactctcttccctcacctatacccaaaaaatttaaaaaattaaaattgattttcggaaatgtataaatttctcatttctaagccggaattgcgcagaaaaatagttggcggtgagtaatgcttggttttgttgaataaaaatgcatttaaagttttggaagcgtgttttaaaaaatgtccttttttttgaccctaaaatcttatttttgaccagcgatgttcttatttcgggaaattttcaagggtaaccctgctgatatacttgatgaaagaatcgtaaaaatcacattttatccaaataatttctgaattttgttcgccttaaattgttgccaa

SEQ ID NO: 9768 - DNA, 707 bp, Heterodera glycines
tttccttttttgtttaaaaacccgcgaaacgtattgtttgttggtaatttgtactaaaaaaattggtgtcaattttgtcccattattttctgcccgtcgatggtgtcctttttcagcacctgctgtttgttttttgcaacattactgtccatggctttcagattcgcttccgtctcctgctttatctgcgcctcaatgtcgtcgcgtgtgcccaaatagttttgctcaaactcgcgaaaacgctgctccctttccttaacaaaacccaaatttaataaagcattaataaaaaaaatcaaaagtaaaacgaaaagaaaaatgtaaaatgagtggtactttttaagtttaccgggtatttttaatatacattttcagatgcctataaatatgtcatataaattaatgaagaaaagttttaaggggtttttggggtcgctgaccacgaatccgggctcagatcaacgctaccgttcattacgggtgcaccccaaaatctcgccgccgaaatctcgccgccaaaatctcgccgccggaatctcgccgtccggaatctcgccggccgaaatctcgccgagacaaaatatcgccgccgaaatctcgccgaccgaaatctcaccgcagatattacaaaaaaaaagttctaacttaaaaattttttaaggaacatattcttatatagatttatttattagataatttaaataaaa

SEQ ID NO: 9769 - DNA, 3057 bp, Heterodera glycines
  unsure (1)..(3057): unsure at all n locations
acaaaaagaaaatttggatgacaaaaaatgaacaatgcatnngcaattccattttagacgggtttttgtgttnaacaaattgtgaaatgttccatctgtttttttgtttgtttgttaattacaacttgtgagcncagatgataatttcaaaataaagttgctatgtgcacaaaaactattaatttggaaagttcattggcattagaatttatactaaatcaatttggttgattgtttgttgatatttggttctcacgaaggtaacttatggcgcaaaatactgcacaaattgaagagttcgttcgtttggtgctcagttcatggccttcatatcaatttgcgattaaaaatcagttggcgggatcattaacaagtgccaaggcaaaaaaattttggcgcaattgcaacagatttatggaaaggcgctatttaaaaagagtaaacttttgaattctatcaaaaacaacaggggggacctttttgttttgcaaaatttttttgaaataaaaatccatgaaaatttgttatccggggttttaaaggtcgctgatcacgaatctgacatccaattcgaggtcatggaccccaagaaccacagggaataaattttcatgactaaatattaaaaaattttcggcatttccttcccggataccaaacagttgaagcaatggcgcatttggcaggaggaggcggccaagcgggaccaccgcaaattgggccgcgaccaggaactgttcatgttccacccgctgagtccgggcactgccttttggtacccgaaggggacgcacatttacaacacactgctcgagttcatgcgacgcgaataccgacgccggggtttccaggaggtcagaacattcaatagtcgaatgttgccttactaccaaaaacaaatgaatgagttgacagaggttttcgattgagcctttcccttgttccaggtaatttctccgaatatttataacgcaaagctgtgggagcagtccgggcattggcaccattatgcggagaatatgttccggtaagtcttttgggagagttaatgtaatttatggagcatgattagagtggaaaagtcggcattccctttaatcatttttaggttcgaaattgagaaggagcagttcggactgaagccgatgaactgtcctggacactgtctgatgttcgactacaaaccgcacgcctacaacgaattacccatccgttatgccgacttcggtgtactccaccggtaaatttaaattttatttttgttcattttcctgtccgttttaagcaacgaaatgagcggcgctttgtccggtctgacgcgcgtccgtcgctttcagcaggacgacgcccatattttttgccggaaggaccaaatattgtcggagatttcgggctgtttggattttctgaattttgtctacgtggaagtgttcggcttttccttccgtctccatctgagcacgcggcctgaagagggctatttgggcgacttggccacttgggaggcggcagagacacagctgaagcaggcattggacaacagcggactcaaatgggagctgaacccgggcgacggagcattctatgggccaaaggttggcaagcggaaactgattgatttatttgcttttagaaatgccaaaaaatcaactaaccaaaaaaaagatttctccgttgttcttttcttttccagtccaagggatggaatacatttacatacattagtagttacacgatgaacaattaagattgacattcaaatcaaagatgcgttgggcagacattggcaatgtgccaccatccaattggacttccaactgccccaacgcttcgacctttcctattacgagtgcgtcgtctcaaaatatgtcaaatatttattatacatttaaaattagtgagaacaaagagcgtcttcgtccggtgatgatccatcgtgcaatttacggttcaatcgaacgaatggtggcaattttggcggaaaattgtggagggaaatggcctttttggctgtcgcctcgtcaggtgggcacattgaattttgttactatttctcctcttatttgccaatccgacaggcaatgattatcgttgtgcaccattcggtgagtgactacgcgagcaaagtgttccgccgcattttcgacgcgggcttcgaggtggaatttgacgaggacagcccggacacgctgaacaaacgcattcgcaatgcccaactcgcccagttcaacttcattttggtgatcgggcaacaggagaagaacaacggaacagtgaatgtgcgcaccagggacaatcaggtgcagagagggaattgtgaaaagggagtgttagaggcagacatggaaggggtgagaaacactgcatgtgagagaggaggaggaatttcaaaaaagtaaatcatcgaattgagtcaactcaattgacattgctttttcaggtacgcggtgagattgctgtcgatgcgctcatccaaaagttccaaattttccgcgacacttttgcccaagacacagaaagtgcaggatcttttgaaggcccgaaggaacaaaaagaaattttggatgacaaaaaatgaacaatggcattgcaatttcattttcgacgggtttttgttgttaacaaattgtgaaatgttccatctggttttttgtttgtttgttaattacaacttgtgagcccagatgataatttcaaaataaagttgctatgtgcacaaaaactattaatttggaaagttcattggcattagaatttatactaaatcaatttggttgattgtttgttgatatttggttctcacgaaggtaacttatggcgcaaaatactgcacaaattgaagagttcgttcgtttggtgctcagttcatggccttcatatcaatttgcgattaaaaatcagttggcgggatcattaacaagtgccaaggcaaaaaaattttggcgcaattgcattagatttatggaaaggcgcgctatttaaaaagagtaaacttttgaattctatcaaaaacaacaagggggacccttttgttttgcaaaantttttttgaaataa

SEQ ID NO: 9770 - DNA, 1101 bp, Heterodera glycines
  unsure (1)..(1101): unsure at all n locations
ataatccttttttacattgtatttgccgttgcttttgttcaaaattaccaccaaaatgtcggaaatgtcaatgccaatcctttcgcaaatgagccgttttacgcgctcaacttttgttgtggtcggaaggcgcaattcgtagcgaacaattggaacagttgggtctttcaaaaccactgaaaatggtacaatttgaaaatgaatgcttacaaaagacagcacttgccttggaaggaaagcaaaatggtctcagagacgggaatttgcaactgcaacattgtgaacagctcgaatttgttggacgcatgggcgcaagacggacagcgcaaggaggaaaggaactgaccggcgaacagatccaaaaccttgggaaacaaaatatcccatgaaatcaatggatggaaaacggaattttcttaaaaatgattctttgtttttcctcaattccatgcttacaatgctgccctgccgtgaacagagcacttccttctcccactgctaaaataaaagaaattaacaaaatggtctaatacattcattgaaaaaacccacaataaatttcaaatatctcgtttaaattttcatttcgaagggggtgcccttccttttgctgatttgcaagcccttgccccactctcccaaaatgcaggggaaagtaattggtcttaaacggggttcgaaaagtatacaattccttacattattggcattttgccaaactgtgttcccctcatcagtttcatccatttcatttttggctccttcagtgatgctttttttttgcttggcctttctttgaggaggttggtcagtttctccgtcctcctccgtccctttttctccaattccatcgtccggcgaaagaattcgacgaaaagcggcggacggagaagagggggaggatgaagcacttggacttgggacggtttttaattgctcgtgcaacgcgtccaaaaaaaattgtatgaactcttggctgtcgtgttgcagatggtccgcaaaatgggaacacaaaacggagacactctcctgaaaatgngngaggngattgacaaatcagagaccaataatgctgaacacgtgaagtctactagtaatttt

SEQ ID NO: 9771 - DNA, 3935 bp, Heterodera glycines
tcccaaaagttccaccctcggggaataccttaaactccaccggcgacgccgtctctttcgccaccaaaagggagcggagcatttgcacgtaatgcctcactaatggcaaatgccgaaattgctgctcactgtttggtggtgcaaaaaatgggaaaataaattcaaaaatgagcccaataaaccacttgctgagtaaaaagccgctaagcagcgaaacattggccagcgtttggatggccgcccccaaatagcaagtgttgccaatgtttcgtacgccgcccatccgtcgccgtccccccgggcgttgcttctgttcctgtccgtgttgtcgtcgtcgttgttcgtcatctcctccatccttttggcgttcttttccttcttgttcgtcctctttgtcttcctccgatttatcgtcgtcaacagaaatggcagcatcgttacacgttgtcgatggtgacgaaactgttggcgaactgcttggactcgttgtcagtgcaacccaaagctaaaaggatgccaattaatgaacgcatttttgaagatcaaatacaaacggtttaattgtaagaaagaatttaaacaaagaggaaaaagcgaaattaaataacaagagattagaaaatgccaaattttacttcttttttttttgaaacttatttagcaaagtaattcaaacagattttttcgaattttgttactttgtccgaaaattgcaaaagtgcctctctgactgtcgcacttttgctggccaaacagacaaagtcaaaaatgtgaagaggaacagcgtcccgcgtttgctcttcctcaacgtgaggcactaaaaggtcctaaaaatacgattagtaaaaaagttgtggagttcgccaccattgaaaatccaaaaaaatcagcgatttcattcaaatcattgcacgatagaatgccgtccatgtcggagtcccaaatgccaacaacaacttaaaatttttggttttcctaaagaaattaacagccgaattcgctcacatttcattcgttccgcctccggcccctggcacagactggatagaccgcacacgtactccttgaacccgatggcgctgttacagtgctcggtgaacagccgaaacactctgttggccacctccgaccgtttgatgactgacagaacagtggacacaaatgtactgtccgcgatgctcaacgagcggcggtcgcatcgttcccaaaaacggcgttcgagccacgcaatttgatcaacctcaactaaacgtgccaaaaaagtgttgaccctttctttttgcaaattatgtgatttgaaaaaaatgcacttttaagtacttaaatgcatttgaacatagaatttcagtgatctaataccaggagtattccaacagaagttagagtttggaggtatttgtccacatgaactttcatatttttaacaggcctggaaacgcttaaaaactggaattattgtccccgccctcccccctcgtgaagtttgacatgtatataaagctctaaaataaagagaaaggaaaacatacagtgcgtgacaccggcaatgatttcgttcagtgttccgttgcattcgctgtattttggcacggaaaaaatggcaaatttgtcccacttgacgccgcatggccatccaacagttttgagcgcatcgaaagccaacaaaaattgatcccccgtcaatgtatcgctgccttggaaaacgaagtcacaaatctgcgcgcaacggtggcgcccaatgtccggatgggtcaaaaactccgccacaaactctgccttaacagagggaaatgtgtgccgaaatcagtcaaagctgggctggaaaatggcaaaactgtggcgttccgggccaataaaaagggaggaggggtcattttgagaaataagatgcttttgagcttgaaaatgcccacctttgtcattgtacgccttccggcccaaaattccttagctcgcgaccgttccctttcgtccattccttggaaaagacatttaaaacagttttaactaacaatcgtaaagcgatgaatattttttaggcgaagcaatgacaaatgaaaacacaattatagtacccaaacaaacatacagtatcactttttcattgttaaattgacaatatattacaaaatcacaggagaaaaaaaagtggaggtggaaataggacaaaaaatgggaattaacaagcaatttgcatgcaaagaacgcagacgggggcgtggttgtccatttcgttgttgctatttgctctttttctgatgcaccggtggcaataaatttggccgcaccattggcaatgcacgcggcgctcaatgcgtgacaaaaattcgcgtcggcatttctcattggcacattcgtctgcgttcagcaacggctgccaggcgaacgaaacgcggaggcattcctaaagaatttgagggaaaatgaatttgtttttaggttaaattttcaattttaatttggattaaaatgcctacttacagaatccgtctcgggcatagccatcactttcttcatggattgcatgtgcagtttcgcattggcaaaaatgtcgcttaaatattccctcggctgaattccgacgtcgaagcgattgtacagatttgtccacaccgcaaatgaggacaaactgagctcaatgtcgcacagaaagggctcatttcggtgctgcaaaaaatgtaaaaattcgtggaaaattaattgcacaactcaccgagtcataaaatgggttcaagtaatcgtcgatgtgcaaatccatgtgagcccataacgaattggtcttggacaccgtccgtaaatcctacggaataatgagaaatttgccaatgccaatggatatttctagcgggaaaatacacttttacctttctgtccttgtcgcaattgcccacaaattggccatacacacatgaataggcatgctcgttcaattccaccaaaaagcgttcgttgaactcaaaaaacgcgggtttcttgcgcaacaattggtaaacacagtcgagaaattgggtgaaaattggcgagacctaaaatttaaaaaaacgagtttttcattaatttgtgtctaaaatgtcaaaaataagtaaaatgaataggtcaaataaaaacaaaaatctccaatcgcactcgtaaatttggggtaatttgtaccgattaatttgcttcccacctctttggccatttcttcggcagaagcccccaaatggccgcatctgtcgtcaaatttgaagccaaagccaagccaatccttgtcgacaagaacctaacacgaaaaggagcaaattacacaaaagaaataataatttcgaattattgtacctgaaatcctttcactgttctgtagaaagggtcgatgaccaattgtgccaatgaaactgtttgtgaagtgcggtcccatccatccgagcactgacaatgagtaatgaaacttacaataaaatctaataacatattgaaaatgtttagaattcggttcattaaggctttttactaacgaaatttcggagggaaatgccgttgtcaaacggtggacaacaacccactcacgtgaataacacaagagattccgcgcaaaattgactctgcgatgaacacactgcagtcgatcagtgctggatggagatttaaaaaatgaaaaatagttgaatccccaaagggttcacagtacaaaatcaaagtaaaattaatgcctaaaacttttaaattatacttttcaaatgcctcagccacccgcaagcatcaacaattttcaaatattgggtcattgtttgagtccgttggcatgctaaagtaaaaagtattggtaaaatcattcgtattgtatttaacaaaaacgaacaccttccagcagtttgttgagacttgctcgcatcacatgaatgttctcaatgtcgaaaaaatggaactgaatgttcgtgtaattgcgcgtgtcttca

SEQ ID NO: 9772 - DNA, 1338 bp, Heterodera glycines
acaaattaatgcatgttttgatttaaaatagataatgatttaattaaagttaatctgttgcgttctgtttatcaaagaaaaagaaaagaaaacgaacaaatcgaataaaattaatcagaccattttattttgttccaaagtctctcgtaaatttctttttttttttagtcctaattgtcttccttttcagcttacaatttaaaaagctttaatcaaaatggccatgttggctgcttttcccagaaacgccgttgcctttatgcagcaatgttctcgcttaatgagtgtcaggatgaaaagcagttctattaaggcattaattaaaaacttaccggtttaagtggatttaaaatcgtttttaaggtaactttaatcggcgcaagtggaggcatcggccaaccgctcggattacttttgaagaagaacccttccattgcacacttggcactttacggtgattaaatgtccattatattaattttcgactcattttgtattatagatcttgtcggcacccccggagttgcggccgacctttcccatataaacacccaggcaaaagtgactggccatttgggaccagaccaacttgttgcagcgttggagggtgctgacgttgtcattattcctgccggtgtgccacggaagcccggttggtggcattaatattctgctcacaacaaaatgattaatttcctttgttttgcgaattttaggtatgactcgtgacgaccttttcaccacaaatgccggcattgtgcgggacatggccgaagcagccgcaaaaacttgtcccaaagccttcatgggcattataaccaatccggtgaactcgacccttcccatcgcctgcgaagtctacaaaaacaatgactgtttcgacccgcgacgcattttcggcgtcactcttcttgacattgttcgagcacaggcattcgtttcagaactaaaagtgagtgaacatcattaaaatgagtcaaagttcttcatttcccttctttttaaaggggttggatgtttcccaaacaaaagtgtcggtggtcggtggccattccggagtgaccattgtcccacttctgtccagatgtacgcccaaagtcagtctgagtgacagtgagacgaaggcactcaccgaacgcatccaagaagcagggacggaagttgtgaaagccaaggctggcgcggtgagcctttcatttacagtcaaatgattcatatttaatatctatagagaggccataactgagggttccctccaattttgtcatattttcatttccgaatttcaggggtcggccactctttcgatggcacttgcagctgaatactttgtgtcgg

SEQ ID NO: 9773 - DNA, 2327 bp, Heterodera glycines
gaaacacgaagaccatttacagattttctgacgacgagctttttttctttttttggcctattacactctatgaaatcctatattttcgatattattttcggcatcattcgaaaacactaagaaaaatatataagtttgaacctgaaaaaagtatcgtctaaaaaacgcataatattatagcattgaaattataaattttgagtgaactcataaaatgtaaaataattttttgctgttctcaacaactcatcgagactcggtcgagaaactgtcctattcattcggtgcaaagaaaataattcgagtggttcgaccaacagccacttttctggacttttatccaatcatttggcttacattgtctttttttttattcctattaaatataaatttgttatttttatattagaaaatgcattttctattaaatgtgtcaaccgttttctcttccgctcttaggcggtggcattgtgccgttgcccactgctcgtccgtctcaaattggtgtgggcctccaattccaagccgaacttcccgaaaatgatgacgaacaactgcaaaaggagagaccaaaagcacctgatgaggaggacccttatttcaggtagaccccgaacattattctcattttcctctttttatttcgaaaatttgatcacttaaataatatttttagcattttaaattgaattttcttcccccactgctaattggttacttttctgttttagacccccccagaaattttcaaataaaaaatcatttctagggtaatttgtgacggtgatcaccaatataacctttgttttgcaaaattccgaacccctaatgaactcgaacaaaaattcgattcataaattacaaggaaaacgcattttggtaacagttcagtttgtcctcacattttttaattttattttaaagtcataaaaaacattttaaggggtattcgggatagctgatcacgaatataacatccgttttgaacaatttcgaaccccgaacatgaattcgaacaaaaagtcgaattgaatttcgctttttttagaaaaaaggtttaaatggtattttattccatgagtgttagattttggtttattttcatgaatttcattcgtttttagacgaaaaatgcgaaattcgaaaattttaaatttgcgactttcaaggggtgggtctcaaaacagaaaagtaccgctaattgttgtcaaaattggcacatatttttccatatgatttagccaagccgaccccgacgaatgcctttggaatggctcaaaattcgcctcgccaacgttcatctcttccaaaacgccgccatggttctccaaccagcagctgctgctgaacttgaaggagttggagtcgttctgctccgttgcacggcgacactccaacttggacattgaaagggtgggagaaattttcatttttaaagcattgtttacagtagtacgtttggggattgtgccctggtggcagggatactgtggtccttgtgatgttttgtaaaaaatatttgaattcactgttttcccattgtttttaccaatatctcttatatagtgtgctgctcgagactgaaaatttcccgagactcaagaccgaaaaaaacccgagacttttctcgagccgagacaaatttcttacgcacaaaatttgtttgaggcacaacttgttgcaaatcattaggggtgtacgaaaacccgagaatttctcgagtgtcaagaccgagactctcgagcagcactactgttgtaacttgtagtaaaatgccattgtgaattccaattgcaggccctccacctcttcaacacgtccaacttctgtctccaaaacgcactgcgcgatttggaacaattcgctgccaattgcaccaatgcaactgtgaacacaaaatggacacccgacatggatgaacagttcattgaactgttgaacaaacaccagaaaaattttgggaaaattgcaaaaaatgtaaatcattttgaccgtaattttcgcaaatttctacggtgtctttttctaagctaccgtatgggttgacggtggcccaattggtgcaacggtattacacgctgaaaatggagcgctgtttcacctcaaacgaggctcaatttgtgcgctgttccaaccttaaaatgtgagaaagagagagaaaagaatttgaagaaattttttaagcatttggccccgtaggggtcaactcagtctgcgcaaagttcaaaaagttataacttttttctttgttgaccaaacttaataaacatggtattattcgaagatgcctttaaatgtttagaaaatattctcagctaatttcgtaa

SEQ ID NO: 9774 - DNA, 2587 bp, Heterodera glycines
  unsure (1)..(2587): unsure at all n locations
ctacggtgtctttttctaagctaccgtatgggttgacggtagcccaattggtgcaacggtattacacgctgaaaatggagcgctgtttcacctcaaacgaggctcaatttgtgcgctgttccaaccttaaaatgtgagaaagagagagaaaagaatttgaagaaattttttaagcattttggcccctgataggggtcaactcagtctcagcagcaaagttcaaaaagttataacttttttctttgttgaccaaacttaataataaacatggtgttattcgaacatgcctttaaatgtttagaaaatattcttagctaatttgtaagtgattaaatagcttacaaaaaagttgtggtttgaaaaccgcaaaaaaagacagaattttcgaagtttttaatctctatcttttttacattcgacattctcaacagataccttgattattggattcgggcaacaatttagaagatatattgactcaaagttggctcagagggagttggcccgttccgtttggccagctggctttttgggcaaatttttttattgactttttttttggaccatgaatttgtaagactttgatcgtttgaaaaactgaataccgtatatgctctaattatagcccagtctctattaatcccgtagtctccaattatcccccagtctacgaggtgttttgaaaaataatccctctatcataatccccccagtctctaattatccccccttttctgaggaggttgaaaaataatcccccatgggctataattagagcatatacggtaaaaccaaaaaaaaagtagcagttatataattcttttattactagacatgcattaattataatttttttttaaaaatttattcattaaataaaacaaattatttatttttttaggtttaaattttattggttcttttcgttcttttctaaaaaaataattttttgttatattgtattacgtttacagaggggtttttgattagtttttggttatttttatggttttgaaaaccattttttatcccttccaggattttccaattttaactatgggtcattatgaatttttttaaaattattatttattagccttggctctcccaccgatccgcaagaactgtcgcccgtccctcgcactcagtgcgccaactgcatgcgaatgttgtggcgcaacccgtcgaccgctgtcgcggaatggcgcgggcgtcgacggccgcccgtcatgtgccaaccgtgcgaactgtacgcgaggtgtgttttgttacggcacaccattgcattggattttggcatgtgccagaatacgaatttgatcacgttaagaaaactttatgaaattttggtccgtcggggagcagatctttaccccccccccccccccccccccgtatcaattccctccgtgaatttttttttcaaaaacttcaaataaaaaattattaaattttcataaactttgaaaaccttttcagcaattaagatgaattataatgtttttttcaaaaaagctgctgaaaaattcccatttattttgtaatttatgaaaatattttaagtttcaagttttaaaagcacacttttcaggaagcaaaaaaagcaccgtcctgtccaactgttgctggaaaatgacccgaactatgccgacgacctcagcaagcagcgtaatgagcatgacaatgctggcacaactgccgttgttggcgccgacacaacgggcgcaaaggcagcggaggttgcgccgcgacggcactatccgtgccatgacgatcgcaattgcatgttggcatgtgaggcagcaacacgcgtgcgagtgcagcaacagcagcgagcatcatggcacttcaacatcaaagaggaagtgccgatgacgccggaggacaaagcgggcgcggtggcgattgaacaaagtgacgatgaagcagcggacggatcaaatgttgctgagggtgaagcaagaaatgagaatggaggcgttggcattggtgggggtggcgagcagtacaacaacggcgacaaatgtctacagcaggaggaggagcgggagatgaagcagcgctgggcccagggtaaggacgactcatcaaactcattctcaaaacgctcacaaattttggggaaaatgaactcaaaagcattcaaaaaactgtaagaattgattctaaaggcctaaaattgggaaaaatcagaattagttttttctttctcataaaagtggcaagagagtgccactaatttggttttttagttcgggacctatgttaaatatttgtcaatttgtttattaaattagcatttgatttcgatctgttcagtcgtgccatacttcaaaatttaatccttctaagactagcatttattgtgaaaattctttatttttatttttattcaaaattaagcgtttgtggcggaaggaaacaatttctaattgtgctaggtcaataagaattttcgatatttttttctgtttttttttctaacataaaaaaaatttgtggncgccgttttgtcctgctccncactcaaaagcgttcaaaaaaacatccngaccgaacctattcaaaaggnctaaaaacttgggca

SEQ ID NO: 9775 - DNA, 1306 bp, Heterodera glycines
gtcatcagtagggcgtgtaattatatggaaatccatatttttttcctggattattggaggcctgaaacgcacgaaaaacatgtttttagcttggtttgaagcttctaggatggattcctatatccattttttccatatttttccatatttcgcgatttatgtccatttttccatattttggcattttcgtctatattttatgtccatattttgggatttttccaaaaaacctctattagaacggcccccagcagctaaatttgcctttttgagcccaaaaaccggaaaattttacaaaaaattattttttcgctaaattttctcgagaatattgaataaattcaaattttcttagaaattaataaatttatgttaaatataagcaaaaaaacgaaaatttcgcttttcgggttgatttttcgctaaaaataagtaaattttagcttatcgtgtttttttcttctaaaatgatttctaatactatatttagccatttttgaaggttttactttatattttacaaatttaaagaacttttgggaaattataccctcattggaaaaatttatgtccatatttttgccattttatgtccatattttgcgatttttggtccatattttatggccatatttcgcaattttatatccatataattacacgccctagtcatcagcaccttttttcttgtaataaaatgctaattgattttgctaattggtggtttcgtctctaattggcacttcctcgcaatttggcaccggcaaatttgggcaaaattgcacacaattgttcatctcctcaccacactgcttatgatgttggttctgttgttgttccgagaatcccggctggggggcgaaatcgttatttaatggtgttatttaaaaaatatatgaaaattttgaagaaaaattattatataattctgttcaaaagcatattattcgatagctctaactgttctctatcagtctgcaaaatttcaaaaaattttgttaagtttcaaaaaagttatgcctaaaggaactcaaaaaaccttgttttcgaacattttgaccataatttttttgaatgttaacaaatttttttgaaatttttgcaggaaaaataaagaacctttaaggctatcgaaaatatcaaggattaaaaatttgattgctaagagcaaaattataaaatttttaaaatttaatttggtggtttaaataacgacatagcaccccggctggggcctagggctgtgcgaaaagtgatttttaccgggaaccgagaccgagaaatgaccccgggaaagatacgagaa

SEQ ID NO: 9776 - DNA, 2568 bp, Heterodera glycines
tacctatacaatcgctgcttcacattccggatggctctctccgcaattgatgcttttactgtcgaatggacgggttcgtgcttctcaatctcccgctcctcaaagaattccttgagcaatctgttcttgaactcggtgcccttgtcggagaaaactcggtggggcgccatgggcatttgatcgatgagttgcttgaatgcctccagcatttcctcggctctcttgtttctcagcggtacaacaaacagacgtttggataggacatcaaccgcaacgagcagataccgatgaccccgattgtggcgcgaaagagcttgaaaatctgccaaatccacttgaacatcggtcatgaatcccgctgcaatagttttggcccttggaaaacgtaccctgcgggggcgcatcagagtgtaggtgcggtgaccatccaaataatgctgcacgtcctttttccgtaaatgtttaatcttttttcgcgcctctttccacagcgctgtaacacctgcaaacgccgctggggaagatggattattgtacaatttgtcaagagtggtgttgatcagctccattttttcgggcgaaattccttcttgattgcccgtgccgtccgggtggttttgctctgtgatggtctctttggtggagccgtccatgaatacaaaattgggtcctgcctaagcctctcttccaatatagccgctccaggtggcttaatggtggggcggcccgctcttctgtctattatatacctgatgaccattcgcaaattgctatgcgccaacggcttgccgtttgcggtgtgaattgtattccccctaacgcccatacgttcagcataattgttgattttgatgtataatctctcaattctctgtgtcatggtcagttgatttgacggaatggcaaacagctcacgttgttgttgttgttgttgttgttgttgctcatcactttgtgcagatgttgatggacctggctcgggagagtactgtactcttacccttctcggttgcctcactctttttcttatgcgcacctccccgtcaccatcatcatcatttacggggtggcggcgtttggtccctctcctaggaggaggaataagaggcatttcttcgacaatagcagctggaggaggttggcgttgttgttgttgttgtggtgttcgctcaattttaggctctcttttcggaatacggtacggcttgggtctctttgttggatcgtgttttattttaggtgttgagggaggcgggttgtacccagcttgccttgatgtggatggtcgcgggtccagcccaaactccggttctctttttggacgaggcgtaggggtggggtgaccggttttctttgatgtcgacgatttcaattctgcctttgtttgtttttggtgttctctcttggctgttggaggaggtcttggctcagatttccgtggcggagatgggagccgtggaggtgaagggtgataaatcctatttctttttcgctgtaaatcaacttcatcatcatcatcatcatctgccaagtccttttttaatcttcgtctggtggcaatcctgcgctgaacagtgtccatctcctcaatttcgtctgcgttgtcgggtagtacaggcaaatctccatagtactgtgatggtgctggcagcgcgaatccactctccagcatatagtcatattcatcgtcactttcgggcaatggagccgcagctgcttccgccaaaagatcccgcaccacgggccgccgtagttgtatatcatatcgtcttttccgccattgctctatgagaccacctctccgagaaggtgcagcagctctacatggtctagggggacgttgtggacgaggcggtggacttcctggtggagaaggagggctgggtggacgtggaggacgtctcccaggcggtggaggtggtggaggagcgggaggatttggtccacgtggagggcatttacctggcggtggaggtggtggtggtggtggagcgggtggtcgaggtggagtatccacaacctctccatcttcatcttcgccacctctccttaacagtacacttattccttttgacatctcaacttttgtcggcatgtttgttagttccctcctcattttcaaataccgcctaagttgttggttgtagttgacatttttagcagagggatttgttcgttcgcccctggttcggttcaaatcgtgtcgtacagcatccaaattaatgtcacccgtgtccgacattgaggtcaaacccctgtaaatttcttgtgggacaagtaaaaacttattagccatgttttattgaatgaatgatgatgatgaatgcacataaaaacaaagcagttgtgggtatttatgcatgccattaaattctcctaaaaaattgacacacttttagattaaaaaaatgaaaatagcagaaagaaaagataaatatatcttcacaaattggggaaaatttgattaagaaaaccaaataaaaacaatttgcctgattaagttaagtcacattcatttgctttgcgagtgtcggcgccgtctcgaaacgaataattgatcaaaataaa

SEQ ID NO: 9777 - DNA, 1442 bp, Heterodera glycines
ttcgtattttaatttttacttttttgaattttattttaatttatgtaactactttaatcaaatgacaaaaacgtcatatgacaaaaagtctcacatgagaaaaagtatcacattgtcatatgaaaaaaagtgtcacattgtcacagaaagtgtcacattgtcatatgaaaaaagtgtcacattgtcacagaaagtgtcacattgtcatatgaaaaaagtgtcacattgtcacaaaatgtgtcacatgacaaaaaatgtgtcacatgacaaaaaatgtgtcacgtgacacaaaatgtgtcacatgacaaaaaatgtgtcacatgacaaaaaatgtgtcacatgacacaaaatgtgtcacatgacaaaaaatgtgtcacatgacaaaaaatgtgtcacatcactgtgatactttggactataaaaggagctcattttgatcattttgctcattgttggcattcgtctagcaaacgaatgtcgcggagcattactccgcagagtaggcttttctgttcccctcttttaaggaggcaggaacagccatgcccccggaacgggtgatataacgccccgagggaggaaggggtgctcacccatcgcaccaatggtgcgtgtgcgtgactggctcgccgctgactaaagccggcggctggatggacgcgtgcacgtagccgctgtgtgcgcatgtgtggtgcgcgtgtgccgactcatgcaggggcaacgagaagcagcacgcgtgtgctgcatatgtgcatatggcggtcgcgtgtacgtggccacctgacttgctggctggttagacgcatgcacgtggccactgagtgcgcatgtggactgcgcgtatgccgcctcgtgcaggggcaacgagaggcggcatgcatgtgctgtacgtgtgcatgtgacagaggcgtgtgcatggccggtagacgtccgtgagctgttgttcgtgcgttggtggcaagagcaccgtggcaaaactccacacgcattgacgcagcgtgtggtcggttgtaaatggtggcttatcgttgttgtatatataacaactaatcactgttcaatcgttaacgttattgaaagagcaaggagatcagttctggacggcgtttgcgtaaggctttcgtcgtgaccaccttgcaggggcactttaccggtcacgcagagcagcttagtgacaagccggtctgttcaaattgcttgattagataacggtattattacaacagaaaattattttaatataaaagttattttgacattaataaaacagcttaaaactttttgaattattttaaattgctattatttattttgttgtttgtttaagtattggaaaattatttcttacttttatgcctatcaactctatatgtaatttatagggccgcgacttttagtgacgaaaaatcccgaaatagttaactaaaatagtgtcgaaaaag

SEQ ID NO: 9778 - DNA, 2663 bp, Heterodera glycines
ctgtttcgaatgacaacaaccatgggcttaaaatatgaacttattaaccaaaggcaggggtttgttgagaagtgtgacggctgctattttaatgtttttcattctaatgtgcaggtttggatttttcaaacagttttatttattttggtttttatgttattaattttaaaatccagattggtgaaaatttaaatacacaaaaatccattatttttgtcttctaaggaattttatttatattttctatgttcagtttccaccgattgtgtggccaccacctgaaggtgcttctgaagatgttgtaagccaacatttgaaaccttttcatgacgtgctgcgcttcatttctgctaattgccttacaattgttcaacatcctgaattgtatgatcaagcgaaaaagactcttgatgcggttaacctgctcaatggtgtgttggatcagcatcgacgacagcaacaggggcaggggcaacagcagcagtacaccggaatgactgtgttggaaaacagtgacaataaccgccgacaaactaataatggtgatgaagaaatctacatttctgatgctgatgacgatgatgatggcattccatttcttgtgcgtcgcttcttgaacgctaacattgctgatgaacaaactgtaacagcagcagagcaacctgattatgctaatggtgaaacatcaatgttttgtgatgacgttgcggaaatggagtgtcagcagaactagtcttgtactggtaaacctgcttatatatatatatatatatatatatatatatgcaatttattttttagaggcagggtttcacagcgtcagcgtcgtaataattcttttggttgaagctgttttttcgcgtctttttttaccgaaacattgacaatcaactaaaaaaggcaaacagaattttttattatagatttcaattattgttattagtttaatatataattcttttttatcatacaggcaggggctttttgttttattggatgtattggatctactgtgcgtgatttagtgctaagaaatggtggacgaaggaaaattttcattttatggacattaaaccttcgttttatcattgttacacatttaaccttttcattaaaattttcattgttaactgattcgaccttattttgtttatcgaaccaacaaagcatattgaattcttgcttttcgtcggtaaagagagatattaatgttttctgttttcgtaaaaagaaaagcaatgtccgacccgaaaaaatacaatattgaacaagcgcttcaaaatactgaacgtgcaatcgaaccctcactggactggcaggggccaacccaacagcaattggaagagaaatgttagagaattatattaaaaattacgtaataaaatgtgatgttttttggtatagatataaaaaattatgattctctaactcctctttttaaagcaatgcaagaagaaaacagccctactgcaccgtcaccgttccagcatcagctagcgcagcagaagcagcagcccagtcgtctggtaagcaatgttgtatttaatgattcttacatgaaataaccgttgttcattattctcagggacaacataattcttctcagggacaacaccctcaaatgcttccaactccactacatccacctcttgagctgtttgaggaaggtttgcgttacaccgccacctggacttttgctgctatgttcaataagcctttggaagctgaaagaattgccactacgttgagcgatgcttcaatgttgttaaacatgtgtgtgcaaattctgaatcgccgaccacagcgtttgcagcacggattgcaacatccaacgtccagttcgcagcagcactagtaacggcagcagtagccgccgctaagtaattttccatttttatgaacaataatttaatttgaaaatattatttatcatattatttcttatcatttctattccacttgtcacagttcattagtcggcattagttcagcacttcagcatcatgcaacaacaccatatggtcgtcgttaatccgctcgcgggtgtggcaggggcagaaagatacatacacataagagctactgcctgcaaaatttcttaaattttttatttttttatgggaatcggcagtttttaagaaaatttcgaatcatagacgtgtaattttcgcgtttcattaaaaagatcgatttttgaaaatttctacgtggtaaaaaaaattaagaaattttgcagtgcaaagttaactcattctgatcgttctcgaaatgataccttaatttcccaatgtttattcattttgaaagaccagtaagcaaatattttttaatgtcttgataaaatagaaatgttaaaatgcttgtactggatcacatttgaataggatatatggtttaatattgaaaatattgagaaaaagagcctctgaacagaaagaaaaaatatcgtatgtatcgaaaaagcacagtaaacccacggcaacaatttgatttgctattactagggatgatatttttaggcaaaagcctattttttttcctgagctctccgtggcctgaaacgcacgaaaaacatgttaatttgggctgttgttaagctacttttcgagttattagcaattttataggtttttatttttagcacctaaaaaacctaaaaattt

SEQ ID NO: 9779 - DNA, 2560 bp, Heterodera glycines
aaaaatgcacccctaagaatcggcctaatttttttttttcaaaaaatacacccctaagaatcgaccctaaattttttaaaaatatacccctatgaaatgaaaaatttctcaaaaaatcatctccaaaattaattaatttattttattgacgataatttttgattttgaaaattatgtatctcattaatgatttggcataatatttttgtttttgaagaaaattttcgattttacaccccctaaattcggaattttttagagcctattttcccctatttttgggttttttagagcttaaagcctacctattttggcagtttttagggcctaaaaatatcatccctagctattactggcaatcagcggtgacttggaccatcagagatggagttgaattgagaacaataaaatcaaaataaattaagaagaaatcaaatccccttcgctcaccgcacgtcaccgtcaacatctcccaatgcaataacaattcggtgcattttgttgcctacaaaacctctcgacggcattctacagcatttcactgtccctttttttaccccttttattgcgcaaatgaccggtaaaaacccatttcgttttgcccaactcgttttttgtaaatacatttatgtaggagtgcagacagtgagaagttacacagttcatatacatcacgtaaaaaacgagttggataaaaaatgagttggccaaaattcaaattgccatactcaccctccatttcacgtgccacgtccttaactgtgcggtttttggctggctgtctctggagttggtggatgctgctgatttgtgcataatgactgataatgttttctaatcacctaagtatttgggtaagaagttggaaatagcattaaaaaatttccaatttccaattgaaactcgttttaataaaatttcgtcaagtggagttgggtcattaaaaaggcaaatgttaatgtgaagagtaaaaaattttagaatttaaatgtgaataataaaaaatttaaaatttaaatttatccattcatttattattttataagatattcttgaagtaattgcgaacagggctcggctttatatttgctactataaatgcacgaaatatataaatgttatgtttcatctcgtcacaaaaactgaaaattttttactccgacgaaatttttaaatttttaacattatttgaatcttaatgaaaattttccaattcgagggatcatttaaaaaaaacaaattccagacgattcttcggggctgatttttcgtttttattgcttttttcagataataccaaagtaggaacaaaaaatgaatgaattttttttatctcatcagacattttactgtaaatgtttatggtccagtggaagacaaaacccagttttccgtaatttgaccatgactcaaacaaaactcattaaaatcccattttaatgtgcgattaaatttgggtggacgacggacgccctttcataaaataaaattcagtcgcccgggggaaggaaaatgaaaaacaattaaaatgtattattaataaatatctaatttaaacaacaattaattaattttctgttttattgtttttgttattaaatttaatggcctcaaatttatttgtccaaatttgcgatcaaaaacgaaaatcataaaaaataaatgcaataaatttgggagtcagcgtagtgccacaaattcaaatattatattttgttaaataaaaaattgaaaaaacaaaagtacaagttgaaatcagtcgaatgaaaatgatcggccgaaatgcgatttttttttttgaatttccgcgattggcgaattgtcctcccaaatgcccttttccgctggcgagggaatggcacttgctgcaccaaaaaacaactgacagtgccatagtttttttaagaagtagcactcagcgaatggcacaggcgaaaacgaaggcacgaataaaaactaaagtgaaaatataattacaaaaatactgcttttgttcgaatttcccacaattggtggttgaaatgcgtgtcctttgtccagcattgtgatattttgtcaacagtgtcgtcgctttgtcccctgtgcggtctgtgccttgacgatgggcgtcgtccgtgccgatgcgattggctcggtcctccgttggccgtgccgtggcgcgtgcaatgcccgcgcccgacgcgagtcgccgaattgggcggccgccgtgtcgtccacactgatcagaatgtgaatcatttgggcacagagtttcacttttgttttgcttaaccactccttttcaataaaatgaatgccatgaatgcctgttgatgcttttggcctcaatttattccctttggggcggcggataattaaaaagcgataattaatttggcattttccatttgcgcattttgtaactttaattcacgccctcgccaatgtttgcactttgtttgcccaaacgtgaaaaattaattggttgtgaaggtggaaaacaatgccaaattattgcttaattacagtcggactattggaaaaatgtcaacatggaaaaaaataaataataattttttaa

SEQ ID NO: 9780 - DNA, 2470 bp, Heterodera glycines
  unsure (1)..(2470): unsure at all n locations
ataatataaaataaaaagtatagaaaaatgggtccaattctgtcaccccatatgtttccccattcatccaattgtgagtctgactgaccaatttcttccatttcatcaaagtcctcctcatccgaactgctcgatgacgtgcagttattttctctcgtcgcattcgactgtccggtcgctgccgtttccgtcgagtcggcgtaattaaatgcaattgctgcgcgtttagaagccaattttctgtagaagggttaattgaagtgggaagtgaacagggcaaactcgcctcttcttctcaatttccctcctataggcggcgttcgccgattgattggcttgttgttgngcgggccaaaactctttggcggcgatttcgttcagaaattgcttttcgctgactgaaatgacaatgatttgtcagcgtttcgctgattaatgtaaatgccgaaatatcaagatgctctcattgtcagttgaatgattaccttttcgaaactcgttaaataccagaattcggtagcgttcgtaatcgcattgcaattcgatgacatcatcctttggactgaaatttaatccgatggaaattttcccacaaaatgtttcgccaacgcacatgtttttcttggccgaagcattgggcgctgtctcgggaatggtgtcgagataaccacggacatcgaagcggtcgatcagaatgttcgggtcgccctgccactttctcctcaaatattgcatttttaagtggcatcgggtcatgtctcatgcccttccccccttgaacattgcgttgtgcgaatccgttgcaagctctgtagggtcgacatggacgtgcatccgttggccgtgcaattgcataaacccctccggctcctttctctgtttgatttttcatttaaatcagatatttcaattttttaataccctttttttattataactttggtggatattcttctgatacccttaaactgaccacactttcatagaattgtttcctccgctcgtttctcttcgcattgtccaccattttggctctgaccattttctcctgtcttcgcgcctcatgccacattttgttggtctcaaaaacaactaaaaatcggttgaattcaaacagtcggaactcttaacagtgattggcgtgattaaagaaccaaataatatagtaaaatgataaatgataagcgattcatccaagtgataatccaaacattaaggtacaaaattcgaattttctcccgacaaaatttcgtcgtccaatttctgtctgattttacccaacaattgttcttgtcttcggattgagttctcatattcggaaatttcctaaacattattttgcataagtcgggttccgaggattgatgacacggagatgacctgttctgccatttcgtttgggaagttcagttgccaatcgaccgaagtgcgtgtcaattcgctgatcatacccaagcatgcgtcacgaaactgaaaatagcaaagaatgagtaatgaatgtttaaccagatcgagtcccaagaccactcactgcgtttggtcccctcccctccgtcgcatttcgatcacctgtttgacggagaattccgccgtttctttgatgtgctccaggattggctgtgggtggtcaacctctgtgaccacctgcgagagcagtgagttccattgcaccatcatattgttcagtgctgtgccaagcgcggaatcaggcggcgtttgtccaatggaactcggaaatgccgcaatcagagagttgatttccctaagctgaaagaccaaacaattattcatcttaattcaccacaaaaactccactttatctgcgctgaggtcacctcctccctctccttaaccattggataaatcagaaaggaattttatcctacaaaacctctctgagtctgtgttgtgtttccaggtgttatgttagacattaaaactgacaacttaaaaaggtataaacaggcaaaatttgtttatagaaattatttgtatatcggagacaatatttggaataaaccgaataattcgtcggtctcttttttaattgtgattcgatataaacagataaatttctttaaaaagttgtatagagactacacattgcagagaaagaaagttttaagaacaaagcaaaactctatcgtatgcccacacaacgacaaaaagccataaaaaggaccagacaaaattgtgataagtcagaagcgagctttttcccccatgaaactttgaattgaaaaatattcggaaattggcacttatacagccgaatttgttttattaaatattcctgaaaagttgaaatccagtataagtgccacgaaaatgcgggttgtgagaatgacgcatctaagggacgaataatggttcctctatctttggtatccacttgaacatgactgtcggttgtgcgggtcatcctcctcctcatttctgctgctcgtttgcgaatttgtcgaagtgtgac

SEQ ID NO: 9781 - DNA, 1284 bp, Heterodera glycines
ttcgttttctatttagtaaactttttttactcgtaagtctttcctggatgtccaactcctcggcttggctgatcaccggcgtcgccgctccaaacaattcttcatcggcagtctaaaaaataaaaataaaaagcacgtcgattttttattccgagaattgcctttgtaacaagaaacggccgtgcttcatttaggctcaatgcgattgccctttccatgtcattttcaaacttttttgtccgtcgcgtctcattccaaaattctcttggcacagtttccgctgcacaagcgggcaattcgccttcgacaacataaagggaccaacctaaaacaaaattaaacagttcaacatgaaaagattagacaatcagaaggattgttccataattttgaatgtttaccttcggtattaagctgatggacgtacaattcgagaaacgtttcagatacaatgcgcggtgctttgaacagcgaattgaggataaaccaagtcgtcccaattttgcgaattgtgaaccaatggtcctccaggtgacaaatgtaagcatgtgccaaacttaggaagagggagggttattggtctaccgtagtttacaataagcagtaattaaaatgaaatatcgtttttagctaatagaaaacgctatacattttcagctcaatcaaatcaagaaagaatttaatacctgggattttgcaaaaccttcatagcatttgggcttatgataggctccagactcaaattcgcttgacgacgcaaagcttcagttatcacctaaaaagataactaaacctgaataagtttgtgacaagcacctgaattgagaagtatcccgaatcgtcgtaattttgactttgaaactcagattcgtcccttagcatcgcacgttctctttggtccaattcttgagcaattgaagcgagagaatcgggcgtgaagtaatcgccttgcagaagcatgttcagtgcatgttgagcacacatacgtccaacttgctgaaaaacaattcatacataatctcataatatttcgaattctcttgtaggtatgaattcgagattccggtgtttttgctgattgataggttttctactggtaaggcaaaattaggaattttcgataaaccagcatttgttgatagagctttattctcttgttggaccatcaattttatggaaataaaaataccttttcgtggtaaactaaatccatgcaaacgaagaagagattgtatctaaatatccgctttcttaaaaaatagaaaaaaacgatttagtaaaaga

SEQ ID NO: 9782 - DNA, 1617 bp, Heterodera glycines
ttcttaaaaaaaagaaaaaaacgatttttagtaaaaagatatactgtcgcaattgagtacgaaataatattacgattatcgatagctttcaacaatttacttttttcaattcataaaaaaaacaacaacatatcaaaagacgcaacattgtttagcatccgtatcattttgcatatccagaaatttatgcagcattcgagtttggcccacgacggcggcccggtcccgctgcagcgacgttgacgtaacgaccttataacattgtcattcattttaagtgactcaaataaacttacgtttgtactgaatgcgacggaaggcacggccacgcttcttcttctttttctcctgtttctccactttaggtgtttgagcacgaactttccctgcacgcgccaatgatccgtggacctgtcagcatttactttttagaccaagaaatgaatgtcaaatctccaaagctaattttaagtatagttcattaattcctataaaagaacccttgagacggcaaacctttccaccacgaaggcgaagaaccaagtgaagagtggactctttctaaaacaaagattaagcaaactggtaaaacataaaaaaacatctgaatttgagacatacctgaatgttgtaatcagccaaagtgccttaaagtttgagcaaaaattaaaatatttatagtaattgaggaattttacgtccatcctccaattgtttcccggcaaaaatctgcaaagaccattttttaaatagattcgctctattttaattgactcaccaaacgttgctggtccggagggattccttctttgtcctggattttggctttgacattttcgatagtgtcactcgccttagaatgcaaatatacaatcttttcttaaactgttaagttgatacctcgacttccaaagtaattgtttttccggtcaaagttttgacgaaaatttgcatcttcagttacgtattcacttaaaagaaataaattattttctgaattctctgatgtgattgaaaatcaaattgtgcttcattgattcgagcaaataaggaaacaagaatgaaatgaataattcatcaaatgtaatatattgttttatttagtgttttcgtcttgttttcatcattattttagcatttagaaaaaaaaaatttacagaatgactgcccttcatgatcagtggtgatcactcggcattttgcaattttaaaattaaatctcaatgactaatttcaaaacatatttccataattggttcgctttcttttttggcattttaatttggcaccctcacaaaatgtccaagccacgaaatgtccaaaagagtaaaaacccacgaaatgtccaaattttcaaaatttataaacaaaatgagtctaatttggggtttttagggttttcagggtcgctgaatacgaatatagcctttatattaccccttgcctaaccttaggcccatcctaataataaaaaactcaatttcgaaacttgggcatttcgtggcctggacattttgtgggtcagcgtttaattttcagaaataatcaagaaaaaatttcagctcgataggctaacgagaagtaagtgttcgaaaaaatcaaccttaaagcctaaat

SEQ ID NO: 9783 - DNA, 950 bp, Heterodera glycines
ttagacttccaaaaatgcaccggaaggcttcttcggatacggtccggttcccaatttgtggataaaattgaatcgggcactgaaggtgcacttttgttggatcgcacttgcttttatgctgaacaaggcggacaaatttacgacacgggcgttctctccaaaactgacgatgatgtccataattttaaaaagcattagcaaattttatatatatcccttcaggacacgtggttttccgtcacaaatgtgcaagttcgtgccggttacattttcttttttgggatcgctgagggaactttacatgtcggggacgagcttaaccagcaatttgacgaggaccggcggtggctgataatgaagaatcacacgggcactcacgtgctgaactttgctctgcagaaagtgctggtcagcgtcgaccagaagggctctttggtggcgtctgatcgaatgcgattcgatttcacttccaaacaagcacttggtgctgaacaggcaagtgctaacacatgtcctgcctccgttctccccccgctcctctcccgggttggggttttttttaattaattttttgtttttgcaacaaaattcgaatgcattgccaaactttataataacattcgttttaattaaggtgaaaaaggtggaggaagaagcacagaaactgattgacaccaatgaatccgttttctcgcgtccgtgcgtattgaccgaggcgcgtgatatcagtggccttcgcgcagtgtttgaagaagtgacattgccattctcataaacatcgcttcacttacaattagtcatgctttaggcttatcctgatccggttcgggtggtcagtgttggtgttccggttgatcgtttgttggaagacccgaaaagtgagcttggccatggcacttccgtggaaatctgtggcgggacgtacgttagaaatcaaattctaaattttt

SEQ ID NO: 9784 - DNA, 3012 bp, Heterodera glycines
tggaacattgatagaagaggctaaaaaagaccaagacatggcccttaaaactggcgatgaagagcccatcagattattgggcaaaagggtcaacgaatttgaacaggtagggttcggtaaccaaggcttggtttttgattgtttgtgccaggaattgaactcacaattgttgccatattggaggagggacaatttgcgtgagcaagtgaagcaattacggatggcaatgaaaaaactcaaaaaggcattcaaaaaatcgacgaaggacgaagagaatggcactgaaacagctgaagagaaacggagcaagggaaagagcggtgcgaaaaagaaagctgaagcggtggagaattgagatgacaggcgaagtgttgagctgttttcataccttttttgaggttgagggggggggggggggtcggcccccatctttcgtcataaatgctccggaggagggaggcctttgtaatcgggaagaggtcaaagggggaagggtcgacgaaggggggggggagagaaagagtaatacgatattccgggtgcaccccaaaatgtttttccgacggcgcctaaaatccttatttccctaaaaaatgacaaaatcgcaaacattggcctttttggacaaaatctgtaacaaatcccattaaaattacaaaaaaaaaaaaaatcccagcggcacctaccggcactgtcggaccccatatttcccaaaagttttttgaaaaacatgccgcaaaaaaggtggtaagaaaaaaaggccgtttacatggctgacccccttcgcaaagttagccgtcaatcccctcccctttgacccccctccctttttttaacgtatgactgtttttgccagcgattggtgtgacactgtcagtgttattgttggtataatattttgtttatatataatttgacactcaatattataaaccttaataaacaccttcgttgggttcaattgccaaaaactttaaaaaaatttggtatcatttgaaagataagaaattaggtttataattgagattcaatttcttatgcataactagttacctaatttgaactcataagacttgcttttaatgatatcaaagaactgagaagaaaaaatttcttgcaggctatgatcagataatcggtcccaaaaaatccaataaaaataagtgttgcaggaaaattagcacagattttcaaaaaattctccatggggaacaaaaacaggacattggctgataaaacttgaaaagatataacttttgtgttaggcgtgaagtaaatttttgaaatggaacaagaacaacaacaaaatgttcatcacagtgggcgcgaagtgcgtcagatgttcatcgactttttcgtcaaggaaaaggcccacaaatattaccattcctcttccgtggtatgcaacggtcgtttccgctctccctttgaccattggcattttcagattccccacgaggatccgactctgttgttcaccaatgccgggatgaatcaatttaagcccattttccaagagactgtcgacccgaacagtgacatggccaagctgaagcgtgcggtcaacacacagaaatgcataagggcgggtgggaagcacaacgacttggacgacgtggggaaggacgtgtaccaccacacctttttcgaaatgctcggcaattggtccttcggcgattatttcaaggtcagtcgtctcctttttttgctattctgtttttaaatgttttagagggaaatttgtacatgggcttaccagttcctaacagaatggttgcatatttcgtccgaacgcctttacgtctctttttttggcggcgatttggccaataatttgttgccggacgaagagtgtcggtaaattgtaactgtcaaatttaattttattcctgttattcaagccaaatatggttggacatcggtgttcctagtgaacacattcttccctttggaatgaaagacaacttttgggagatgggcgagacgggcccttgcggtccgtgttccgaaattcattatgaccgaattggtggcagagatgcggcccatctggtgaacgccgatgacccaatggtggtggaaatttggaatttggtcttcattcagttcaaccggtgtcttgtgagattggcagccattagcatgactttttaactttagggaggagggcggagtgttgaaatcgttgcccaacaaacacatcgattgtggtctcggctttgaacgtctcgtcgctgtggcgcagcaaaagacttccaactacgacaccgatttgttcaccccaatttttagcgcaattcaggaggttgtaggtggtgaaattttgctattgtaagtttggagcttcaggggaccggagcccgcgagtacactggcaaagttggttccgaggacgtcgacggtgtggacatggcttaccgggtggtcgcagatcacattcgcactttgaccatcgcactgagtgacggggggtcgcctgactcgaccggaagggggtactcacttgggagtttaaaaatcactgatgatgatatgcaatgcttgctttgtttttagttatgtccttcgtcgcattttgcgccgcggagttcgctacgcaactgagaaattgggggccaagcccggcttcttcgcctcgcttgttcccgtggtcatcgacattttagtactttgtttttgtggtctggtgtatgggggtctcttgaaaaccaatttcttaagggcgacacttttcccgagcttcgaaaggacccaagctcagccatggaaattatcaatgaggaggaggcacaatttctgaagacgcttcgtcggggccacgttctgtttgagaaagcggtcaatgctttgccttcgggcaataaaactttccccgggagcatcgcgtggcgcctctacgacacttacggatttccgattgatctcacccaacttatggccgaagagaagggactcactgttcagatggacgagtacgaggacagcaaaaagaaggccagaggaaaaaaataa

SEQ ID NO: 9785 - DNA, 977 bp, Heterodera glycines
tgggaggacgaagaggaggagaaagagacggtggacagcaaattcgcaagggcagcggaggaagcggcactcaaagtgaaagaaaagtgacaaatccgaaccgaaaaggacgaccgatttaggcacagcccgaacggaggcgcaactccaagcgcgagctgagcagggcggaggaggcggaactgctcgcatggaaggcggaggtgcagcggacggcggagacgcggctgagagcgtctgaagagccggacagtgacgcggaggggcggagagagagcagcgaacggcccgaaggagccgcgcaagaagcagacggaccgcaaaaggggaccgaagagcgacaaaagcggcaaaaggaaggggaagaagcggaacgactagcagagacggatcaacaactgatttgggggagggatccgcaactgatcagcggaaaacaaacagcggcgagtgatcaggaacaagtggcatttgaacaaccatcaaatagacaaaaacaacaatctctccctgatcagcaaatacaaacggtgcagaaattgcctgaggcgagaacggcggaattgctggtgccaatgagtgaatgggccaaaacgaagcagtgagtttggccgattgcagtgaaaggtgtcacccgaaatagatcagaaatgctattttaattatgatattgtcgttttttcttctgtttagcagaagcttaatgaataaattaatgctttttgtcacggaatgcctttttttggctttttggttgttggcacttcgtccgatcactgatcgattgtgtggactgatcactcagcttgttctcccttccaaggctgattcgtatcgttcaacaatccgacgactttgctttatcccatccgggcgccactccgccgagcaccccgccgaacggaattggacagaatgaattggcggcacattatcgcgtgaaggcggacgaactgacgcaaaagctgagaaacgaa

SEQ ID NO: 9786 - DNA, 242 bp, Heterodera glycines
gcagagttcccaagtttttttttcaaaataaggacaaacgaggctaaaactaagattttgaccccaaaaataagattttttctacaactaatagtagcgcgaaggaaacgcaatagaatacatgaaaaccgacataaaacaacattttttagtatgaaacaattgaattttttttccgctgaccatttttctcattttgccgcatatgcacttttttgcgtcgcttttttccaataaactta

SEQ ID NO: 9787 - DNA, 2023 bp, Heterodera glycines
acgattagttaacatggcatcataacaaagtctccaactctaagcaatcgccttttaaaatgttcttcaatcagaaaagatttatttaatcatttttttttacaattttaaagttatttttatttttttgtatttttaattttcgttcttttccatttaaaaattttcttctcttattactttgtcttttatgtaattgtcatcaaaatgtaatacattattgtaaagaacataatcgaataaattaataaaatcttaattactgcagagtgggtcaattttattttaatatggcccctaaaacttagaacatttggagaatatatttatacatgttatcgccgaatttgggacttattggcgctgatcatttttagaaaaggcactccagaatccaaaaaagttgtcgatttggagaaaatatgttaataaacatgacaaaattttctaatttcgccgtccgcgattggccccgcgacgcattttatattaatcaaaatgttgtctcaaatccctaacagtcaataatgaattgaaaaacattattttaattatatttaagcggttttagaaattgcgtttacaataagaagtattttgcattaaattttaataaatgaatttacgataaattaaattgtttaattttcatttgtttctttattctttccatcttcttccttcatatgaacttacagaatctaaattatatttattataaatataattttaattgtatttatttattcgtaagttcgtacacattacaaagacatgtcgccacattgcctatgggcttttcgcgcacatttttcccacacatttcgccagtccattctcaccgccctatatgtatgcaaatattgttgtttgaaaaaaatgtaattagacaactcaattaattaaattttacggcatcattaccagtcgaattgcaaacggacacttgtcattgtccttgtggccaatcactcccaatttgccgccctgttgcggaaggccggccaacatgtcataggacagtgcagtgattggctcctccatgcacaacaggtacccccaaaaggaccggttcctaaacaaggccgtcttgttcgttggcacagggccagcaaatccatccaaaatgccaaactctccaagagaaatgtttgcgcatgcctccttatctccaaacaattccacatgggtatgccttaatgagtggaataaaagtgctggtggtttcgtaaaatacggtagttcggggtttttaacaaataatttgataactttgctcaaaaacaacaaatatatatgtattctttgtggtatttattattcgaaatatttttctctttattattctgcaaaatttcaaaaaaataatttttttttctccaatttagaataagattatgacaaacaaagtgcagaaaattggtgtaattatttgaaacttggtgaagcttttaacaaattttttcggcaaattaagaaaacttattgctacctaacaaatagataccgatttgaaaaggtaagatgtttaaatgcaccatttactactttcttcaaaattaatttgctttgatcgcttatataaaatatttggcaagcaaaaatactttgataaaatttgattcatgaattttttagtttctgagtttctcggtctcgacactctcggggtcaattctcggtcttgggtcatgcaaaataatttgtttttttgtccccaatgccagacatgattacttctttttgtgcgttgatgtgtacaagttcattgtttgcttttattccgtggcatccataacaatttggacaccatgcaaaattttgtcctttccaaattccttcgcccatttcgtttcctgcgcctttttgcattgtgacgcaatttcgttgtttttctcataattttccaattcaaattgcgaattcacttggtcatttgcctggtccatttggccaataaagcaaaaaatcagcctaaaattaggagtttttatttcccacaaatatgtttataaatcactaa

SEQ ID NO: 9788 - DNA, 1818 bp, Heterodera glycines
ttaattgatccagcgtgaaataattaatactttgcatcgatttgacactgcccaagtctgcacacggtaatttgcatgtggcggtgatcaatgtcaaggctggtattgaagtgcagcgtaatcgggttgggcataataccgttgattaagctagcttgcagtacacttcaaaatttaatcaccgtaataattttaatttaccgtatttattgagttatagcccccccccgtgaatattagagcccccctctgaaataaagcccccctttcaagggtgttgataactaaagccccccccccccttgaattagagcccccctctgaaataaagccccccttttgagggggggggggggggggttgaaaaatagaggcaccgggggatctatttcaataaatacggtattttaatttttaaaaatttaagatcgtaataatttaaatttatttgcacacatttctccactctccgtgatcactacgggtgcttttctcgactctacactgttcaactgcttcccggtggtccaatcaacaatgccactaccatcaacaatgttgttgctgttttggagaagaactcccaaaagaaatgggaaaatgagtcgattcatcagcgaaggggaagccatttttaatcacctaaatttgattaatgccaattttcgccttttttggcactggacaactaataaatgcataaataaatgttatgtggaatagcagtattaagaaaatgaaaataaaattcatcatctgtcatgcggaagcgaacccatgatgaatagtcattaaatttatgagggaaaagcgcataaattaattaatttttgtttgtattttcacatttgatccattttttctgatcagttgagggttagcgcaaaaaaaaaaataatttacaatagcaaatggaccatgctttacaacgataaatatagttttaaagtgaattagacactgacatttcaaaatatttcccttgtctaaattaaagatgaccgttagaatttcaccaataaatacaaagccagttttgtgatttatacaacagtgaaagaatatgtccatcgttgaatgatagcttcattcagttgaatgatgacgattcattacaaaaacaaattggtagattgtttgctttgattaactttgatttttctcttcgttaaatgaatcattttttatgtaaatataagtaaagtaaaaatatgcattagggtaaatggataaatgaataaatattgtaaaataacaaaataaatgaaaaattgggaatatttaaataaaatttaagaaataaattttatatgtaagggttttttagttggtttttaaatatgcctcaggatattcagtgctaatttcaaagtgtaattcttcgccagaaaatgcaaattttcaagataatttgattgatttgcaactcggagataggtatagtacaatttttttttttattttaatgattaatttaggcaataaattggtaaaattaataaaaacggttaattgtttaattttataaaaaatgcttaaaggaagcaaatttaaatttttcttttcaaagtatttgccattatatttatcaattgcagaaaaatttgcaaaaataaaataaacaaattcaaaaagtcgagctttcatacttccgtgacaatgtttattttaaaccaaactatttttttcgataccgaagaacccttctctattaacccattaaattttcaaaaattatgttaactttcaaaaaaaaattttttttgtcataattccgaatcgcgctttttattttcatttttatttataactttttgg

SEQ ID NO: 9789 - DNA, 2344 bp, Heterodera glycines
ccaataaattccaaagccagttttggtgattttatccaacagggaaagaatatgtccatcgttgaatgatagcttcatccagtgaatggatgacgattcattacaaaaacaaattggtagattgtttgctttgattaactttgatttttctcttcgttaaatgaatcatttttatgtaaataaagtaaaaatatgcattagggtaaatggataaatgaataaatattgtaaaataacaaattaaatgaaaaattggaatatttaaataaaatttaagaaataaattttattttttaaatttaaatgattaatttaggcaataaattggtaaaattaataaaaacggcggttaaattatttaattttataataaatgcttaaagattttaaaccaaactatttttttttcgatgccgaagaattcttctctctctattaagccattaaatttcaaaaattatgttaactttcaaaaaaaattttttttttgtcataattccgaatcgcgctttttattttcatttttatttataactttttggatcatttttcattatcaaattattgagtgccatcgacagtattgcctaaaaaatatacagtaaaataatttcctaaaaaaagaattataaatgtatgttcaaacagtttgtgataaaatttaaaaaatgcaataagctttcatttgatttattctgttttattagactaacaatacgattttaaaaaagcattaagccttgctcctaaattatacatatatttttacaaatataggaaacaacgtttgtgaccgacaatcttctagttttttatggaaaattattccgctgggctgtatgtttagaatttaataaaaaaacaaaaattttttttactaattttcagttatgctttccgtttttcatgccacttttgttgggtgtcatttgaatgctttttgaaatggcggaagaacaaacaaaaaaaaatatttaaccaacaattagctgagagatggtttgcttaaaataagaatgcattaaatgtgatattcttatttttttcatcagtacatttaaaaaatgttttcttgcatttttttatcgaaataaacaagtagcattggccctcccacattcctaatttttgaatatttataaaaataataaaaaaaaagaatttttcttaaatttttttatttatatatacttcggatttttcaattacctattaattttattaatgagcattaaagtctttattggataagtcaatttaatttaaatcaaattatattttgccataaaaatatcataatgccaaaatttatagttcttttgtcccaaaatttgctatagcgggcatttttggttaaagcgtagcagcaggcgtgtcatcttcttttactccattgtacgcgtcgaccttgtaatgttcggccaaaaatggcacaaattcgacattcggcaatgtaaaatttcatatttaataatttgtatgaattagtgatttacaattcccaattccaataaaagaattataagaacataaaaaaaacacaaaagcagaaataatataattaggtcatcttcttaattggccattttttggatttttgattgatatttcttttcgaaaatttttagtctaaattttagtcaatataaacgatatgctttcataaatcactaattatcacagtttatctaaatttttttggttaaagcgtagcagcatgcaggtcatcttcttgtcctccatgtacatctccatcacgttgtgcgcgtcggccttgtactgttcggtcagcaatggcacaacttcatcattcggcaatgttttacgatcataatccgctgttgcttcaccaattttcacagtgtcattgaaccggagcattttttccttcgcattcccacccatcggttttgaagaattctaaaaattttgaaaatttattttcaatgcatactttttcgtagtttaaaaattattattatattagttagaatgggaatggattgaattctatttcaaaaaattgtaaaaaattataaattaaaaaggtaaaatggaagagattttttaaaattgcttaaaaaattattaaaaaaatgttttagtgaaaactaagttttttatagtaaattcaataaaaaaaatgtcgatgatagaaccaaaaatttttttttaatttaataaattttaaggagaaagcatattcgtttaggtattttccaattttgtatttaaataaaaaaatcgtttaacaactatgcaatgattataaaatttaaatataaaattcaaaaaaaatcaattataaaaaaattatgaaaaaacaaaccatttttatttggta

SEQ ID NO: 9790 - DNA, 1027 bp, Heterodera glycines
aactgaaattaaaatttcatttttcgggggggggggggaggagctgctcccaacaattgtcgatgcttgagaatctctgcctcgtgtcgagattaaagcgattattctcataaaaacctaaagactttggcttatttgagtttccttttaggttggaaaaaggctgtccttgtcttcatcggtttatcacttatcgcttgcgctttttcaatgctgtaatcattaaacataaaaataaaattattttattttttaaacgcaagtttgccttattaaggatgggtctgtgtgccccgtgcaccccggcatgcgctattcttcacagcatcgccagcttttttgcttgtgaatggcttatatattaattattccaattttaaatttatattataattattattattatttttattgacaattaaattaatttattagcttgtaacaaattatgtgccctttttttattagtgtccatccccattttaaaccggggggggggggttgttgccaagaaaattccattttatatataaaccatttgaatttcttggtaccgaaccggtttaaaactaggaaatccggtttttgaccattttgaccgaaaccggctcaaatttttctcacaaattttgaaagctgatcaaaaaaattttttgaagcaaatatataagggattattattttttatttatcacaaatgagatttttcttcagccaattttatagggtttttggacactaataaaaatggtatataataatgttacaacctaataatttgctcattcatttgctaatttaccttgctaattaaacaacagatctttttgctgttgtcggcgcctcaattttcttttttgccgagcatcgcgtggacagtcgttttgatcattgactcgtcgaaacttatgaggtgaaaaaacgctgcacaaaaatgataaattgaaaattttaagttctttaattgacaaaaatatattacttatatataaattatatttaatgattttattataaatttcatatt

SEQ ID NO: 9791 - DNA, 3568 bp, Heterodera glycines
gttggttatttgtttgaaatttattttttttttaaattcaggggggtgagaaaaagcgcagaaaaatttggtaattgaaacctatgaaatccccccagttttatgaataaatttcccggtttgtttattacctaacattttaaatggaagttatttttttttgttataaatgtgtcccggttcgcaacctttatatatttgttattttaaatttaaactgctggttgtggactttttttttctttttttttttttcttttcccgttcccaaattggccaaattttggccccttcccattcttttttttatcagttcccttcgaacccttttttttttttcgtttcgctttggttggccgatttcccccgaaggacagtgagtgagccccttgcattgttcccccgttttttccccccccccccccccaatttcgccgccttcgcagcgaatcgatcattttgggcggtgattataaaaaaaataagacaaatacgatgataaatggtattgataataaaaaaataaataaacaattgaataacacaccaccacccccacctaatgagaaggtatttatcatttattcattcattcgttaattcactcgcttttatttaatcactgataattttcggatgattttattttgctcattgcaagcagcagaagagcagcagaagcatcaactgtgttgttgtacatatgtattacatttatttgcctcttcgttggacatttaaatgatttataattttaatttaaaaaataataagattttcaataagtttttgaatttgaataatccctccagaaataatttgccaattaccatttgatgtaatcctttttggtccagcattaatatttttgtaataccctgcaaaacattttcattccatacacatttttgtgtcaccaattcgtgctcacttttcagccatcaactgcaagttttaatactcttccaaaaacacatattatcggtcacgcctatttgagtcatatcgaatttcccaaaattttgcaaaatctcctcatttttaaaatttaatttctgtataagttaatttaatcttaaaatatgaactttaagatcttaaagactagaaatgaaaggaaaatgaattgaaatcatttaaaaaagatacatatgacaaagtgtgtagtaattgctcatctgccgagtgagctgctgttttggtttggagcgcaattatttatttattatttgacgaatgaattaattggctgcgcgaaaattgatcgattgacccggactttttctcaaaaacatcctttattattaatttaatttaaaaatatttattaggatttcttaaatattttttccgccagcagaggaaataaaaatggctttttctttggtttctttgctccgtcgttttcttccgccataccatcaaaatttggtgtatgtcatttgcggtgcgcacattttgtacggctcaattgcattggcagtccgtaagtttatttgttagttttcattttaatattggaaagagagtgatcagcagctgaaaaataaatttttggagatatttgtaattaaaattatctaatgatgatgaaatttgcataaaaatttctgtcccccgtccatttgagatcagactttttgggtgctctcaacgcgcattttccccaccgcttttgacatgttcgacgacacgcgcaacagagtgatggactacgacaccatgtggaattggaccagcaggtgcctccgttccgccaattttttcaatattttatcacccgtttttatgttcagacagcagctggacaggtatcagaaccgactgaccatcagctgggtggtggcgacttttggtagtgattactaatagtattatgtgaaaatttgttttttattttaaaattatataattaataaattaaaatccttttcccttttcagatatttttatggccattttgtgcatcattccccaattttgcaaggtcgaggtgagcgagggcaacagagtgcaggagttggacttggtgagagggggcgggggaggaggcggggaaaaatacgaaacactctattctttttcattttgaatttaatttggaaattatttttatttatttcaatttttattgaaaaaattttatggtctccattttcggcttattatattataaattttacggttgtccaaaagaaaaagcgtttttttaatgtcaaaaaatttttcgcctggcgctaaaaatcgcaaaaatttggcagtttttagtgcaaatctgttaacaaattgcactcgaattttaaaaattttccccggcggcgcctaccggcaccgccggccttcgattccccaaaattttttggaaaaagcgcgccgccaaaaaaatggttttgttaagcagcaaaaaataataagcgataggtttgaatgagttggcaaacatccttgtttcgttggcaaactcaacgtatttttcttttcttggtaaattgaaagcttattaaacggaattttatgcgcatgcgaaaaaaggaaaacttttctgtgatgagcaaaaaaaaaaaaggtcgtcaaaaattttttgacccccccatcgtaaaaaaaattggccctggcgcaccccccctgcgccgatcgtacatcgtatggggtcggccctggcgcaccccttgtacatgtatgatactcatgtcttttatattgtatagctttcgtaattaaggtctgttgaatttttaaaataccctccaaggaacattcgacgaacattatttccttaaaattcaaaattgtccaataaatcccaagatatttggcattgattgtttttatccacctgtccttatttgtccttaataaagccccccccccccttagtgtattcgccgtcccgtcattgccaaactgatggccccgttgcttttgttggccaatttgctgttggccgcctgtttgggtgccgaacgatggtattgcccggctgaggaccgactgtttccactcccttttcgacggtgccatcaaagaggaggtgttcctgaccaacttcgagcgcgagttggaatgtgtcagtgacgaggacaaagaaggtgagtgacaagggtcaattaggcagggcactaattaacagctaatgaagcgaaaacacaaaccaagagtgcattttctaatcccctattagcaacagcgctttttgctaatcagattaagtaaatcatttattcaaaagtcattaggtgtaattaaattgacgcgacaaatttttcttaaatgttaaattccagtgtattaatttagcaaggatttatttatcaaatgcataatgcttagcttccaatggaacgaattttagtgctttaaaattataaaactttattttaaaaatcatatttatttatttttttctgcatattttccccgtctttaggcaccgatgtgtgggtaagtgtcgtcgtttaccgcaacaataatttttcagagtattaaatttggttaattttattttgtttaaatttgaaataaaaacttcagtcccccaattgaatattacagaaaatgtgatgggata

SEQ ID NO: 9792 - DNA, 2798 bp, Heterodera glycines
  unsure (1)..(2798): unsure at all n locations
aaaaacataaaaattttataaaatganttcgnnaattatttntataaaaaatatcgnacactaaattttcaaacggtaccgacaaaaaactggtaatttctgtgttctaatattttttaaagttttntaattaatttacaaacctaaataataatatttattgcgcctctgatatttgcgcctatgcttaaaagcagtctcaaaacttttttttaatagaaaaataaagcaattgttattattaaataaattgtttgaataaatggtatatttacctttttgaaaattttcttaagctttttttaatttccgtgtcaaagcggtaaaataattttttttaatgttaatttttaaataatatttttttaatttatacaatttttgcacttgttgcttttttggccaaaaattgctcatcgccaaatgcttgacactcctcctatttatgagaaatttcagaaaaagccatggagcagattatttgaaagaaaaatatttgctaaaatgtggcatgccatcgaaaaaaaaaattaatttggcgcattatttttttaattctaccgagttttggctttttttaaattcaaaattgtctagaaaccgatgtacggctatgtttttctgaaaaagctttaaaatttcgaattaatttatttattaattcctctttttacagttccgcgtgtgtgccgaaaatgcgtttggccgttccgacccattgaacaccgacgtggaccggcccggcctcccagagggcccgatcacttatccggccacaacaaagtgagaaattttcaaaaatataaaatattttaaaaattttgcaccgaattttggaatggtgccaaaaaaatcggtgccaaattttgcattgcactaatttttttttaatttgactcaaatttaaaaaaaatttcagtgcatctttcttctctttttgatggtgacacaaatttaaaaacatagcaaacgaaaatattgacaattcaattttttccattaaataaaacggaaattgggtcagtggaaaatgcgtcagtgaatcagtatttctttaaattgagatacggtagtaatattactgaattataacttatttttaggaatttgtgaaagttttaattattttgacttttaaaaaattaattgaaaaattcagaacaaaaatattagaaaaattttgaccttttgtaatacaatacttaatgctacagtaactttattataaaaatactgtattactggcaccttttccactgacgcattttccaggagccaaaaatattactattaaattaattttcatttaaatatggcacaaaaattttcagcaaagaagtgtctgtgcaggggccaagtgttgtgccgttgaaatcgcagcgtgccaacgaaaaggaaaaggacgccatgcaaacccgaactcctaaaacggcacaaccttcgtctgcgcatggcatcggaccatccttgggtaagaaatgagtttggatggaaaatcttagataaaaggctttctttaccagttcggcatttagttcaaaaacgattatctgcttgtctctttttcaattttaatttaaaccgtttcattttttataatttttaattagttcaaaaaacagttaaacattttccacggacatttttaatttttaatttaatgataatttaattttaaaatatttgtactttaattatattatttcttcactaaaaaaggaaaataaaatttacttttttatcaaattaatattttcatttatttaaatatatattttttaaattatgtatatatttataatattaaatttatattaattttttaattttttaaaaataattatttcaaactaaagaaaataaattattgttttttttcaaattaaataattatatttcacataattttatatagaatatttttattaaaataatgcattttgtttcagactcatcagaccaaccattgtcctccaccgcccgtcgtcgccagccgcgcagacagaaaagtgccagaaaggatgccactgacatgcagtggttggtttaacaaaaaataataatttaaaaaataataaatttaattcatttattttttagttgtagcaagaatttaccgccacgccacaaaaacacggtgagcaaattcggattttttaaattatttattgggaattttgagaaaaattatttttttaaatttttataatgaactggaaaaaattttttttttaatgatgcatatttttgaatttttataaaatatttacaaatatttttttttgattttttttcaatgattcctcttctgttgatcatgtttccgctaaagcatcaatattcaaaatttttttctaaaattgatcttttttctttgtaaaatttttgctttaaattgtccccataatctaaacaaaacttttaaatatttaatgttttaaaaaatcatgaacaggagcggaccgcgtccggtggcggaaggcaacgcgttggcagcaccgcggcggaccggccggcacaggcggcagcagcggcttacgctggggacgaagaggcaccgaacgaggaggaagtggccgacagtgagggggagcagcagctgctcgacatgacgacggttgaggtgggaataattttgaggcgggagggggtggggccaaattttgcttcttgccactttttttctctgtttttttttaaattttttttggaggggggggggggtggtaagatccaatggtgccaataggcagacgccccgtggaaattttgcaaaaatgaaatgcaatttgctaatt

SEQ ID NO: 9793 - DNA, 3753 bp, Heterodera glycines
  unsure (1)..(3753): unsure at all n locations
aacattaattaccagcatccataatcatcataaaccaatgcagtgtaatgcaatttgcattccgccatttcgttcaaattccataatgcaccaaaagttggttttcgatttgaagcaaataaagtgtccggacggatgtacggaacagcaaaaaccaaaagaaacaaaaagtgaaagaaagaatcgaaaatgcgatgaacatgaaatgctaacatattttgacctaaaccattaaaaatcgacggtcagccgtaggcggaaactgatcttggaggacaacatccgaaatgggacagcaaatcacaggaacaaaaaaaaaaaattaagctatcttaagacttaagctaaagcaaaaaaaaaaaaatcttctggcgaaatgtattaatttaaaaaaaagttttcaaaattgaaatgcatggcacttaagtgatttaaccagaaattcatctttttattcatgtctgcttttgaattgcattttttagaattctattttattgttttattcgagtttctttggttgttttttgtccatcttttctttttcttccaatggaaaacgcaaagatttcccttttataccaactcgaacaacggaaagtttcgaagttggagagagaaaacagagcattacgggaacgaatcaacggccttttggaaaagcaagacgatgagagaattgaacttttggtagctgacagaacacgggtactaaatatatacaacgaaaattactttaagtactttattttttagcgaaaactcgtccaactccgcgcaataactgaacggaccataaaatccttggaatcaggaatcaacgaatttagagcttttgtaaccgacataaatgaagcgtatgtttattttagttttaacaaaggattgtcgggaagaagtcagctcaaatcgacaaatttgttaagaatggatgaagaagagaataaaggagcgattcaaccgttgaaactcgtcgacattagcaatgaaagcgaccgcattcttcgcaatttctctcctaagcttaagcgaagtctgttttaagcttttgttacttgtgattccattctattctttttttctgtaactaattcagttcccgaatctccgatggttttgtcggcaatttcgacttccaaaagcggctcaaattcgcaatcagagtcattccgtacgggtttggaagaagaggaggaggaaagggcaaacggaatggaagaagttgttaacgaaacgcctcacttggacatgatggagacgagtgggacagggacggaagttgagaacgcgtcgaattccaaagggaagatcgaacagaggaagtcggccatcgcaccaatctgctcaatcactttgcgtcaacgatcgtccgcaatgaaatttgcaccctccgaaatgaagcggactcacagtgggcactatcacataaaagctgggaaaaaacaagagatcgacctgggaaacctgggtttcatggataatattttgacttgttatttcgagtgaccattccaggcctggattcagctcatgataaacctggattcccagaaatccaggcttttttcaaaatatcaagctctaaaaaattattgcacatcatctttttccttcattggaattttaacttttcctcccattttgtttagttgcaacgcccgctttcccccccccccccgaaatgaaaatttttaaaaattttccagcaaataatggaaaatttttccgaattccccccccaaactaaaataataggcaattttcgtaacaaatagcactcaaatttgcaaaaaattttcccggcggcgcctatcggcaccgccggacctccactttccactatttttacaagttttgtgccttaaaacgcccaaaattgggtcatttttagtaaagaaatcccactttttanttattnattaaatacaaaaaaaaaaaaaaagtcttcaggtcgggtccccccccccccgaaaaatgtttctagatacgcccctgtacccgctcattttgtctgcaaaatctcggcattttatagacgtgttgcttttgttgactgtttttttcccttttgcatagaatgtttgacgacaacccaaaagatgacatcaacggagtgatcactggcgatctgctgattgtcatggcgcaaatcattgttgccatccaaatggtacggattttttgaataaatattttttcttagggggctcgacagcttgaaaaaaaattcctggtcctatccttgacttggggactaactaagacatggactttatttgacaaaaaagaatcacggtccataaaaaaaaccctggaggtagtctcaatttgtacataatcaagtcgatgaattttcattttttttttgcattcatttatacccaaaattctattaatttcagtgttttcacacttatattaacttttttatgtttttcaatttgtaataggcttaagaaaaattagtttgacgactccggctataattcgacatttttaaaataatttttttttctggggtttgaccaaaaaaagcaaaaaaaaaaagataatttattttattccaaattcctaggtttgggagcagaaatatctgatgcaatacgacgtgcctccactgctcgcggtcggactggagggtgggttttgcaattaaaatttttgaaatttcatttttttgttcatcaacaggcctttttggtatgattgtgctcggctctctgatggtgccaatgtattacatccgcgtgccggccaccttttccagagacccagaacatcgtaaaaaccgacaaaaaaattttccgaaatttaaaaaaaaaattttccaaggcctcgaagacgtcttccacgcatttgcccaaatccatcagaggccgatcattttggcaccacttttcctgacaattacgaggtggtgtggcttggttcacagcttgtctttgtgtttaccctgttttgagtgctttaaatttctttttccaagcctgcaaaatttcgaaaatttacattttgtttttcaaaaaagtggccacaaattttcataaacctgctttccctactgattgcgaacatttttgccatctttttgaaatttcgagagatgtcaaatgatttcgaattcgttcaattacacccagcataaattctaatatatatatataatattatatttactttccacagtattgcgttcttcaactttgccggtgttacggtcaccaaacgcctttcggccaccacgcgaatggcgcgttttttttataattaattttagagggcgggacataatttcgccaccgatatattttgccggtcgaaatttcgccgccgtattttttcttgaaatttatgatgaattagtaagttttttcaaatttttttaaaaaattgctaaaaaatttaattttcatataaaaaaattcttaggcgaaattatgtcccggcgaaatttgggatgcatccttaattttattcatccatttttgtttaatcaaatttggcttatctcgtcgcctattattgcaacaggtgcttgacagtgtgcgaacattgctcatttgggccttttccatcccattctttggcgagcggttcatccctctccaggtgtgctaattgtttcggaattttctggtgaatttgttgatgattaattttgggttaggcactgtcaatcttggagccaccaggaaataaaaataaaatttcgataatttttttgaaaattactgctccctgttccaactcccc

SEQ ID NO: 9794 - DNA, 2609 bp, Heterodera glycines
caatttcatttcatttgctgtgagtgccatttaaacattcccttaattgttccaattatttatgatcaattaaggaactgatggatccgagcaaaggcttttacgaccaaagcgaggacaaagtgacattggccattgatgtcagtgtgaaataagcataaatggagaacaaatcataaattattcatatgctctgggaaatctcgtccttgaattatcatcctatggacttttttttatcatatttcttactgtttaaatttttttgattttataaaaatggattggattaaatcatagattaaatgttgtatcagcgcaattgtaaatgcaaaaagacgttgtcctttttcttgccatgttttttacaataacaaattcgcatgggatgtccgccaagcatactgtacccaccaatttccaagtcggaaagaatgttgacatttgtaacacacttttgttggttttttaaattttttctatgctaatatcatgcaatgtattatttgtatccttacaaggctcagtcggctgaagatttcaaattttatacgtttaaatcgaattagacgggtcttgaaatttagagttcaaatagccctgtatagagtttagagccgaaactagtaaacatctgacaccacgtttaaacagctgtacaattgactaaataataaaattgtcacttttccatattttaatttttaattttgtagtaaatataaatttttaagcgcatcttggattattaaagaatgaaatcatagcgtaattagtaatagtttttcaatttttaatttaataagcccaaacttcccggttcccaaatttctggtcccaaaaaattctgcttaaataaaaggaaaaaatgatcagtcaattaggaatggtttcaatttaaaaaaaaagtttaaaaaaatgtttacgtaaatcctaacaaaattaatgcaataaatccaagtccaaaaaattgtaaacattgacctaaaatggtaaaatttgaattgggtttatgactaaaatgtttatcattgaaattcggtactcaaaaatgagagtctgctaaaacagctccgacaattaattaattcatatatcagcagttttgaaagtataatcaagaaaaattaataaataaaaaaacaggttcatcataggatggaggatattcaatggcatttttccccaaatcatattgggcatttatgtttcgtcttccgttttgcttctttcactgtgacatcaatggccaatgtcactttgtcctcgctttggtcgtaaaagcctttgcttgggtccatcagttccttaattaccccataattggtcaattaagggaatgtttaattgtcactcacagcaaatgaaatgaaattgaatccccagttgttctctttgttgtcaaaaacatggtcatttaattctaatttaaaatccggcactccgttcttttgcgaaacaattcgaaagtttgccgaacatttgcggctccaattttctgctcaatatcaattaattaattgttgttaatatatatattaattattagtaattttacaccttcttttggagcatcgcacaaaagtaaaaagcccatccatttctcatttttctcagtgctttcatttttcttttctattcctgcccatattttccatggcaatcctttgatgtgcacagtttcgcttttacgttcacttccaattatttctcgcgcaaattccgacactttttcaatttccataaagagtgtgcctttcgaattgctttgatccaaattgaatttgtccacttttggttcatcaacagttgtgagatcgatggtcaatttcactttgtcctcttctctgtcgtaaaaaccattgttaaggtccatcaattccttaatttaaatcatctaatttaatttttgtttatgcgtggtcaattggttatgttttagaaattaatttattttgttatgatttctttacaccaggcaaataaataaatgaacttcaatattggctggtccacgaatgtcaaattaaaatatttgtttgaattggcacttaccgcaaacgaaacgaaattagggaatcccaaattatttgattttttgtcaaaaacatgatcacaaaatgtcccaatcgaattctccgtcccaattttttgcgagataattcgaaaagttgccgaacgaacgcagcagcgccaaagcgaatcttaatgattattactcatcgttgttaattagcatttaataacagttaatttgcacctttttcagtagcatcacacaatagataaatgctcaaccatttctcactgtcaacgagtccatttagttctgcttcaattttccatggaagtccatttatgtacactttttcgctgtaccgactgctcccaacctcctctcgtgcaaattccgacactttttcaatgtccatcaaaagtgtgcccttttttcgatcagaaatccgtccattagtcgaaaatggcattgggaaaattccgtcggaaatcccatgacaatttggaagggatttgaactgataaacggcgatcacttcatcttttgataaaacaccgaagggaactataaatatgtattaacttatgaaaaa

SEQ ID NO: 9795 - DNA, 2558 bp, Heterodera glycines
  unsure (1)..(2558): unsure at all n locations
cgancgcagcagcgcaagcnngnatctaatgggagtattaattatgctgttaattagtactaataancaattaattgttgttaatatatatattaactattagtaattttgcaccttttttcgaagtatcgcaacaaatgaaaatgcccaaccatttctcattgtcagtgcctccatttttcgtttttatttttgccaatatattccatggtaatccatttatgtacactttttcgctgtaccgactgctctcaacctcctctcgtgcaaattccgacacttttttaatgtccatcaaaactgtgcccttttttcgatcggaaatccgtccattagtcggaaattgcattgggaaaattccgtcggaaatcccatgacaatttggaagggatttgaactgataaacgctgatcacttcatcttttgacaaaacaccgaagggaactgtaaatatgtattaacttattgaaaaataaattttaaaaaacatttttaaaaatcgccacaaaaatatgaattttttacggcatctcatcagagaacgagtttgaaattttgacttattttttaccaattttcttcgtaaattcctcatttgacaaaagcggaaagcgaattttgaacagtgccgggccaagcatttgacggcgattctctgctgaacaatcaatgccattttcacggcatttttcatcggcccaacggagtgcctttaaaaaaatttaatggaaataattaaatgactaataaaatttagtttttaaatttaattgttaaaattaccgcattccaaattgaaatttctccacggatttgcaattcgtcacactccaaaatttcgcacaacaatttttggtcaatttgcaaaaaagcatccgatttgagcaaagtgtccgcatttttgccaatgtaagccaaacaacaattggcaaaattctaaaattcaaaggaaaaataatctttaaaatgtagtctttctctgagagtgccaaagcgagaaaagaatcgagtttttcttgtctaggttttcgagtttagaagaccgagatttctttaagccctctaatgattgtttggcttttgacaaacttaaaaaaacattcattttttgaggaacatattttacaaaaaaaaagtctaaagtcaagggtttttcggtctcacaatcagacagcagtaattaatggcgtcaaaacggaacattgcctcaaaaacatcggaaacgctcttcaaaataagctgatgtgctggcaaaacctttaaaaaacgtggataattaatgaaattgcaattgaaaaataaaattaaatttttatttttaattaaactcgcctcttttgcgtctccgtcccccaccaaaaagtgcacatccgaatgctcacccgtgctcaacaaatgcttcatccgatccattgacattagctctgaaatgaggcgcatttataaaagggataaaaataaaaatttaaaaaaaacgaattttagttttaccataatttttgatattttttgaaagccttttcaaattttgaaaaatcgttggccaaaaatttgctgaaacttccatattgtttaaaaaggtatttgccaaatttatggatctatgccaatttttccctctatttttatgagttttttccccggtggtgccggtcaaaaaaatgaaaaacaaaacaatgatttttttaaaagttgcgaaattattagcaatatttgttttatgaatattgttttcgttttgtttttgtgtttgtgtaggagtggagacagcgagaagtcagacagttcacatcgaaagcattaaaaataatcgatacacaacaaaaaaatttagaccgcagggggagggttagagggaaaattcagcaggtaaataaaacagagtttccatgttttttttcaaaataagacaaaatggctcaaaaactaaaattcggaccccaaaaataagatttttctaaaactaatagtagcgtgaaggaaacgcaataaaaacatgaaaaatcgacttaaaacaatattttattagcggaaaaaccagggctgccaactgaaaattttcaaaatcagcatttgccgacaaaaaatcagcattttgaaaaattttattcaaaatatgacaatttttggtcaatttttatgaaaaaataagttttggaaggcccggcggtgccgatagacgccgccggaggaaaaatagaaatgttgaccatttttaacaaaattttcactgaaatttagagcattttacactcaagaaaacgaaataaaaacgcaatttttttttcaaaatcgaattaattcaaatatttgcttccataaaaaatgatacatatataattcaaaacagttattcgtttttgtaattttattttcaaatccaagaataagcacaaaataaggaggtcgtgccaaataaaggacaaatcttagaaaaaaggactctgaaataagaagaatttttttattcaaaaaaacttcatttttataaactaacaaataaacagcaatcattaattattagggtttccttttttaggcacaaaaaatcgcaaaat

SEQ ID NO: 9796 - DNA, 4579 bp, Heterodera glycines
ttttcatttctgcgcatatgataatacatatgtgaagaaaaaagggctcaaaacttcgttctgcgctgcaattgttgttttggtgaaggttcttggtgcatatacatgcctctttcctccatgccctccgtatgtgtaccatagccgccctctcggggcagggagtgtcacgtaccctgcccgagcttgctgccgcctcacggctacgggcttggtttgcccgaaaaaaacagaaaacaatgacgatggagctgtgcatgttgatgggcgctgaacgtgtcgatgagtggtggccgggtgctggtggacgatttggtgatgtcagcacgtcgtcgtcgctgtgccgtcgtggtcgttgtgccgtcgtcgtcactgtgccatagttgtcgctgtttcctcgtcttcattgtgtcgtcgttgtcctcatggtcatgtagtcgtcatcctccttattttgtctaaaagtgaccaaatttttattttcatttacccttttgaatttattcgttttaatatttcttcggatagccgtatttttgtttgtttttttgtttttaatttatctttttttggatagctatcgaaaatagaaaaatgctcacaaaccaatattataaatcaattaatttgttattttaatcgcttttacaaaataaaatccattgatattggataagcaatcaaatcattgccaaagtctcaaaatttcttggacagatcgtattggaagttgggaccgaagttgacctcgaccgcggccaactgatcggccaatgtaacggttgggtaaaggtccgatgtttcctcgtcaacatacaaattggtgatgtcttaattaggtaattaggcaattagccagtttatgtaaattgccatcataaacacaaactcaagcgttgtccattcttcgtgaaaaaactacgatcattatttgtgtaatgttactcattaatgggggcggacacaacacaattaattggccgatgagttgggactgcaggccaatgatcaaaaaattcaccagcaggcgaacattttcacagttctacgaaggcatatttgtgctgaaaatgaaaggatttgagaaaagcatttcgccagtgttcagcacagctgccgctaattatagttaattaattaattatcagcccggcacagcgcctaatttgaaggtgtgtcagggggttcttggcttgtcattttagcatgtcaacaacccctgacacgccgatcaaattaggcgctgtgatcgtctgcctgctaattattaacgtcagctgttgctgcacatttgcgagatgtgctgctttcctcaatgttttcaattttcaataatataaagccataattaaacatcgttaaagcaacaactgctgcttgcctttgattactgctgctggtcagcgaccctatttaatgggcctttgagtgcggaaccgctcaatttgggcgccggcaaaatgatgcaaaatcagtgattgcccaaaatcattgcataaccctggggtgggggggtggactcatagtgctgcttgagaccgaagatttcctgagactcgagaccgagacctaaaaaaacccgagacttttctcgagtcgagaccgagactctcgagcagcactagcgactcagttccgtctgattgtgggccaaactttttcgggccataacttttttttagaatcagtcaaatttttacaaaatttgttgttatttgaaagttttaatatttagaatttcgtgtattgtgacaataaaatgtgctcgtatacaatgtttctggcgatgtgtctgctgttcgcagcggtgactttggcaacttcaaatggcagcgaagaaataattgccgacgcaaataacggagacttggcgatgactgtaagggttgttgttgatctttggctgagctttttttggccatggttattatccatattaaaaaacgacaaaattttgcttgtatacaaaatcaaaattggcggtaattgcccaattaaaatataattacaaaacacaaataaattttctttaatttaacatacctacataaatgttttgagtttaaacaaaaaaataaaaattttattttttattttttcaggctgtgaatgcaactcgtggaatgcgcttgaagagatatgcttcgtgcaacacccatttgagcttgtgcaaccagttcatgtgcaaccaatgctgcaatggatgtaacagttttggatgtttcggttttatgtgcagcgattgctgcgcataaaggggatcaaagccggcgggctcggaaatccgctgctgagcaacagagatgaaaacgcaatgacggattacagtgttttttggcccccctcctcataattatggactttacggattgtctccatctttaaaaaaatcgtccctaatttcggattacagtatttccgttcttgaaaacccaataataacaaatgacaccaaaaggtccataatttttggtgaatttaataaactccccctcgaccacccgcctccccgctcattgtcaactcaaaaaattcttgctaacatgcgaataattgcaattttcttgcacgaataaatttgttggcttcagtaagtaaggcttggaatatttgcataaaaaagagtaaaatatgaactaaacaccaaaatatgtgcgaaaaataaattttgccgattaattttttccgtcaaaaaacaaattttttttttcattttgattataaattattaatcaaaatttttcaccaaaagactgaaaaatatatgaaataaaataaaataattttaattatttaacttaaagatgggacataattcagaggtgtcacgaacaatgttcgaaatcggaacttcgggatcaaaaaatcagatttttgggtcaaaaactgtgttattttacaatttattcaatcaaaaaatcaaatattatttttcagattttttaagaaaaattaggagtttttggaaaaagtctttgctttatttggtgccatctttttgactggagaatatttcgcttaaatttgtctccattcgcttcgtgtaactcaaattatgataggaataacaaaaaacaaaaaactgatcgaaacgcattcgcccaatttgtttacccaaatgtaattaaaaaatcataaaaatttgaaattgagaattatgggagccaaaaatatttcaacgcttatttgttttaaaaaaattttcgagttttcatcacttccatttttttacaattttatgcaaattttagtccaccacattttttttcctaaagtgatcagagaaccgcaaacaattcattagggatactcaccggtacgggactaatttatcctcaaaatatattcaacgcttacaaatatgaaaggtgccgacagcgccgccggggatttttttttggaaatttgggtgcttttgttaacagattttgtctaaaagtgaccaaatttttattttcatttacccttttgaatttattcgttttaatatttcttcggatagccgtatttttgtttgtttttttgtttttaatttatctttttttggatagctatcgaaaatagaaaaatgctcacaaaccaatattataaatcaattaatttgttattttaatcgcttttacaaaataaaatccattgatattggagatcagctgctgctggtgtaaagacgtcatttgtcgaaccattcgaaattgacatttgaattttattaatgatttttttataaaaataatatttcaatttgattgaaaatttgaagcaaattatttgataatgcaatttgagtgcattagaggtcattaaacgaaactaattatatcagaaatgaggaggaggctaaatgatgacctgaccccaataaaaaggaaaagaacagacggaccaaaaaaaacgctgagatttatatattttagcttctgctcctttaaactttgtgctttcgaatgataccaaaaagataggatttgtattgtataaaaagcaggtattgtcaattgattggactcataaaatacctttggattcataaactcgataaaagtgccgaaaaacctttcatttaaaaatttctcacatttttttccttaaacgtcggttcattttgcggcaattaacagcacaattattgtcgtaagttgtgattgcgatgcgaaaaatgatgttaactaaactaaaaaaactttatttatgttgtgaaaaaataagcaaaaaggatcaaatatttattatttttccatttgatcgctacaaaatataatttttaataatgctcgcgagtttcggtctcaatctcgactcgataaaagtctcctatcagcgtgccggacctcaaaatctttttttaacactcttaaagacaattatgatttcaaaaaattaaggtgatgcgggaccgggacctggttgcggacaactgagtaccaaggtcccggttttgaccggggccggactagtcccggttttttcccggtttttcaaaacagactttcaccaaaaaagggcaaacttgcgatttttaaccatttcatgaatttcgttgacaaatattcataaaaaatatctataattttgaaaa

SEQ ID NO: 9797 - DNA, 3481 bp, Heterodera glycines
atttttttcaattcgctgaaggcagtgttactgtgtttgaaacggccaacaatatgacgagttttggccaataaactgctgattgattcatctctcttcaacgcctcctgtacagccaaattcaataaatgagcagcgcaaggtccgttcggcattggcaaaatgcgattttcgttttcatccctctcgacgaaagcctgcaaataaaaacaaatggaaagaaaaattaattaatttatcactcatttcatatttgctgcggaatccgatataatcgcatgcacattttctttaacaatgccccatttgagcagtaaatcctcaattttgagagcgatatttttccctgtatgtgattctgaaaattccgtaattgccaaaacacgtgacatatacttccattttgaaattgaatgcgcagttaagctgttattgaaccaatcataattaaaaagaaaaacacaaattgtaccacaaaaggttgcatgtgcttccactccaacaatcagttgtcagtgtaataaatgcggattcttttaattcatctttaattttctgtctgacacgttggtatacaattggcaaggcagtttttctgaaaaaattgaaaaattaattttatttaacttttaatgtaattcatcacctataaaaacattcactttttgatggggaaacaaagaatgaaaagtttggtcatccacagcgccgaagggaatggttttttgcaccaaaaaatgaagaattttcttatcaaacgaagagagttgtgctgaaaaaagatacaaactattaagctaattaaaaagaattacagtctgaaataggcggtctgctggaagactgaaagtctgagattgtcttctgtttttgttttgtccttttcggctttcgattcaagagaattcagcttttcagtgaattcggagttttcgtgaatggcgtgaagatgagtatgcaaagttttaactgttcctttggcaagctggtattcatatttgagctttccatttgcttgacattcaagacaaattgctgtagctttgacgtttttttaaataggccaatttgccaaataagactcattttcttaaaattaaaaagaactaaattatcatttcaataaagtagaatttttcgaatgaaatgaaaaatttaccagaaaattgacaaaaaaatatttataaacattatgccaaagagatttttgaaggaaaaagaacaaatttttgttaaatcataacccggtaaaacccggtcaaaaatgccgggttccgggccgggttgcattttcaaaaacgaccgggttccgggcccgacctctcaaaacccggtcaacccggttaacccggtcaacccggattttcccaaaaatcgccgggccgggttgccgggcccgggaaaacccggtaccgggcccggcccggttcggtctctactgaatagtgacgaaacgatcagtgacgaaatgatcggccactgttttcattgcaagtatgttttagtaccacattatcaatggcaatgaatatcaattacttaattaatgcattttcgatatttgattcgaactattgatcattttttatttcaacaatttgacaataacaaaccaagcaaaaaattcaagggtccatagaacaattgtgtgagacacctgcaagaaaattaataatagtatgtaggttgtaattatcaacgttgagacgatcgggatcaccaatattcaatagatggtaattgcgtgtcaatgtgagaattctacggtctgcttcgcgatatctttttgctttttgcggtggatcgaatccagcaaggcacttggacacttcggaatctcgtagcttctgttgtttctgcaatgtctcaatgaaacgccatactgatggatgagagcagtaaaagccctctgcagtcgcctgtgtgcggcctctgcgaaattgttcgtgcgatcttctccgttgatcgtccgagagtagacattccataattgggggaaaacattggtacgttcgagtcccgtcagcacgccgaacacgtccagtgtagtttgtggcgaacctataaatatgtcgacttcaatctataacaaaaaataatcaaaagagaattggtcgaagctcaggtaacagatgcatttccagtgcgattagagcgtacgttaagtctccgattggcataaatgtcattgatgtgatccagcgtgactgagttgcgaaaattggatcagtttgataacgataaaaacatattgattattaaatcacattcattcgtgagagacctgcgaaagattattttctgtgagttttttcttcatatttttcactagatgaaataaacatccacgagtttcggcttccggaaaattgttacgaattgaattgattgcagccatctcaaagtcgactgaaaacgtccggggtgaaaattcaggccaggcttcttttagtacggcccacatcctggaatacgtcccctcacttttgttcgtaagtagtgcatatacaacgtggaaagacccatcgttctctacgccgaaataagtgcgataatttattaagtttgacggaatactgctaactccaacttgccaaaacagcgtaaacttggtaaaacaacggtggagcaatgacgaacgtgccgtgccatctacgaaaacatcagtaatttgtgccgcccattcactgtgtgacgctctcccaaaaataagaatcctataaacaattgtgcacaccgattgcctaaaaattgacatatttaacattattattgaatagttgcacctccaaaacattgtcattcatatctgtgtgcaaacgacttttgcatttgatgtctttggttccgaaaaattcacatttccagaacttgacgtcaccgcgtgcgtttggtttttcgaagacatacaaaaaaccttcatgcaataatttttttcttccacgctttgttaggatttcagtagccataaaagttgacaaaaaacaaattagatacctgcttaaacatactggcaatgaaaccgctggcaaaatgaaacagcggcaatgaaactgcggcaatgaaccctcccctaccggaagaatataatatttgataactagggttgtaaattatatggattaacatattttttctgcgcatatgctatgaagaaaggggcttaaaaatagcatttctgcgttaaaattttttgatttggtgaaggtttttagtccatataaatccatattttgggggttttcgggaataaatccatatttcgccatttttgggtttttagtccatattttggccattttttggaaattttcacaagaaaaatgaaaaaaaaacgaaaaatacacccctaaagatcaactttttggaaatttttaaaaattacaccccacaaaacacgaaaaatttgagttttcgtcgtcgttttggcgttttcggataaatattttcgtcttttttttgcgaccttttcttttttttt

SEQ ID NO: 9798 - DNA, 1893 bp, Heterodera glycines
ttgcgaacatttctttttttttaatgagaattttttccaaatttggaaacttggaggtgtttttgatacaacgaacaacaataaaaaatatgcatttttaagttttaaaccccattttttggttgtttattgtactttttaggtttatttaagcaaatattaaatatgcacaccttttttgggatttttgggggtttacaacatatattttggcattttttatccatattttggtccatatttggccatttttggcctttttagtccatatttcgggcttttttagtccatatttaatgtccatatttcgctttttttagtccatataatttacaaccctattgataactagggactccatttttaggcacaaaaaatcgcgaaataggcacctaaaaaggcagaaaaaaccgcaaaataggcactaaataggcacaaaaatcctcaaataggcaaataaaatttttattaacgcttattaggtagcaaaaaatataaaaattttcaattataaatgaaattattaaatattttaaagtttttatcgaaaagaacaaaattttaaaccaaaaatttttattaagaaaaaaatattaaatttttgtggatcaatttttgtgaaaatttttcaattcttagaggtgtattttttgaaaaatttttcgggtcattttttaggggtgtgttttccgtttttattgcatttttgttaaggattttttcaaaaaatctaaaataggcacattaggcacaaaaaccccgaaataggcaaaaatagcattataaaagtcatcgtagacaccgcaccgcaaaccaagtggaaaatgcgttttttgtgcttatctgtgcgtattaagtgcgcaaaaattttaggcatttgcctaaaaattgagtccctattgataacactttgattgaataaattgtaaataacataattttgcaaaatgttctgtttttgactcctaaatacagcgagtcaattttagactcctaatgtaataagtagggttataaattatatggattaacatatttttctgcgcatatgctatgaagaaaggggctcaaaaatagcatttcaacgttaaaattttggtacttccgggttttaccacccccctgaaattttttttctaataatttttatgtcaaaacttctaatttttctagtttcgcatttttggttcaaaaccggcttaaatataaggaaacaagctaaaagcaatcaataatgagcttttacgaaatattgttgccttatgccaaccattaaaatttttgttttcaaattttgaactttttgcacctaaaatttcacgtaactcacgtaaaatacgatgtagctaaaattaaacgtcagattctggcccaggcccatcctttcttcactttttcccctcattgccttaagcaaattggaccaaaagtgttgagaagggcaaaaaagatttcatccaattccccaacccatttccaacgcattttgtcagctaatacattaagcatatttaaaatgggagggggacggaggagtcccgaatttcttggcatattatggggaagtgaatgatgagagaatggcaaaatccaagcaaagaaaaactattggaaacagattaaagagaaggacaactctcattaatttaaagaaagtaagatcttttcagctaattattaaaaatctttgagtttttgattactagggttgtaaattatatggattaacatattttttctgcgcatataaatcaatattttgggtgttttcgggaataaatccatatttagacatttttgcgtttttagtccatattttggccatttttggcaaattttcacaagaaaaatgcaaaaaaagtgaaaaatacaccctaaagatcgatctttttg

SEQ ID NO: 9799 - DNA, 1703 bp, Heterodera glycines
tgatgccaagaaagatcgggttgggccagcaggattgttggaagaggtcccgacgcctttctgtgtctgcgttgccgtgccgccacctgtgcttaacaagccacggtttgtgcccttgttatccttcgacggcatttcaaattgtgaggagtcgtcctgctcgcgcactgtgctgtcggcatctgttccatcatttgctcgttcgagatcgtcgattcggtcaaccaatgtttcaatttgggccttgactatctcaaaatttgagttggcatttgagacaacctccgagacccattttgtctttttgtccatgcaacggttaagagccctaatggaacggttcattccgtcttccaatttgaccaattcgttatgggcggcctctaagtcagagactttcactgccgtctttcccgaccaaaatttcctattaatgaccgaaattgtcatttcactcatctcctcctcatttctcaactcatatactgtattgtgcccgcaggcggaagtggtgcgacgaacccctttagggttgtcgggaatatccattgctttagttgggaagagagtacaattacttgttttcgattgcttaacaacaaaaaaaaaatatattcgtttctaattgaaaatgtggtaaatcataaaatgaatggccaataaaaacagtggaaaaatttccgcgaatgtcgctctattttaatgaatgtgtaatgaacatcgccaatgttctcacgtaaattatgtgaactgatcgcatctccgctaaatgaagagcgctgccgcggcctccgttctcacggccaagtaatgaatggcgaataacaagaaaatttttcgcaatctttgaactttgaaatgggcactaattggacgaacattgaactcattaaaaataactcaaaaaatcattgaaatttaatttggccgtaatgtaaattaataaacatccgctagtatttaattcatagagcacttatttcacaattttctgaattatcatgtttctctaatgacgcattttgaactttggcacactgctcataagttatgtaaattttctgctgattaactcaaattaaaattctgatcattagcacttttaaagtatttgtaaattgttctttatcttcaacttaaattcaaattctgatcagtctcatttaaaagtgatcactaagcgcttgactgtattgtgcccgcaggcgggtaccctaaacattctctcctccggcgccattactttgcccgcaggcactgcagctgctgtcgtcgtcgatcactcctcattgtcgtcgtcgatgaaccgtttgccggaatggcaaaacaaaccatccggtgctaccagtgagggaggcgcgtgggtcccccagacgactcaccgcttccgaataaatggggaggacgatttgggaggatggatcccgggccctgggatcgatgttaaatcccccaaattgcctcgatgttaaaagactaatttattctccggataaaatatatgatcgaaatattccatggacggacgatatgagaaaaagtgaattaattgatcgatggtaaaatccgatgactccgacgactaactgatcgctggggaaaggaaaagtgtgaagggaacggaaaaggggcggggatgaaagagataagaaaagcgataatggaaagtggaaagtccgactgctgagggaaaatgaaaattg

SEQ ID NO: 9800 - DNA, 2190 bp, Heterodera glycines
  unsure (1)..(2190): unsure at all n locations
aaaaaatggggtgagaaaggacagtacaaagtacctgcttttcaatgaaaatgaaaaaacaaggggaaaatgaataaaaaaggaaaaaaagagtggaaaataaaaatattttaaagagggaaagcaaaaataattaaaatttggaaaaaaaaagcggaaaattaataaaaataatttttaaatttgagaaaaacagaatgccaagatgtgaaaataattttttaatttgagaaaacagaacgccaataatttagataaattttaaatttgaaaaaaacagaatgccaagaattgaaataaattttaaatttgaaaaacagaacgccaagattttaaataattttttaatttgagaaaacagaacgccaagaatttaaataatttttaaatttaaaaaacagaacgccaagattttaaatttaaaaaacagaacgccaagattttaaataatttttaaatttgagaaaacagaacgccaagaatttaaataatttttaaatttaaaaaacagaacgccaagattttaaatttaaaaaacagaacgccaaaattttaaataatttttaaatttgaaaaaacagaacgccataatttaattttgaaaaaaaagaatgccaagaatttaaatattttttaaatgagaaaatggggaaaacaaatgcaagaaattggcaagaaataaatagggaaatttggcacaaaaatgtgcaaaaatttggtaagaaataaataggaaaatttggcacaaaaatgtgtaaaaattggcaaaagatagtgttaaaaattgtggcaaaataatgccaaaaattggcaagaaataaataggaaaatttggcacaaaaatgtgcaaaaatttggtaagaaataaatagggaaatttggcacaaaaatgtgtaaaaattggcaaaatccaggtttaaaaatttgggcaaaacaataccaaaaattggcaagaaataaattgggaaataagggggcaaaacaatgccaaaaaattgcggcaaaatggcacaaaaaacgttaccataataatgccaatctggcacataaataataaatggcaaaaagtaatgggtaaatgggtaaacaaatgccaaagaaggaaaaaattaaggcataaataaatgataagggattattgattggcttttccttccgtaaagtgaattaaattaaatgaaaatgaccaaatggacaaaaaatgagttagaccataaatttcgacttttatataccttcccccatcccatgcccattaccccgtctttattcactacaggtattttctccatattataaaatggtccctcatgtttgtcgtttgagtgatggaccaagccaactaaaagtaggacattgctcgagaacggaaaacattatgtatgatatcactccagcgtcattcttatttgtttttcctctcttttctacctttttttcttaatttagcaatggcacgacaaatgagccttcctctgtttaaacgcaccaaaccgactgtaagcattttcacgttggccaggtacataatattttaatatttttttcaacctttagttttttttaatatttcagttgattctttttgaaaccaaacattcagcaacggggatttggtgtgccgttttgctgatgatgttttttctagtgtggttcctctggtgagtttaagcattcattttatttaaacattttctatttattttattttaaagatggccaatggaacggatgtaccctggcacttcgtcaatgaaacgaaggacggatgaggatggtaaacaaaaattttgataaattatccgccaatttatcttctgcttatcgataataaataaataaagaaattttccatatttatgaaaattaaaatacaaaatttttatataaaattttgaagtaaataaattttaaatgaattattgtttggactcgtttctaataaaataactaattttttaccccaaaatattttattgatcagagaaaaaattaaaataaaatttgaaagccttttgctccattctaccgcccattcatttacattggacatctgcagcacaatcggtccgtgtccacagctttgtccattcgattgtcctccgatcaaattgccatccttttcttgctttgtccacaattnntttggccgtgttccacctcacccccccccccgtccccaattccccc

SEQ ID NO: 9801 - DNA, 2193 bp, Heterodera glycines
  unsure (1)..(2193): unsure at all n locations
tcaaattgccatccttttcttgctttgtcacaattctttgggcgttgtccacctcacccccccccccgnccccaattccttcttacaaccctttcacatataagttgctgttttctgttttgcatttttccagtgaataagagacagtgcagaaaacggagattagtaagaccaacacattattcgagacacagcgcgagaagagaaagagagaaggagagagattgcttgcatttactccactccttcatctcttgccactcccccacccatcaagtacacagcaaagaaagggggatgggtttagcgcaagggaaaggcaaaatgaaatgaagtgaagagataagtcctaacaaaaaatagcaaaaaaaattttttaccgcacaaaccccgaccccgaacaaacaccggtaatgcacgaaaacacatgttttcacgccccgggaaaacaccggcaaggtgtgaaaacacatgttttcacaaacacatgttttcacaccggacaaacaccggaaaccgaccggtctttaactactaacatcataccttactatttgttagtgtgcaagtccatttagcaaaatggtaatgaattcacataacaaacccgggattaggctagcctcccaacgagtcatcccgaaactccaggacattctgggcccgtttttagtaaggcaattggaaaatgaagccatgagaacaaaccctaggccacacgagcaattgaagaaaattttaaaatgaaacattaatgtttttttctaaaatgttcccttttttccggtttctataaataattttgacccagacccaccatttttgtttttagaaccggactaactaggtcggttccagttttggatttttttaaaaacatgtccgggtattgaaaaagtcgcgtctatcaatgtctgggtccgatggggtacccggaaccgtgcgacaaaccaggatttttatttgaacagggtcctaaaatcttctaaatcattttttgctcaaagcaataacagtctctattatttaggcgaaaattggggtggaaggccggatttgaaccgccgctcggggccccttacgtggatccgttgtcttagccactaaaccacatccaccactggagggatggggccatctttcattcattttggtccctgttgcttttgctcctacagcctttttctgctcccgcagctattttcgatcagccattacagtctctaacaaattttcaaaaattccgactgtgccttcggaaccagcggcatctcttttaggcaaaaaatcatttttttaaaattcgaattgatgacgtgtaaaattttctttacccattatatttctcaatataatattgataaatcaattaaatttattttatccacgaaaaatgatcatttttaggtgatacaattttaaggatataagaaaagaaaattgaaaacattttatgatgaaaaatgatcattttttcttaaattcgttctcaaatttcttttttatattagtatttttagttattttacaaaatttctctatttaatggaaaaaatataacctaatccaatattgctaatataaaaagtgaaaaaaattttacaaactgtgagcataaataagctgatttcattattttacaaaattatttttaataaaaaataattgatttctttgcgcttcattcctgcattaggagaagtatttcatttttccgcgctcatttttaaacttttcatcaatgtgcctcaggaacagtcagctaaggacaactcggagatggccaattcagccgatggacaaccaaagttagtattttaaatttttttaaactattttaaagggaattttcaattttttccagccgagtcgtctcctctgccgaattgccctcagctgacaggtcctgacggtgctatgacgttactcaacaccatcaaaatgggcgttactcaaaaaccatcaaataaatttttttgatataactttgctcagaggcaaccaaattttttattcgtgatttcattcgatagccttaagtgttttctattatcttgcaaaatttgaaaaaaaattcattaacaagtaagtttaaataaagttatgaccaaaaatgctcaagaaagcttgcttttttgagtttctcaggtcataacttttttgaaacttgatgaattttttgaaattttgcat

SEQ ID NO: 9802 - DNA, 1485 bp, Heterodera glycines
  unsure (1)..(1485): unsure at all n locations
ttcaaagggtcagtcggcttttggggagcgtcatttttgccccttcggaatgcattttgcctacgccacgcaacaatgcacggccaattctcttccggccgaagtgatcagagacagcaacgaattgttccaaattggtaaggcatacatcgatagtttcagtggagtttatgcttggtctggttaagcaattcttaatgggtcgtgtgccaacggggaacggtgcattgggggtacggtatgcgaccggacggaaaggcgttgcctttgtccgtttgggacaatggccgtgttggagaatttattttgcgcggcaattccaacagttaaacagccgcagaaggaagtgagtgcctaaaaagtataaaatgcaaaggaaaagccacggcttaaaagtcaaggtgtccgtcccttttcaggcaaatcattggcacggccaatggcagcagaaaatgctcgccaattccctttttcaactgcgaacggcacaaaatggagacgaaattgggaaaaacaatgctcaaaaaacaaaagaatttgagaggaccaccgaagagaaattcaaaaaaggttttgaaaaagcagcgaataacagagtgaagcattctgattggtttaagcgtcgcttggcgaaaaatgcaacgatttcctcggagaattttgtgccgaccaaaatgcccgctgtgaagagagccgttgtcgttgtgttgtgccaatggttgaacagaatgggaagtgccaacaactgactataaaagaagcaggtgagaagagacggggggagaaatgccaaaaaatattaatcaaaacaaaaaagggcctggcgaactgtgcaacggagggcaacaatgtgctgggggaacaaaatgccatccgaaaacggccatttgtgtgtgcagcggggacaccgaactaaaaaaagggcggtgtgagcggagaggagaagcggaggaaagcgatgccgaaaaagggagggctaacgaagaaaccgcgaaaggagggcaagcagaagcagaaacagacccaacaccaccagcagagatggtcagtggggggcagggcaattcatttgcaaaaaacaaacggcgcattgactcatccccaaaaaacatttgaatttatttttttactttttgcaataattcctaaattcatctttctgttttttctgcctcatttggttcgtttccatttttaaaggtgccaacttcttccgctgaagggaaatcgccaaagggcagcagaaaaaagacgaaaaaggcatcagtgggagagaaatgttcacttaacgccgaatgtttggtgggccatcggaagaaagtttaatttaccaccgtagtccgaatttcacagagcggggcatactgtaacgggaatacgcaaccgccgacttgtcaatgtctgtccactcatgtganagtaaacgacagatgcgagaaaggtaaacggaaagtgacgatggcgaacattatctaatttacagtc

SEQ ID NO: 9803 - DNA, 7311 bp, Heterodera glycines
  unsure (1)..(7311): unsure at all n locations
taaagtatttgtcacgctttcccttctgaagcactttcccggcaaacacgtgccgaccttacgcaccatcggttcncaatgcaccgaaagtgccgatcgatgtgtgggcggttccgtctgtcgcaattcgacttgcatttgcgccgatggttcacttcccaatgcggagaaaatgctctgccgacagagccccggaggcatatgttcccatggccaaatatgctcagggcaatcggaatgcagactcggcacatgccattgtcgtacgggaatgagattggcactgcaagaagacggcaaaaggcgcaaatgcactccaacattggcattaccaagaaaaagctgccgaaagggagaaagatgtatctcaaaaagcatcgatggaagcaggaaactgatgggcccagggaagggagacgatgaaaactggccgaaaaggaggagccgtcgaagggagggacaacgcgggagaaagtcgaagccgggcgaaaggttggaccatttgcgaagataatactcaaaagtcaaactcagctgtgccgaggacgaattgtgcacgggcggctcattttgtggcgaaaactctatttgtatgtgcgccccgggggaaagcgttcaaatagaaaacggaaaagcgaagaaatgcatgttgcaattggaggaaaaggcgcgggacagcagccaaccggtcaaggcggagccgggccaactttgcgtggagggcggcatggaatgttccggaggggccaagtgccagaatggcatttgcagttgccctgagggtacgtctgcttttggcacgaccattggccattcatctgtcgtcccgttgccttttctatcctccctttttttcttcaggccacactctcttccgcaatgagtgccttccgcctcgggcattgccaataagcattgagaaaattcacactcattctgccctttttgcgccccaatcagcagtgatggacagtccatcttcagtcggcacaaatttcgaccccaatttacaggatccaatcccatccaaaaccgtttcgcccggggcaatgtgtcggttggtatttagtctgccgatgtttcacgtttattttcctccctttttgtctgtcattggagtgtccctatcgtacggaatgtgtccgtggcgtgtgccgttgtcagaaggatgaaaccatcgtaaatggaatgtgtcggaagaccatacacgaggtaatgggcaaatccattcactaccaacatcgatcactgctgatcggtcaccctcgccaccaggtgttgcccggggcgagatgcgacactcaaaaagggttggactgtgtgggcgagtcgcactgcttctacggcatttgcgtgtgtctgtacggcttggtgaacatcggcaacgaatgtgccaatgcgaacgtattggagaaagtggcacccggcaaaaggtgtctgccagggcagcattgcctgggcatgtcaaagtgtgtaaagagcaaatgccaatgcgaaaagtgagcataatgccgccataaccttatgaacggttcaactcccaggggacaaaagttagactcgaaattgcgccggtgcatcaaagtggcaaatgcagcaactgttacaacgccattgttggcatttccttcgggagcggaagtggtcgtagggccaacgtcaatcgtcgaaattcctctgggcaattcggcggatggcatttcgcaaagcgatggcgcgagagaaaggccgaccaaattcatttacgccatccctgcagctttagcagcagcggctgaggaggggaaattccaacagattttgacggctaatcaaatgtcaataaatttgatggacggcgaaatgcgatcactgatcagtaaactgatcgaacagcaaaagcagagcaatgaaacggttgtgaagagacaaaacatttgtggcggagaaaggtcggcggaagggcgacgaacggaggaaaggcccagttttggtttcatttcagtggtccaacaaattgtcagcattttcctccaattgtcacttcaaagcttccattcagtaaaccaatccagcaacaattcttccaatccgtccctaaatcggcttcatcccttcaaaatcccttccaatccatccaattggccgcttctttcaattcgccacaccttcaaggccagcctggctttttttgtgctgctggcaatgtttgctatggcggtgccatttgcttagctaacctttgcatttgccggcccgggttcagacccattgatgggttctgccaaattgccaaggttaatttgggcgaacagtgctttctggacgaacaatgcaaggcgaatggcttttgcatcgatggggtaagcttcacaatcgcttgtcattcggtgcctttctccgctttctgttatgccattgccgtgcccaattcggtgccatgcgtcgcactttccttcgcaatgttttccatcggcaccgttgcccaacgcggcccgtcgctgccgtgggcgaagactgttccaaagcgcaagcgtgcggatggaactcaatctgcggaacattcagtggagtgtgcgaatgtgcaattggcatggaaagtgatcaggtggggacaaccggcactttggaggtgcgaaagggcatccaaatgatcactaattaccgcaattagcgaggacgctcactcccctttagggcgcgtgtgtcgttgctcgccgtcctcgaggaaccgaatgtatgaacaaatggcgaaacaaaatgtttcaggtctttaggccttagcagttccgactgccacaaatttgccttctgcgacaacggattctgctcgtgcaaaattggctttgaacgtatcgccggtttttgtctgccgcccgctcgccccgtcgtcgacgacccaaaagcgtactttgacccggaaaagatgaacaaaaatgccaaccatttggacgtggaaaaggacaactcagaaggccaattttggccgagcaagcgaatttcgccaatcgaagttttccaagcggagaatcgacgggaaaaggctggcggaagttggacggatgagcagagaatggacgactcgccgaatttgggagacaatggacggaactcggcagaaactgcttttgccaatgccgagaatgcttctccatttccgtcccaacaaagcaaaaccttcgctttttcccgccactttccctttgccaattcccaacttcgctttgtttcctcagaaggaaatgagtttttgtcgccaaattcaaaaggacaatttcaacaattaatgcttcttcctccaacaattggtgcttctttccaacattttcctgcgcattcgaaaggaaaaaaagcgacggaaaaagcgaaaagaaaaagcgcaaaagataaagccaaggagaagcagaaaagtggcaaacagaagcaaaacggggggaacgaagtggcgaagccgggcgaatattgcggcactaacgaaaagcaatgcgcaggcaattcgaagtgtttgagtgggtggtgccaatgcggggagggagcccacgttcagacagagggaatgtgcgtggaagagccgggaaaatcgctggtaggctcatgaaccgttcttgaagggcattccctgtcctctgtccttgagaaggaatgtccggttctgtctttgaatgggttatcctgttctgctagggctgtcctgcccatcgtctttttcctcctccgcttccgttcagcgtttgccctccgcttcttccgagttgctcccccataagcttcacctccccttcgactcgtgcttctcaaatagaccttgcatccacggcgcctcttgtgtccgatcagctgccctgcttttcgttcaaaagttgggtatgcttttcctttgcttttattttgtccccgtcccattgactcatttcctcccccaaaggtcccttctgtcaatgcaatcctggactcgttttcctgcataaccaatgcattccccgtcgtcccgagcttaaagttgccaaggtttgtccgtgcaaccataaaaaaacattttgcaaatttagcccggcgagcggtgccgtcccccctcagtcatttgcgattttggcgcaatttgtggcgaagaaagcatttgcaaatgtcctgcgcatcggaaattactcagttagctttacataaatgcaaagttaaaaagcattgttcgttttttcagccggcctttgcgtccgtttggcattgcccggcgagtcgtgcgcaaacggcgaattttgtgccgacgcggcgatttgtgctcctggactaaatgcatgtgtatgccaagtgggatggaacgtacggaatgggaaatgccaaaagggagagacattgaggaaattgatgaccgaagggggagagacttggaatgggcagagagaaggccaaattaggcccaagtcacacatggcatcatcggtggccaaactgtcgcttctgctgtacgggcaggtacttaggcattcgagctgagttggacagattggccaattcagcactgccaattcgactcagactgtgcccaccttcgcaacgcccattgtgcgcctgtcacacggaaatgcgcctgtgaagacggcttttcccagttgtattcgtccatttgtgttcctgagaacaaaatcaaactgccgggcgatgagtgcctttcggtaattcgaattttggcaaattaaacaatgaaaaacaatgccttgcgcagagtgcccacttttgtggtgggaagtcgtggtgcaaaaacggacgatgtgcttgcattgggagggactctcaagctgtggaagggcgatgtgtgcgcaaagcgagcaaaaagaggacaattcggagaaatcccccgaggggacagtcaatggcaaaggcattggactgctcaaaggacgggaaaagtgagttgttttggagaacttcatggaaaagtacaaaagcagataatgggacaaagggacaatgcgccacggagagggaatgccccgaggggacgcattgcgcgcgggagaaatgccattgccgggaagaagccgaaaggggagcgaaattggcttatggagtgacttcgaaattggcaccaaagcaggcaaaatgagaaaaagggaggaaaatgaaaaaatgatttaaaagcaggagaagaaagagcagaaaatggagaggaggaggagaaaagaagggaccgaagcagaagttggagaggaagaagcagaaggagaagcggatttggaaagggattacgcgttgggagagccaaagtcggtggcggcgcccaaaacggaggccatcgtcggcggagcggcactcatcaccgccgccgccaacagcagcgcaatgccatgccatttttgccgggcactttttgtgactcgtttagtcagtgcggagaaggggccgaatgctttttcggcaaatgccagtgcatttttctaggccagcgattggcatttttgaacggagttacaaaatgtgtggcagaggaagagaaaaaagggaaaggagcagagaaaaagacggagagacgaaagagaggtgaaatgattggagagacagaagtaaatgagacagcagattaattaagaattttggggagggcatttagggagtgggaaaggaaagacaaaagaattcactaattgtcagaggaaaagcattcgatcagaaagtaaaagctttcgattagaaagggaaaagctttcgattagaaagggaaaagcattcgatcagaaagtaaaagctttcgatcagaaaaggaaaagctgcactccgtccgaaattttgcactttttaactttttgcggtgtttttgtatttcttcacatttttcaatttctttcactttaactaacctttttacctctgaatttgtccttttattctcaaattctcatcccaaatttttcttcccaacagatggaaaatcggacgcaaattgtacgaattgttctgtgcttcccaataaaagttcgaccagtgaattacagcgaaaagttcttttggatattaaataattattttcgttgttaattttagccaaatggaccattcgctaagctttaccatcaaaaaaattcaaaaggaagcaaaacgtccattcccggcgaattgtgtggtaaattttttcattttgcattgttttcttttgacattgaatccaacaaatccaaaaattggccttaactgatctctcatccattcgcttggcattggcactttcacaggaccatttgattcttgcgccggtggttcgtcgtgcgtggagggcttttgcttgtgtccggccggcactcgtccgtcccccgtgagcggcaactgcgaaacttttgcgcaacaacgcaaaatgacaaaaacactggcggaagggagggaaagcggaagaaatggcacggagacagagaaaggcacagcaccaaaagcaattggtaagtgttgagaatgagaagaagatgaagaggggggggggggggatgggagatcattaacggatagccaaaaacaactcattaactaataacagcggagagacggactaaccaaacaccgaacgaaccgacaaatgtgccaactgctgatccgctcaaaaacgtatcaaagtctgaaccgacaccaaatgtgccaattgctgctgacccccgcagcccattaaccgatgtccgttcactgcgaatattcaaccaaaatttaacggggagagaaacggtttctcacgcatgcaatgttgattttgtataaataactcttctcattactaataaagcgcatactgtcaacggatgccaaaatgattgggaatatcgttccaaattcacttcaaaatgccacagaaataaatgtcaaaggtaaacgagacggatggacggactaatggcactaacaaacatttggagggaggacgaaatgggcaaaagaagaaagcaatcagcaaaaaagagaaatgccgaattcattttctaatcgaaaggctttagaaagagcttatgcccgtccatccgaaagctgttccaacggtgaaatatgcaccgggggctcaatatgtgatcagaaaaataaggtagcaccagttaagttttaagtaaaatcagcgattgagatttgcgagtgcccttccgccaaacgcatgctgcgaaaccacatttgcatccgatccaacgaattgccaatgatcgaagcgaaggtcgtaaaaccgggcgaattgtgtgactccgagacaaaatgtgtgggaaattcggtgtaagtacaaaaggcgatcaaagcgattgcatttacatgcagcaaattcacaaattcagctgtgtcgaagggtcttgccactgtcggaagagagggctc

SEQ ID NO: 9804 - DNA, 3616 bp, Heterodera glycines
  unsure (1)..(3616): unsure at all n locations
ttttaatttaaaaatttttgtagtaatctttatatatatatttttttgacatatctatatgatttatttaagataacttttttttattaatgaatccaaaaataaaaccctcttaagaatcagcaaaaagttattctcagtaattgaataaattaaaataatacaaaaacaaaaattagtaattataagataaattttaaattgcaaaaaacataattattttataaagtttataagtaaaaatatagggcaaaaagcaacaattaataatccaaaataaatatttttaaaagattgtcgattcttctaaatattctttggtttatagtagggttccaccccgacccctcgtggggcaaaatgtcgggggtcggggaccccgatcgggtagtgatcaacgaaattttttaacgaaaaaagcaaattttcttttaaattctcataaataaagttttcaaaagtcaaaaatcgtctttttcttcactttcattatctgattcaaaaattttagtgaaaaaattcttagtgtttgggtaaaatgtaaatattattgaaataactctttaaatttttacaaggctcgcagtcctaaatcccccgaattagtgtcggggggtcggggggcaaaaagtcgggggccggggacctcggggggcgacatgtcgggggtcgtgtcgtaaatattttaaaagattgcctattctttctaatattctttggtttatagataacaaaaagaataataaaattttaaataagattagtttattttcttcttccaaaaaagtgctataattacttttgaaatttaataaaatcgagaaaaaaaaatgtaaaatatttcattaatttataaaaatccaccatttatatatcccaccaaaatattggagaaattcaaaatttaaaatgaattagaacctaagtaaaacaaagctgcgaagtacacttttaaattatgcaaaataaataaaagcaattatacttaatgtgttacacaaaataagccttaaatgcaaatatagactttctctccggtgttatgggaattttattttgatttcacttaaatcgtgtataataaatatttataaactatttcttttactaataattaaaaccaacctaaaaaattcttttattttaaaaatataattttgtatcatttaataaaaataaattgattattgaaatttaaagttattcttaaacattattcatttttctttttatttgaatttagttaattttttttaaattaaatccgttatatatttgttattatttttttctttccgcaatccaaaaattattattattattcaattgccaattatattaaaataataagagtaataataattataaataattgcagttgaaaataacatttaatgcttcgcatcaattctagcataaatgcaataaaatgtctatttttaatttgtttattttttaggttttcacttggcgaatgctaaatttttcacttggtttgatgtcgacggtttctaatgacatgtattttttaattagcaattttctatcgtaataattttaaaatatttgttaaaatttaggtatgataaatataataacattatgattttaaattattaatttaatgcaaattcagatagattatttattagtattttttccaataaaaattttttaataaataaaaattactccattcattagtatttgtatttttttatcttttttataaacatttttattcaaaataaaaaatctttttttaaaaatacaataataaatattagcgactaatttaataaaaacagtctgcaataaaatgaagaatttgcttatgaaatttctttttttttccaaatatttattgctttaattacctttaaatgttttatttatttctattattcttagcaaaagtttgttaattctgaatgataattaattcttcaattttaaactgggttcatatatttaaaacatttacatttataaattttctctgctgaatattctgtctttttagctgacatgaaagataaagaacaaagataaacaataatttcaattttatattttaattttaatataaaaaaacaacttattattctttgattattaatcatttaattcaaatcttccaaattcatagagttttcttacttaaatatttacaaatagttttttatcgttatgaataaattatatggcctttaattttctaatatatttaaaaaatcattaatttttgtttattgtcatcatatgtataatgataaatatttaatctatttttgtaatattctttatttaataatgctttatgaaataatataaataaaaataatatttatttataattaaaaaaagatgttttgtaaatttcttatattattgagttcacaaattattttttattaattatattttatttttcaaaaatacattaataatattaattttttcaaacggtcttaaaaataaccgaatgttttctttcacgtttcaagcagttaaattaaatttttgtgtagcacatctcttttatgagatgccttaactattttgttttacttattgtaaaatataatttaatgaataacgctaaaataatttatcattaaattttattaatttttcaagccataattttattttaatcattttataatttagttttcttattcttaataagtaaataaaataaaagctaatttttaaagaaaaggtatatatttttcttttttgtcctcgctttattgggaagaattgatacatagattattaggaaaaaacattaataaattgtctttatttgctaattatataattagtagaatataatcaatcaaactcagtttttttttaaaaggatatagttaatttttcgaattttttaaatctattatttctatattatatatcttagattattattgcattatataattattattttcatttttttcgatatagtgaaattcttcctatatcaaaaactttaatataaattttaaaatttgtcctatcaaatttaagaacatttttagaattacaattttaacaaaatttaatcttattaatatttatttatttatgcaatttctttattatttatttactttatttttgtaaaaatttattagcaattattgatattaaccatatttctcttacggacgctggaaattttctctactttcatagcgttacgtcattttttttttaaatattttgtttttttgctttaggcattttcattgataagtaattaattattgattaataagtataattaaaatcatcgataatcaatatacgtttgaaaaaataaataatattagaaattttcaaataaaattctctatttttcactatttggcgtcgcatattttaacatgtaaaatcattacatggtttattgttaattaatgtaaatgtaaatatttggttaaatattgctagttaaatatttaatttttaaaatcattttcattagaaccaattttatgtgcacttttgaaattttcatttgtcggttttcattttcactgaattttatactgaaagtcaattanaatacaattaagtcaaaatgaatttatatattcgatagtcc

SEQ ID NO: 9805 - DNA, 939 bp, Heterodera glycines
  unsure (1)..(939): unsure at all n locations
attttatctctccgatagggctcctcccatcccgaggggcgcttaaaaggcaacggataaccagccaaagggacaatcggagttcagtcgggagtcattcagtggaatggctaatcgatcnccgcctgggaggtacccccaggcatccatcaacatcccttcccttccaagccctgcggggcctaattacggacgcgtaagagggctcctctggactatttccctcataagcactgggtatgggacatcacggctttactggtagcaccggatggttccaaccctatgcttacagggcttgggccatgggaagagggggattcgagtggtagaccgacttttcaggggatgtctttgtgttgcgcaagtcgccaatcaattttagagtcctgatcaggccccagcaaccccctgggaatcaaaaaaaaaatccaaaattatcccacgcgtggttcgataatgtttcacagacaaaatgaaaaatatactcaagcatggttcgaattatctgcagcagcagtcaaaaaaaaaatcaaaattccatgcatggttttcgaaaattccaattaaaaaaaaatgttaaaaattgtccatgcatggtttcaaaaaaaaatgaacttcaaaaatacccatgcttggtttcggaaattttacagttcaaaaaaaaatcccatacgtggttcaaaaatcattacagtcaaaaaaaaaggggaatttaattaaccccggtaacggaaaaaagagaaaattacgggtgaaaatcattattaggggccctaaaaatgagggtgaatttaattaaccccacggggtctaaaaaataaatgtgttttgctcttttcgcagaaaattaaaatctgctcaattttaacggaattctattaaccctgaggggatcaattaatttgaaatgcgataattataaataaataactaaat

SEQ ID NO: 9806 - DNA, 2002 bp, Heterodera glycines
cagaatccaggttgaaactcgttccagtccggtatttcccttgtttttcaggttttccctaatgaccggtcactctctctctcgtaataaatcaaatgaaaaatgtccatcaattgttgacaaatcaaaccccataaataagtattgaaaatgctcaaattagcaattttccaaaatctgacaaaaaaactttctagtaaggctgtgatttctagacattttgtctgcgaattttaaatcccaggcattataaagcccatcttggactgaacgccgatttgaccctggaagttttgcatttagcaaatcccagcctttctcattagtagggctgggatttttagggttttacctatttttttgcggcttagttatgatgagagaagcccaaaaatagcagtttctcctaacaattttcgatttagagcgactttttagcacctaaaaacacctattttggcgttttggcacctaaaatagtttacaacctattttggcatttttcgaatttttagcacctattttggcatttttgagaaaaattcttaaggaaaatacaaaaaattgaaaaatagacccctaaatttcgactttctttccacttcttacagcatttccttatttctttattaatttgaatgccgaaagaggccaaatcaaacgctgcattaagcacaaagtttgacaaagtcatcgaaaacaatccgggactttacaaattgattgatatcgccaaaattttgactggcggtcgggcggatgttgatatggaaccggacgtattggcatctatgaaatatgcgccggtgacttcttgtgacgttgaacgcagtttttcaatttacaaatcaattttggccgataatcgaatgagttttacccccgaacacctcgaaatgtatctgatttgcaattgttttcgcgaaattgataaagactgttaataaatttggattttttcgtataaacacacttgatttcttgaatttttaatacctatttttgcacctattttggccttttggggggtttttagcacctattttgcacttttttagcacctattttagtacctattttgggatttttagcacctaaaaatcccagccctactcattagcttatccctccatttgccatgggaggacaaaacgaacccaaagaggaggaacatttgtgctgttgcacagtgccgccgcccttttctcgtccatttgccgccaccgccgccgaattcgacgtcgtttcattagccgctattggaaaatgagaaaatatttaacttaattagcctgttaaggttttaattggttcaaaatcaattattttgtaattggagcatttaggcaacttaagaatgccgagcagaatgatcccaacagttcgtgctattattgcagggataagatgcttttgaaccaataataaattgccaaatttagagacagtgattaattaggaattctcttggattaaacaaaattccaaatcattaaagtataaaataagtatgaaagaaaaaaagtttcaaaaatttttatgtttttcgctttttaccaaaactttttttacatgacaaaattctttttaaatctgtgaacaaagaaaatcaaagagatttaaaaaaaggtttagattaaaaatgagagtaattaccaattgctctaagcctggactcaatttatgcacttaattgaccgatttcgcccaataatttatattttctaattgttttccgttttccgctaattcaaactttgatttgtttgcgattgcgcagtttcgctgccgacgcctgccgtgcgagcatttcgcagcgaatttttgaccgccgcattcgtcggcaaatggccaatgcttttcgaattcttttgccgaaccgcggccgttgcgcgtgtgccaccaccgcccgaaatttcgtgcagcagcaccaactgttggcaggtgcgtggcgaccaccgccagcagggcaacgccgcccccgccaatttgggaggccgaa

SEQ ID NO: 9807 - DNA, 2518 bp, Heterodera glycines
  unsure (1)..(2518): unsure at all n locations
aaaatagccccctaatttcgacttctttccacttcttacagcatttcctattttctttattaatttgaatgccgaaagaggccaaatcaaacgctgcattaagcacaaagtttgacaaagtcatcgaaaacaatccgggacttnacaaattgattgatatcgccaaaattttgactggcggtcgggcggatgttgatatggaaccggacgtattggcatctatgaaatatgcgccggtgacttcttgtgacgttgaacgcagtttttcaatttacaaatcaattttggccgataatcgaatgagttttactcccgaacacctcgaaatgtatctgatttgcaattgttttcgcgaaattgataaagactgttaataaatttggattttttcgtataaacacacttgatttcttgaatttttaatacctattttcgcacctattttggcctttttgggggtttttagcacctgttttgcacttttttagcacctattttagtacctattttgggatttttagcacctaaaaatcccagccctacgcattagcttatccctccatttgccatgggaggacaaaacgaacccaaagaggaggaacatttatgctgttgcacagtgccgccgcccttttctcgtccatttgccgccaccgccgccgaattcgacgtcgtttcattagccgctattggaaaatgagaaaatatttaacttaattagcctgttaaggttttaattggttcaaaatcaattattttgtaattggagcatttaggcaacttaagaatgccgagcagaatgatcccaacagttcgtgctattattgcagggataagatgcttttgaaccaataataaattgtcaaatttagaggcagtgattaattaggaattctcttggattaaacaaaattccaaatcattaaagtataaaataagtatgaaagaaaaaaagtttcaaaaatttttatgtttttcgctttttaccaaaactttttttacatgacaaaattctttttaaatctgtgaacaaagaaaatcaaagagatttaaaaaaaggtttagattaaaaatgagagtaattaccaattgctctaagcctggactcaatttatgcacttaattgaccgatttcgcccaataatttatattttctaattgttttccgttttccgctaattcaaactttgatttgtttgcgattgcgcagtttcgctgccgacgcctgccgtgcgagcatttcgcagcgaatttttgaccgccgcattcgtcggcaaatggccaatgcttttcgaattcttttgccgaaccgcggccgttgcgcgtgtgccaccaccgcccgaaatttcgtgcagcagcaccaaactgttggcagttgcgtggcgaccaccgccagcagtgccaccgccgcccccgccaatttgggaggccgaattggcagaagaagcagcctaagagggaaatgcaaacgcatgcaattgaaccaatgaaatttattttgtgaatttgctcgaatcgaacttattgaaataattgggtggccaaaaaataataataaaaacattggggatggggtgggacgtgccgcaacttcgctccccttggatacgagcatgattttcttaaaaattgaaaaaaacataaaaactccaaaaaaaaatccctcagaaattatcaaaagagctaaaaatagcaaagccgcattttcaaaaatcattcgtccctcatcagcagataggcagcttatcagtgaattttttgatgtgggaataaactcggcaatggccaattgtcggaaaggctaaaatcggctttctcaagtttttaaattcctgcccattagtttttttgtaaattaattgcaatttgatgaaacagaaaaatgcggagatttcactttcaaaatttgttcacaaagtgccattgtccgtcccttctcctattttccctgctccaaatttggtccgaatatctttttaaattaatttctaccattccttattcatttggcatttatttcacatttaattcattgctttttttaaacatttgccataattttatgaacgtaccgcataaaactctttcaaactttgcgcacgcgaacgcactgaaaatgggaaattaattaattcatgacacaaaacataattgttttttgtttgttttttgtatcgtaaagccaagccaaaataggggtatattttgccaattaaaacaaattaaattcatatgtttttcatatggaaattttgctcgaaattgcataattaacaatttgtaccgctaaacaaaacctcaaaaccctccctgctgatcattgataaaccaaagaatgattcccaaaataccggcacaaaccatttttaacgcgggacggaagcggttgggacgggaacagcttcatctccttggctaaaggcaaaaataagcaccaatgatncatttgcaaattttaattaagtttattccctcttaatatttaaactaaataatattttatatttcattagctttt

SEQ ID NO: 9808 - DNA, 1453 bp, Heterodera glycines
aaacttggatttccttgaaaaagttttagaaatggtgttttcaagttttcaaaaaatgaataactccatataaaatcggcttatcctccccccccccccgccgccgtcagtggggggggggagaacagctgatgcagcaaaagcgagccgcactgctcccaccgatgcggcggccgccgggcgggcggagggcggaggcaaatgaaaaatgacggcggcggaacggaaggagaacgccgcccgcccgccccacggcgacggcggcggcggcggaaagaatgtttcagcgcaacgatcacatcgtttgcacagcacaacagcgggtcaaagtgtttgcgctgtcgactcaaatgcacttatttccatttgcgtgtcattagcataaaaatgatgatgacattttgaaaaattatgtgggactaaaaagaaattataaatttaaaaaaaaacattatccatgtttttgctaaatcagttatctgtttaaaatttgacaaatcgcttcatcttgattaacaagctcaagcggcaccaaaaattcattaagttttaattgttaaactgaaaacgattcaaatgcatttaaatattttcgcaagaaaaaaaggatttttcttttattaatgggcgcttaaaaagcatcaaaaaattttaaagtttaacacgttgaatttaacataattagcaatgtaagacagaaagattttccagaagaggattttctagcatataattaaaaataaaattaaaaaatttaatgagaatttagtgaaaattgtttatatgaaaatgataaatcaatttttcgattaattatataaaaagtggtatctgacaatcagagaagtaatggaaaaaataaaccggcttttacgggtgaaataaaaaaaccgtcgctcaattttttaaaagttgataaaattttgttggccattcaccaaataattggacgttttccaaggctttctccgtcaattaaacgggcgacggacacaacacaacgagagagttcagtgcttatcagttgataaattaattgacaatgcgattcggtgctcattcttttttgttattaatgggtcagatgactggcactaattgccatttccttagattttcaaaataaaattcaaataaaataataatggctaacaataagtaatgcgattgagacattttcacgcccacaattgtttaataaaaaaattatgttaaaaatgcacatttattaaaatttttctttaataaaaaaagaaattaaatttcacccagtgatataaattgatcagcaaggaaagaggagaacattagaaaagttaagttttaagcgtaatccgaacaaaaaatgtaataaaaaggaaaaaaacaaattaaattagggaaaaatccccaaaaaatttccgtttttaaataagcaaaaaaaggaaatattattaaattggagaaaaattag

SEQ ID NO: 9809 - DNA, 4116 bp, Heterodera glycines
cctggcaggtcctacacctcaagattttaaaaagttccacattcactaagttatgcgcaaaaccgaaaaggtccttaatcgctacgctaatttatgctatggggatggaacgtttaaattgtctcttaagcgtgctctttgttgattttttatttttattttgaggtgtaggcccaaaatggaaaagtaccaaaattataacaaatgtttggacagacagaccgagttatgctcagtacgccaagcgttcgtccgtggaaagacccgttaaaccctgaaaaactattgaaaataagccaaaaacgccacaacacatgccaagaacagagagttgtggcgtgccgggcgcctcgttgcgcatgcaactggacaaatgttgcgctgtcggcggactgccaccccttagacgagtttggtaatgaataaaggccgttttgatggcattttcgttggccgatgagccgcaaagcatcgtctgaacatggcgaagtccgcgcggtgcaaccgaatgaagcgaacgggcgaccaactgggcaaaatcgctgcgcggaaaagcaccgagggcaggccgactcaccgcggtggtctgaggacgataaagcattaattttaaaatagtaaatgaagcataacgagtgagcattgttatttttgagtaaattgaaaaactcacaattagtcgtgcatcagtggccaatttgatcagttcaggatggttgtagcccagcggtaatgacgaaatttgagtgaacaagtcctaaagaatggaaaaaaaggaattaatttgtcaaattctcgtcctcgtactagtagtgcgttgccatccgcgtcaatcaaataattgccaaaggaacgctcgtagtccgcgaagaaattgatggacgttgtttgctgaattgtaacttttccattagagtgatgacactttgggcaccggtcaatcaaattaaaaggaaattgaaaattcaaaaaaattacaattgtttttttataatcctcctacatggacttgctccatttcttctttcagtgccttcgacttcgggcccgggatttgtgtcagcattgagggcgcatcaggttcagaagaagcaatagaagacaacgaatgagcgaagcgattgacgattgattgacaaccggagccaaaacgaaaagaggcagcagcaaaggaaactcggaaatttatcattgttacttaaacaattatgtataattttcatgggtttagaaattatgtttttataaacacaggcaaaccagcatttggcttttgcgattttcagctgattttctagttacattcttttaccaatcgtaccacaaaaaatttacaagaattaagcaaaacaatcgatttttcatcaataaagcaaaaatcagcatctcaaaaaaataaacctggaccccttgaaatcgtgatgtccgagaccaaaaatttcacgagtcttgaccacgagaccgaaaatcccagaacccaaaaacctgcttttttcaagaaagattaccaaaaggatgattttattcttcgacataaatcgaggttctagagcatcattactggaaaggcagaataggtaatgctgataaatcagcagttggctatcctatttaacatgtagaatgaattctgtttttctctattagcagagataataaatagtaggttaaaatcagaggcgtattttccccctatactctctatttattaattcatctatcgtattttcggatgctgtgtatacttttttactgtccatggctggcttttgataaaaggcaaaaacgaagacacaaaacaacaacaacaacaaaaattggcacaacagtgaaaacaaagcgaaaatggaaccgagaatcagtttgacttgagcaagaaaactaaacataaatgaatcatacggtaaaaagggccaaaatggaaaagaaatttgggggcgagtgggatggaggcacaattactttggtccaccacttttgatctccaccacaaaattggaaagaagtaataatttattggtggtgatcaacaatttcattccatgacaaaaagcatttgggatttaagagagagacaaacagacaaaaaataataaataacaacactggtttttaaaaccaacatataacacaaaattggggaatgaaaagatcaccggattcaatccacctcaaagacttcttccgtcaaataatttttagagcaatgagccttttgggagtcgtttaagcagccgttgaactgacgaagtgccaggatgacgtcattgtgtgataattcgacctccctgacgcattttcccctgtaatggctgtgttgttatttattataattctccgtcactcctttcacccaccgtccgcccgatatgaacagttccttgacgacgctccgatagctcgacagaaaggagagacggacgacctccttcaggtcggccccactccgctggtcagacgcttgtgcaattttttcgaagtcgaaattgtcctccaaattctcatctttcaggatgacacgaaggatctgctcgcgagcattcacatcgggcaatgggacgtgaattttgagcgaaagacgacgcaaaatggcattatctgaaaaaatttattgtaaatgcagccacactcaatggattaaggggagggagtatagaaaaaatgagcactttgaatgggtgaggattatgaaaatattattgacgaaaaaggagcaaacttatgattcagacagcgtcaccgagacaactttttgatttaattaacaaataatcccttaccaacgtcctgcggccgattcgtggcaccgataatgatcactgcggagtttgagctgagaaagccgtcccaaagcgccatgaactgggttttcatcacagcggtgacttcgtggtcaagtttgtgacgatcgcgcagcacagaatctaaggaacaaacaaataaccgaacggaattaatcgttgaaacatattgagtaccaatttcatcgatgaatatgacacatggctgaatctttccggcctgaaaaatgaaatcccattcaagtccacaatctgtcgcacttaagaaaccaaccaaagtgaacaatgccttggtgagtttggcagtctctccgtaccacatatctgaaaaagtatgaatagcaataattgtgagtggttcaatttccacaaaccgctgagcaaagaaatgtcgaaattgatgaaaaacgcgtcgatttccttggcaattgcgcgcgcaatgagtgtcttgccacagccaggcggaccatgcaaaagaacacctaaaagcagaaattcaaagcaaacgaaaacattgttgcttaaaaaaccttttggcggactgtacagcgaagatggaattttgatgttcgcggagatgagacggagagggaggatgaggttctcctccaaaaggtccaagagtgaggcgcagccgccgacctggccaagggcgattccatcctcgggcattgcttaaacggaagtgttggaaaaacacaatcaatgccagcaaaaacatactgatgagtgtggcgatgcgaacctaaacatacgaaaatatagtgaacaaatctaaaatattccaacctcatgcgaattgagctttattttgtttgggtccaatttcagtgctttcgtgatctcagccacctgtaaatgatgaaatgcatcaattgtcaatgctcaaccattacttgcggcacaaaccctttttttcgcgtttttttttatctcgtattgcggatccattcgctgcaacattttgtacataacgaaccccaaaaaggcggtcgaagcgcacatacaaactgatttagcaattagcaacgaaacactcatctgctcagtagacattactgcttgatatagtgcaaatagataatttatgacaatcatgaagaggggtctaatttaacttttttgttttgggttcaaaatcagttttccggaatttccaaggttgctgattacgaacctgaactcgggtttgcctaatttcgaaccccggacccgaactcgaacaagagttgaatttttcaccaaatttgctgtgaaatcaaaatgatatagagtcttgcaccaaaatggcctgcgccaaagtggccggttccct

SEQ ID NO: 9810 - DNA, 2490 bp, Heterodera glycines
aaaaatgtaaatgtcaaataaacatacccaaacttcttcgatatccaaagtcttccgtagctccactaatctctcctgagtctcatcgttcaattcctgggccgtccttcctccaatcagttccgccgccgggtcataacaattcaaacatccatgtatgtaacatcccataacctcgatgcatttttccctagctccgttattcgcaataaatccatccaatttgtaagtcccaaatttaacttctcgtccgttccccgcgtgccgtatctcaattccatcccgttggctccgccactccaaatactttattgccatcacactggcgcgatcacaccgctcatatcccttctccggcacaatcgataactactccgtcaataaaaacattgccttaaaaatattcatcgcaacccccgcattcgtacaactcctcggtagtgggtcaaatcccttagtaatgtcgttaatcaatatcctttgaaactcaataatcgacaacaataaaatctccgtgtcgtttctgcaataatttctcaattcttcatccaaataaaagggcgtctccttgttctcattgtacctgaaaaaaaagaattttattcaaaaatttttctattttcctaccatttttcgaattttataaatttagccttgttcatagatcccggcgaatagtcctccatcggtggcagatgttccaatcgtattccataattttctttcttattgtaataataggggaaaaagggcttgtcctcacagtccaaattaaatgtcgccttcagcgactcaagcttcaccggcatcaataaacatgagtctctccaaatcagcatcgaatgtttcttcgagttttgcactttaaattcataaattttcaatcaatacagaacttcctcccacggttgaaaaagcaaacatatttctttaatccatcccagtgaccattctccaaaaatatcggcactacattttcacggcccatagggcccttccacaaaactcggatcgacttccgcggatctgcggacttctcaaatgcaatttcgtttccatcaattccacaattacgtaaaagttcaacagccgcttccttttgtcttgctaagttcttcataaaacgaataaacgaatatttatccatagttaaataattaattgacgacatcctcgcgtaaaaaaggcaaaatttatcagtattcataatcctaaaatttacttaatttttattttttgcctaattaaattatttaaaaataaatattttaaactcattttattttactttctttattttttattttttctgttttttttgtatcattaaattttattttttatttatttaatattttttaattaattattttttactttctttatttttaattttattctgttttttttgtttcattaaattattattttttcaattttttctttaaaaattttttttttgcttcattaaataaatttaatgtatttatttattgatttttttattttaatttttttctattttaattttattttattaaaaacacttatcttatccgttggtgttccttaaatccgaaatcaaatttatgtacattcctcggcccttctccactgggcagtgtgacgaaagtaattttcatcataataggctccgacaacaaaagcgttttcttattttcatctccgtccccactctgccccaacttattaatctcctgcataataacatccgcattgttctgcgggtacgccctgtatggtacccaaaccggggaagcaagcccagcacccgtaattgccactccaaacatccgcacttttcgcttcattttttcttccgtagtttttaaagccatcttaatcattgtgtcgattgcgtccctcatcgctacgtcagggcgtctcacatccgaattgatccgaaattccgtaatgttcttcgtgaatccaaatttttcgcaaatcatcgaccgttcgtcaattaatttataattttccatttcttcagtaaaattgttcctgaaaaattattgaataaaattatctcttaaatatattattaaaaattacttacccgattgatctaaaatcccattttttggtcgacggcccggcttgttccgtatttcgttgaaaatagggaaccaatcaatcaattttgattgacaggttaacaatttggtcaatatttcgaaatcgtaaagtcacggcggattgcgaaataatggaagaaaaataaaagaccatcaattatttcagaaaaattcaatttcattatttaaatgaatttttatttattcaactattgtccaattaatattcctatatcttacaattaattcgaatttcattgacaattttggtgcttatcgatttttttcacgactcggaatcgcggcgcatcgacggagcggatgagagtgcggcctcattatcgattaattttatcgatttttttttgcgcggcggcgacatcgatggggaggg

SEQ ID NO: 9811 - DNA, 2122 bp, Heterodera glycines
  unsure (1)..(2122): unsure at all n locations
cattttattgacagttgacctaattaatggggccacactcgttaaagtaattggaacaaaaagtcacgtgcagattgcgaaatattggaagagaaataaaaacacatcaatcaattttggttgacaggtgacctacttttgaaaattttttcatcccgatttatttattcattttcgatttttatttttaaataatcaattttattgtgcaattcaataattattcatggcattgtttgctgctaatatcaattaattcacacttcttccaaattccattatcgattactttgcgcggcggcggcatcgcgtcgccggacgggcggggagggaggggagaggtgataaaaaccgcacggttttgactaattttcaaaaagaatttttaatttcaggatccgaaaaacccatcataaaaaatctcaggatttgagaaaataaaaccggcccaaaaggtttgttttcttcacctgtcacattgtcacaggtggatgattgatgaccttcccgcggcgctgcgcggccgggtgaaaaaacccgcaacaatttggggaaattttcaaaaagaatttttaatttcaggatcagaaaaatcatcataaaaattcaggattgagaaaataatacagccccaaaaggtttgggatttaatttgcaaaagaaaaaattgaatttccttcacctgtcacttttggtgacaggtggatgattgatgaccttcccgcggcgctgcgcggcgcgggtgaaaaaaacacccgcaacaatttggggaaattttaaatccacaaggcggcagagttcaaagaaaatcccataggctcaggatgtgagcgggcggcaacttcaaagggctgcacccctcccataggttttggctcttggctgcatcttcaaaaggtccacccctcacataggcacgggtttgtgcggtaaacacccgcaaccaacccgcaaccttttgacattatatactactcatgtacaagaaattttaaggagtttgccaatgtcaaaaaaaatatgaaaattttctcaaaaaatgggtgtcactcaagccgcctaggaatttgttccaaaatatccccggttttaagccatttttctggttctcagaccactctgaaggagtgttctgattatcgcagcgcaactgacttttctgtttagcataaaagttactcttacatgaattttttcagattttttgtggtttctaggaaatttgtgagttatcaaaaaagagtaattggaacacccatttttttggaaaaattcataatttttttttgtcatttccaatctcctaaattttcgtgttcacaacagccttgttttatcgatacaagtgtcgctacggatttactgttgttataatcttcttcatacaagtgaagtttatgcggttatgctttgcgattcaaatgctgatattccccctgcgagaattattgtttatccgaaaaccgaataaaaaaattaacagatttatacccactagataaatttgtagagccaatgacatatcattactgtatccatgtggtcgaaaaggatatcattttggatttaaagaccaaataggaaaaagagttacaatttgtgatagctaaaaacttgtttttttccgtgaaaatagaacatttaagattttcattaaaaataaagctgaaaaagttggcacagaaatcaaaaaaggtaatattgccaccaacgtttactgatgtgccacgaaatatgcatgaatatttaatggatctaatggatcgcaatggcaattgttaataaaactggaaaacccggtctttttgttacttttacatgcaatcctaatgaccctgatttaaaaacgggtcaaacaactttagatagacctcagacatagttgcaagagatttggaattaaaaaagaattagttattttatttttgaggaaaaagatgtcaacagaattgtagtttgggtaagttctacaaataaaatcaacaaaactaagtcattaaactccaggattcggagacttcgcaggattctcttctcctcgatcggtataatatagcaactccgcttgnggtcgtgactcatactacaaaagtggcaatacgtctctccacattcgtgcatc

SEQ ID NO: 9812 - DNA, 4582 bp, Heterodera glycines
  unsure (1)..(4582): unsure at all n locations
tgtgagcagattttctgcgaagccgtaaaatgggcgcccggcctaaccaacagtcacttgctcgaatttattcgctccaccgattcggctacggacaaaagtttgcggatgacaataaacgctgtgctcagctgcacggaacgggaaacggtcaactcgctgatccatgtcactggcggttcagcaaccaatttgcaagttttgcacgctgctgccgacacgggttcagtcggtagtctggcgggtgctgccttttggaggcattcgaggcaaacatttatgcatttcagggtcggatttgtcttccgccaccagtccattagacatttcgacttatttgtcggcaattaatctccgcgcgggttatttgggtcaaatcaaaggaatgttcgaaatgttgcgtgatacgcataacagtgaagaaattgcgcatcagcttctgtcggatcacttggaaaaacttttggactctgccatcaaatcttctgacccggacagcatcagcaaaccgttgcatctgatgacagcttattgcaatttttgttcacgtatcatcatttttagaatttttggagataaaaaaaagtattatttaattttaatcgcagaaatcaatcagagaattttgcacgcggtcatttgggctccattacgaagcttcacggaacagacaatgcgcaattgcataatttgttggaattggattttggtttcaatgaaagacattcaaattgatgttagtgaaattgataaattaggtaaaaattactgaaaatttcttttagtttttacaacaaatgaccagctgttggaggattgtgtcacagcaaaatttgggtcttttcagcagagagtacgactcttttgcttgtccactttcctctcaaaactgtgggcaaaggccgacgccaaatgccattccgcataatatttggatcaacgtacgttttcttggagccggtgacttcattagtattccctcttaataaatttagaaatatgaatatttcgaacatttttgacaaaagttagaaaaactaaactaaaaataataacccataaaaatgcaattcattttaaaattcaaatttccctatactcatttctcagtatcttttgctttttgagttgtttttattctcccacagtttttggctgaaagagtgagcctcgcgcggtattgcggccgagaacaaatcgacttgttggagatgatgttcattcagtccttctctctgagcattggcgagagtgtgccttcgtctaattcggcgtctcctgaccaatttttgttcattcccgaacaaaacaaagtggcagataacactcgtaacttctttcttcgcaatatctattcatggattttccgttttttagctcttatttcccgtaatattgtcgctgtcggtccccgtttccgcttactttcgtccgcactgacgatggtccagggcgagacaagcggatgccgcatttcgaagaacattctccgccatcggatttatgccgtggcattcgattacttttctatcggtccccaaacgccattatatggaggggcatctcttcagaatgacattcgcagcattgtcacattttggcaagcactttatgccgattcaaaatacattcggaaggagtcattctccaccaatggtctttccacttccttttatgactttttctgtaaaattgttaagataatgaaattcttttcaacggtcttccgccacaattttacggaggtcaacacacaagcgaagctgcgaagtttaattacgggaaaaacatcacattaatacggttgtgattaaggaaccaaacttggcatggttcgactccgatctccggcggttggatgacttcgacagcaattgcaaacagaacactgatggggacagtaggacaaaacccactttctaatttacgcatccaagcgaaaatcaacgaggagaatgctcaaatgattgatcgacaaatgaagaacattttacggaaacgacaacttctgctgatccttttggtgattggaatcagcttttattattatgattagtatggctttgattagatgaatgaaatagagcggctttatgcttggcttttccctcgtgctgacttgcttgagcctggcgaagtggaattcgatcatttcctcaaaaatgcgctcggaggagaaatgcagacacgcccggaccaaaagcaaatgcgcgaaaacacgaaatttgcatgggaaatttcgcctcaaatagctgtccatatgggaacgaggtacaaaaaaaaagaagaataaagcggactcagcttttcgaattcaaaatgtacaggtttcgaatgtatcctgtgaccatcaacgcactgcaagaacttattcgttctcggcctgacagtgtttcgcatattcccgaggcattgccctattttatcggggactccacggcaacttacgaacgaattgatgtaatttttatttaatttaagaaacccttcctaattctttttcccattagcttactcaacttttcacatggaaaaagtgttctcccgtccaagcaatcgccctcctttgtcctcgactccacagttttcatccgctcactttgcaatatgctgtccgagtgctcgagtcgtactcaagtgatgttctgcttcattacatcccgcaaatcgttcaagccgttcggtgggattcggttggtttattaatttctattatttctgttgctatttgtttgttttttctttagatgggttacacttccaaattgattttgagtctttccgcccattctcaacttcttgctcatcaattgctatggaatataagagcaaatatgtacacagatgaggaggcaaaaattgaggacccagtgctttacaaaccgttgaaagagattctggacaaagtgagtaatttttgtcagcaatttatttgtcgttctttctctttttagattaccggacagtttgaaaatacaactcgcattttttatgaaagtgaatttaattttgtcgacaaaataacaaatatttcgggaacaataaagtcaatcccgaagggcgatgctcgaaaaagggcgtgtctaaaagcactcgccgaaatacagcttggaggcgtcagttacttgccatcaaatcccgaatcgattctgttggaaattgattatgccagcgcaagtcctatgcaaaggtattttaaagggtaatataaaataaaggatttatttagtgcggctaaggcgccatttttggtacggtttaaagttcgacattgcggcgtcgaaagagttgaaaagatagcattgaacgcatatcaaaacatgtcaaattatctccaaaaagaatcgaatgtgtccgcagtccatcaaaaggggcaccatcgccgaacatcaaagtccaagggtttaaccaccaccaacacatccccagcacattccgcctcatcattcggaacaccgcagattttggtggcattggccaatgaaaattttgacggcattgggcgaccgaattcatcggacacgatttcatggaaagctgcaatatttaaagtccgaaaataggatctttaaaggaagtgaatgttttatattttgctaattgtaaggttggcgacgatgttcggcaggacgttttggcccttcaactgatgcagctgataaaggacatttgcagcactgtcaacttggacattcagctgttcccttaccatgttgtcgccacaaacccgggctgtggcgtaattgaatgtgttcctgactcaaagtcccgtgaccaacttggacgtcaaactgattacggttggacaactttatttttgatccactaaatcggtttttaaggcttattcgaattttttgtcaccaaatatggagaagaaaatagcaaaggttttcagttggcgaggtatttacctttttggattaaaaatacaaccgaagtaatttcaggcgaaattttgtccggagtatggccgcttacagtgttttcagttttcttctgcaggttaaagacagacacaatgggaatataatgctcaactcggctggttctatcattcacattggtcagattgttgtgccgttcaattggacatgacgctaatgtttttcttcttcaattttagattttgggttcatgttcgagagtagtcctggcggaaacttgggttttgagcctgacttcaaactttcgcaagaaatggttgacataatgggccacaaaatggagtcggcgccttttcgtgaatttgcagacaaatgcatccaagtgtatttagccgcgcgccattactacaacgtgagtggttgtttcagttgaatgtgactccataaaatggcagagcgagtcaattttggtctttgcaaatatctctccccctcacatacccttttaatcagtttccgaaattatcagtgtttttcgacctttaggagtttatttcacttgtttctattatgttggacactaaattgccgtgtttccgtgngaaaacgattcagcaaatgcgcagtcggttttcgcccgaactgagcgaacgggaagcagccaaatatatgatgagcatcattaacaattgcta

SEQ ID NO: 9813 - DNA, 1298 bp, Heterodera glycines
gcatttggattttgtcattttggagaattatttcgcgaataggacttttcaaaagcaactaacacctctttttcgaatcccaaaacaaccctaacagtctcatatcaacaaaagtaaacaaaaatactcagcggcgccaagagcgtagcgcttggcttcgggggggggggggctttagcccctatttgaacggcaccatttgtgagaaaaaagtggaccccagaaagagcaaaagacacggaaaaccgttggccctattaaaagggttaggaaagaatggagctaattccctgtaaaacaattattgctctcggaaatggcttttacaattaaaatcatttctaaatttagtgcagcgaaagaccaaaggccatttttggtttttcggtttgtgtattttgtatgagttcatcaaagtaaagggtaatgttgccaaattcattttgtacgccgcaaaaagcacagacggcggacgcggcgccgaatcgccggcagttcggtcatttgccgtggcgttccccggcagaaaggggcgccgccttcggtgggagggcgccgtggccatccctcgcgcattatcaggacgaccatcagcggaggaagaaatcgtatcggcgacaaaatcaaaataatttacgggaggaggtgaaaaaagaaaagaaaaagaggggggggggggagaaatgtcattttacacattcattaattataattggaaaattatctctcattttacatagttagtcgagttcttctgctgttttcggttgcctaagggggcgggggagggaaagagttcactttcccttagaaatttaatattttacatttgggatcaattaataattacctaattaataattacaaattcaattaagtggacaccgaaacaaggcagattattgtggtgataatttggggttttgggagtcaattttttgggtgggcaattgcacaaaatcccatccattccttctttggcattggcatctccaattgttgtcatttcactattatcctcaaaatttttgaccgttctaactagagtagagcgggaccgggaccaaaacacggacaactgagtaccgaggtcccggttttgaccgggaccgggaccagtcccgggttttttcccggttttcccagccaaaaattcccggtttttcaacccgaaaaggtcccggtcccgggtttgcccaaaattcccgatcccgctctactctagttctaaccatgtaacgccgagtaaaaaaggcaaagataaaagtgccataaaaatgtactgttgtccccctcat

SEQ ID NO: 9814 - DNA, 2305 bp, Heterodera glycines
attcatacgttttctcgaaaactgacactcaacattgatactctcaataccgagacctaaaatgtgggggggggggtgctcaatccatgtgcttctcgagactgtggcctaaaaatccaaagcctttttcgagctaagactttcgtgaagaactagagtaaaatgcttccgcctctaaaatctttaaaaggatcaaatattaaaaaaaacaatttttgatgtaattttttttattgtaagccgaaatcacaaaagatgccaaagaaataaaccaaaaaaagggacgatgaagccgacatttttaattttaaaatttaaacaataataaaataggaaaattttatatcgaaattattaaaatgcaaaaaaagagaagtgctttagcctaaaattaaaaaaaaaaattattcacatattttataaaaatgaatcaaccggttgggaaaatcattaataattgggacgtaacagaaggaatttagtaaattaattatgattcattcattcatttgtgaaaatgtaaaaaaattattaattaagaaatttaaaaaaaatagttttttttattacgaaaattatgaaaaattatcaaataaaaaaatatgtttttttagttttgaaaataatagaaaattgagaaaacattatttaataaggggacattgctttctagtcaccgaattgtcgattaagaaatattaaaattgttcaaaaggtttaaaatatttttatttttgacaaatcaattaacaaattgatattatggttcattgcaaaaattttatatacaaatgaagtttaattgtgcattcatttcataaattaattatggtaatcactattaaatttaaatattataaaagaaaaatttttttattgtaattctaattaaaaatgattttttcttttgctgaaaattattattttttcacttttctttctttgcccattttgcatttttttcttttcttttttttttgctttgtattaataaaaagacatttttgttattcgttaatttttaattaaaatttttgaccggaaaataaaaatgcctagaaattttcgtttccttaagtgaagcaaactgtgcttgcgcaaaggtttttttttggcaaaattttttaaaaaagatttttgattaaagactagagtaggtcgggaccgggaccaaaacacggacaactgagtaccgaagtcccggttttgaccagttttgaccggaaccgggaaattcccggttttttccctcaggtttttcaacccgaaaagtcccggtcccggttttgcccaaaattcccggtcccgacctaccctattaaaaacatattttttaggaatttaaagcattcctcaaaggaagtccacggcacctaaaaagcgctgttaattaaaatgtttaggtgaaattttcaattaaacaattcggcacaaatacaaaaattcagagaagcgcgatgaaagcagaaacaaagttatggatgtgatgaagacgaaaaatggaaaataaattaagtaattaattattggacaaaaattgttaaggatgatgatttatttttttatatgactagatagattatcaatcaaaagttcgaataaaacgatgaaaaattaaaattgctattaaattacaaaaattagcattacaaatgtaaaattaataattatctttaattatcaaaagaatttgtgcaaataatcttcgaattccttgcgtaattattgtccagtaatccgattggttcttccagtagcatgaacattgacataccgtatttggctactgtactggtttgagtcggctaccgtttgcagtgctcttgttgatattgttgttcctgctgcattgcccttccaaaagaaccgcaccgttttgtgaatggttcgcataaattgggcacgcatatccttggagagagccatcaaaaacacctgcattttgttttttatgtaattgaaaatttttaaaataataaatagaaaaaatcttatccaaaatgcaataaaacacaaaaaatatacccttaagaaatggctcaaaaaattttcaaaaatacacccctaagaaaattgacaaattttttcattgatcgccaaatttatttttttttccttgataaaaattacgtatgtattttattaacactggcttcgggcttaggcctttgcctttaagcttaggcctagaccctaggcatataggcctttgcttaggcttgcttaggcctagattcttagaaacttcagcttcactttttcttggggggcggataaatgtcaaaatgaaaaaggaaattattct

SEQ ID NO: 9815 - DNA, 4166 bp, Heterodera glycines
gccttaatcatttcaaaaaaattattttttcaaaaaaaacttaggttttcttaagaacaaccaaaataaattcaaatttttgactatttaaaccagtcccgggtcccgccccgatcatattgacttggctaacaccgacttaaatttaaccagtgaaactgcgccaaattaaaaaattcaataattattttggcgttatgtcttaattcaaagttttaaagatagaacaaaagcccgaactcaatggatttttggaaatttgtacaatttcaactgctaaaataaaaaaaaattttctctgcgaagcctgtcggcattgctggtctccgcatttcattgtttccaacaaaaagaaattagactcaaaaatggatttttttaaatgcaattaaaaaaaaattcttttggtgtgccgtggcggtattgaactttcattgccaaaaacggaaatgtaaagcactaaccacttggccaaaacaccacaggatttgatcttgttaattaaccccgtatccatgccaagcgaagtgcaattgcaacacaacatgcgaatgtaagaatccaatagaccgacatgaagcagacagcaggggtgggtcaaatgagctttgcattttacatacaaaaatcgacagtaaattttttgaatcatagaaaaactaagactagaaaaaaaattcgctaaaatttccaatttttcccgagaaaagcataaattgaccggaaaatatttgccaatatttttttcttcaaagtctcgacagaatcaagaatttacttcatataggttccagtgacgcttaggtaagcatctccgaaattttttttttaaaggctttacttttaaagcgccatagaattttatgccattccatttttcggggtatagcccgaccccacactcaaaccccaaagaatggcatttttgtgagggaaagagaaaaaaattttgttcgaattttgggtgttcattaacttttaccaaaattaaaaaatatagtaattttgtcagattattttgatgtttttttcgcaaaatatcgttatcatatgcaaatcatgcataaaatgcctacaaattcgggttttagcgaaaaaaatgtattttaaaatctcttgggattagaaaattgccatttgacccacccttggtatcggttaaaatctaaaaataaccaaaattgtttcaaagttgaaaatgaatttaccattataaaatggaactgaaatgatggccatcagatgaatgagtatacattgaataaatacagtccttaatttaggttttaaaactacacactaaaaaaccgaaaatttttggaaaataccaaaatgtaaaaatctttcatgtgcaaaattcgcgtaaaaggaattttttttgtattaatttactaatttttgcatttttttaagttcaatattttataagtaaaaaataaataggaggcctcgattaagtatatatattccatgttttaaattttttccttcttgataaaatttttggacttactaatttttttttcataaattaaaaccgcttttcagaaatttttgtctataatttcgatttttaagtctgtaaggccatttagtatatactttggcatatttttggatttctagcatatatttctgttattcctgtttttacatagcatatttaactcaatttcctcttacacacttagacctctaaataataactaaaactgagcaaattaaaaatattaatattataattactagagctcgcattttgaggcatatgcctttttttctgcgcactagtttcgatatataagcataaaaaacacattttcccactggttttaggcttctacgttcacttttattatgccttttttttttgccttttttgaaattttcgtgcattaaatgccttttttggcattttgccgttttggtgccttttttggcgctttttaccgaaaaatccattaaaatgcaataaaattgggaaaatacacacctaagaactgaccagaaaaaaatttcagaaaatacacccctaagaacttaaaaattttctcaaaaaataattttttttttcttggtaaaaattttagttttaaaaattttcctttttcgaaaacattataaaatatttaataatcatttaaattagggttgctccccgtccccgagctgcccggtccgaccccgatccccgacttttttgggcctattccccgcccgaacccccgacatgtcgctccccgaggtccccggcccccgactttttgccccccgactccccgacactaattcggggaattgggaactccgagcattgtaaaaatttaaaaagttaattcaacaacgaaggggggaaaggttgaaaatttatgaaattttgaacaattttcttaatattaattaattaaaaattccgaaaaacttttggtcggcacctatcggcaccacggccccccaaaatccaatttttttttttgcaaaaaattgttccaaaattgcaaaaattattattttttaggataaatctgttagggcaccgccgggaaaaaattgatatttgaatacaatacattgtcagattttgtccaaaaatgaccaatttttgcaattttttgagccagtttttttaagaaaattaaggattttaaggatccggcggttccgataggcgccgccgggaaaatttttgaaactttggctatatatttagcagattttgaataaaaattattaattttgctaaaaaaaactcaattcataccagtgcatttttactcacgttttttttagtatcaaaatatgaacattttacaacattttttcaaacatttgggaccaaaagatcaaaaaaatttaaaatttcttgataaaatagtgacattatgcaataaaattttaaaattataaatatatttaagaaatcggaataattttagtcgtctcaaaattataaattcttataaataagaacaatgtaagccctggtttaaaggccagcttctaacgaaatcagattattccccgatcggggtccctgacccccaacaattgagctcctccccgccccgacccccgacaattgagctcctcccgccccgacccccgacaattgagctcctccccgccccggcccccgacatgtcgccccccgaggggtcggggagcaaccctaatttaaatgaccaaaattaagttttttggttaagttttacgtgtttttctccctaaaaacccttaataaaaaactttaaatgccaattttcatgcctctttcgggatgttcgtgccttttcatgccttttttcaattttttggtgcctattatagtgcctttttcgcgttttttggtgccttttttgcgagctctaataatgaaaaagaaaaaatgacaaaaatttataaatttattgaaaaataaaaagagaaaacccaaaaattagtgatcgggaaaaattgcttaaattttggaaattggcaaaaagatcatttttaaatggaagaaacaatttggggacaaaagcaggaggaatgaaatcattagcaaattactgtacatttgttttcacgctttctttttgtcatcataataattggaggcatttattttcaaaatacataaaaatgaaaattgttttaaaattaaataattggcgaaaaaccaaaataaaattaaaaactaaaaaattgaatgttacaacagggcacgggatcgaaaatttttaaaaatcagattatgtggtcgaacatcagaacattttgcaaaattgcttctaatctattattttacaatttaaccaattaaaaaggaccatgtccaagtcgaaatttgtttattttatgtatttaattaatgataaaattgatttcggttaatacccattttattagccaacaaattaaaattttcgtgtggggtcctttttaatttcagaattttttttgtcagtttttttttagttttatagccagtataaccgagatgttaatttgttaattaattaagtaattgaatgatgttattttaatcagtggaaatgcatttattattatgttactttttgcgaatattttagtcattagaaaataaattgttcacaaaattttttttatttttctttgcaattaagcaggagtttcttattttttcttaaaattagtaaagctta

SEQ ID NO: 9816 - DNA, 3201 bp, Heterodera glycines
tccaccaaaggtgtggtttattgggaaaaacgtgatttctttatggagtaacacgaccacttcaaaagcgctgccaacctctaaagaggagtgcaagtgcatgtggtcactgaatcattgccaatacggggaaatcaaacctgtaggaggctctaggtgacctttcagccattcgagcccagcattgactacagctacttctcctcaaaggaagcggaaaggacgaactgcttcctcaccgaaagcgttgtcttctacgacacccatgaaaaacgcatgcattcgccactcggggatatgacaagctgtaaattgaacgacgaatggtgtgtccttcgcgatggagcagtgatggtttggtcaacactcgccgatgccgaatgccaattcgagcacatgaaaacatgggatggccaattccacccataggagaacgtttggacgcacaaggaaatctcactgtcatttgccggaaaggcgcaaaaaatcaaggactgcggtcggacactcgtcacgacagaccagggatttgcagtggatgccggcaatgttcctcaacatgatcaacaatcgatggtcccagcggagtgcccaaaaaaggccaattaccgggaggcgctcaaaagcggtgctactaccggtggaccaattcagcatcgacactaacatgagactggagatgatgaagtaaaatgccaatcaaacaaaagccatcatcccaaaccggacgcagcggctccaaaaacggaagcaccaaaaccggcagtgcctcgccccacagttggcccagcaaaaccggagcagccgagccgaaaggcccaattgcaaccggttaaattgccaacaccaaacaagcagcaccgatccaaaaagtgatcaaaccaaaaacggtgacgactagagaccggaaatttcaaatttgcggatcctgttgcaggattggagttcaaaattttttacaggacaggatccggcaggattaatcctgcaaatcctgcaatcctgcaaatcctgcatttaaaatctgcaggatcctgcgcaggattgcggatttttggaaattttgaaaaaattctgtattaataaaaaagtctttcaaagtataaaaaagtattcaaatatatttttaaaccaaaaaatgatgaagatgaaaattaataacgtttttttgcttacactccaagcaatcgactgaatcttctttaatgcgtttaaaaagaccgatttgccaaattgggtggctcataataatagcttaaattaaagtaaaataatttgtatttaaatttctttgcaaaaaagccataatccataatgtatagggatgggatttttaggcacaaaaaatcgcgaaataggcacttaaaaaggcagaaaaatcctaaaataggcacgaaaatagtaaaaaaaaattattaacgctttttaggtaacaaaacacataaaaaattcaattgtataaacttttttcgaataaggataagtttttaaacgaaaaatttttattaataaaaaaatttttgaaaaaagaaagtttctgaatatttggcattctatttttaagaattttcaaaaaatcaatgcatgatcctgctgaatcctgcataaaaatcaaatttgcgggtcctgttgcaggattggaattcaaaattttttacaggacaggatccggcaggattaatcctgcaaatcctgtaaatcctgtattttccaaaatatgcaggattgcggactgggatcctgcaaaatcctgcgcaggatcctgtcctgcgccggtctctagtgacgactacgctgaagtaccagccaccgaggccaacgacttctccaaaagctgaaccgccaaagccaatcgtcgtagccccaaaggtcacaagcccggtgaccacgcaaacggtacaaccaacctctccgccagaaggacaaccgaaaagtcggaaccgaggaagattccgaacgcgatacgttatgcacagaaaccaaagcgaacctgaaaaggtaagagtttacgacaattcgagacgaaagagagcgacggtccacacggagcaaaagtgggcactgttcccgtactacaacaccccaatacagggagcggaaagagccaacccgtggtgcgctatgaacgcgcaagacgagcgagactaaaaccagggctggagcaatcactggaggaagcaacgcggcagttggaagaatacggacgagtgacaatttcgaatccgagggcagtgtgttgaaagcaacaaggggaatgatcacaagggatcaatgatcaagggggaacgatcgggaaacgataagggattgaaccaagccaatcccgcccagagcggctcgattcagaattggagcgcattcttcaaggcaaaaaagagtaagcgcccagcagtctcgaggtcccgctacagcaatttgtcgaagcacgggcccaccaagccgaagaggtgaacaccaacgtgctcaacgtcaacacgacagagtcactggtcgtggtcgcagcttgcacatcagtagtgcagcagccgattgaacacctgaagtacaggtcgcagctactcaagcggaagatctcctggacttgggcaacgaagcgttatttcgttaacgacgccaagttcagcgagacaaaaaagacggagctggacgaagcactggaagctctgatcctgtcccaagtaccgccaccggaagaaagggagctgaagcagaagaccttcgatgccatcggacgcatttcgcgaaggaacctggaaggaattcgaaatttgcatcgctgggtccacgcgggcaaacactgccctaagaaatggggatttgcacatcgttctgaagcccaagtccagtgagccattgagccaagagcgaaggcttcgcgagctccaattcctggtcagggaattccgactgatgaagcgtgagtacatttactgccactgtgtcttcatcgccaaaataaaggcaccgcttatcaatcaggacaacggaagttatcgacatcacgatcgacaacatcgaagccacatgaaacagtgattggctggccgagcagatgaacgacagtaaattgtggcgactctacatggccatgaaaatcttcaccaagcacaacggcatcggcgatgcgagctgcgggggcctcaactcgctgtcatgggcaatcatgacgaagcacttcgcggcctctcgcgtacaggagcg

SEQ ID NO: 9817 - DNA, 5386 bp, Heterodera glycines
tttaattcgtttaggtggacatcttcatgcttaagtctccctttttcatttaaaatatgcatacttctgggttttccttcgatgcatatgcaaatgactcttgccaatttggcaaaatctaaaaaaatccatttaattaaggtattttaagaaaattttaagttttcgatattttcagttttatttgactttttgaagttgccattttcaaagaccaaaaattagtattttatttcgtcttactgttcttagaatatattttttcagataaacaaaaattcagagggaatcctaagtttttagtttcagaaacccacataattttcggtgtaaaaattagaaaaactcaaaaataaaaattataaattttcaacttttttttattgattctgtaaataaaatatttttttaaaatgaggcttttaaaaaaaattcatcagtgaaccttggtctaataattttatatttgaaaagaatggtaaaggaaacatataagattgtaaattcaaaaatagaaaaagcactaataaaataattagataaaataattttgtaaaaattaattgccaattaacagatgtagatttgattttttggctaatttaatcatgtttaactttgaattttttcaatcctcgagctcaaaacagcattaatagaaagtgattatgtccgatataatgttacaaataaataaaacattgttttcttaactttaaaaaagaacaaatcttttaagaaatacagattccatgtccgaatgtatcaacctaaaatttgctttttcgcaacaaaaaaaaaagtcaaattgaagaagtaatttgatttaagactcgatttttttgcaaatttattttattttattgactactcgccttaggctctctgggagccggcgttggagtcgtcgttgttgtggttgtggttgtcgtcgtcgttgttgtggtcgaaaacatcgcctcaaccttaaattttgtagatacaagcatttaacttttgtattttttaggtttccccaaattcgccttgttcttatgttagcagggctgggcgaagaaatttttaatgggatttactcaaatcgcaaaaattaatcattttttaagcggtcgaactttcaatgaaaaagaaatattcacagcatcaaattgtacagaaaaattttaaaaaatagctgaaaatcagaaattgaaataatacatcgtaaaagggtaattaaaagcaggaaaaaagcaatgcgaaaacatcccttccgaaacaggttttagggtcaaacaaatattatctatataatttatgaaaaataaaaatgaattaaaagaaaataactgataaaaaattagataattaatattatacatttaaataattatgagtgtaaaattctctttctcgaaactaaatttcgtatgagaaaattcaaattgtaattctcgagaccgagaattcatagagagtcgagatagacccaaaacccgagaaatttgtgctttgtaaggaatatccaaattaattcaatatttagccaccttttttgtacatacacaattgttcaattacccatatgggattgattgatctttggaaatttttaaaaattactccacaaaaacaaaaaatataaattaacgggtgcaccccaaaattccgccgcccgaaatttgcctgtcgaaatttcgccggggacataatttcgcaaaagaaatttttttaaaaatttcaaatttctaaaaaaatgttagaaaattttttttagactaattcatcataaatttcaagaaaaatcgttgaaaatttcggcggcgtaatttggtcccgtccccaaattaacattgattttaaaatgttaataataataagaaatgggaaaaatgttaaaccacgggtgggaatcgaacccactcatgcaccctttccgtgggcagttctaccattaagctaccgaggctcatccgcccttccttttatggatcttatcaaccccgctttccgcgttttaaccgcccagtcagctttttccttacataattttcatttttttaacaattaacattgatttaaaattttaaacaattttcattatttgtcaacacttttttacctcggcaaaatccttgacacattcccgtttgtaacgcttcttacagcataagtatgaatcaggactgtcatagtaaacgcatgcggtacgtgccggacatttgtccttaaaggaaatatcaatttcagttcacaaacactctctcaaaaatgcacaaaaactcattaaaaaagattaagcatttggtgtctatactgtatgtcattatttaaaatccatcaaaatttgtcgtatttaaaaaagcccaaaataaaaatttttttcttataattttgctataaagcaactaaatttttatcattgatacattcgaagattcaagaaagttatgaccaagaatgttcgaaaaacaaggccttttgagttcctctagccacaactttttacattttcacattgatgggtttttgtttaaataacgactctgtcccaaagcattttgtttaatccacaatgcttctcttttatctctgattcctctccattcctacataattcacatcaatatattatttaatttttacatttgaaatgaaccgataatttttttctcatattttttgatccttttggagaacgacttttcgccatccctacttacatagcagacgatgtctttggctgcttgaataattcctccaacaaatactccaactgcagcgccaacaagtgtaccgattgccccaccgactgcaaaaccgattgacgcaccagctgctgttccaaggagaggaaaagctgttgagccaatgaatccaccaacgagtacaccaattggtgcaccaactgctgcgcctattgttgcagttgtgccaacaaggcttccaaattctggcctatccacagcattattggttggcattgggtcataagccaataatttacggtcccgctccagagtccagtagtcgtattcctcataaagattcagaccctcggatcaaacacgatccattttataagggaaacatgaaccaattttttaccaaaaactaaaactttaatcaataaaaatataaagaagaaaatattcgaagattccgagggtgatgaaaaaattggaaaaaagataaagcccttgaaagaatataaaattccatggcgttttgggatggtggccctatgaatttgtgagatgttaactacggtgcaaaattcttaacccaaaaaagtaatctttttaataaaaattttcccgttttagcgatattttgacagtttgtgatcaaaaaaataggaaaaaataaccaaataaaaagaaactgatatgagaagcgctgatcacacaactgatcattatgctaggttttcgatccagtgattttccgatccagggattagtgattcatggatcatgtgtggttcgagggtccgattctcaacttctgatcaattggtgggaaattcataataatgatgaggaatgggaagcagacgaggagagctcggcgaagcgcaaccattttaaagcagtacaaagcagggggttcgatctgaaaagtttctaaatgagaatattaagttaaaaaaaactaacgatttcggtgataattagaagatttataaaaaatgattgcacttcaattggaaagaaatttgttaaaaaaaaattcgaaaaaattatattttttattttcagtatttggtcgtatcttattatttaacactacccaaaaataaccaaattcggaattagaaatgtgataaattagaaaatttttagcaattactcctaaaaggaatctttctgaaaaacctaaacatatccgaaccatagtataaagaatatgagctgtaaaagtaataagctgtttaaaaaaaaccgaataattaatatcgaaaaagtaaaaaaatataaaattatttaattggataaaaatgatgaaaatgtactcagtaaatcatattcaaaagggtgtgcttttgctatgttctgctgctgattgcttatggcttccaaggatgacggatccaaacaatttatttggatttcaaatggaactgctgaaaaaaaagtaaagctaatcatcactttccccggaaaacgtataagcactgctgctattccatatgtattaagatgaatcatcacaaaatgggaaaatttattcagcacaaaaataaaacaaaaaaacgtactttttagcgtaaatttattagtagggatggcaaaaaaaaatatataaaaagtggttaaaatatttacataaatattttttaaaaaagaaatatgtacaaaaacccagaacaggtactcaaaataggtaaatacaatttttaaataaatcatttttcgaaaaaattcttcgtaaatggtgaaattggtacaaaataccataaaaaattatctatatgcttagaatcatactttttattttggaacattttggtgcatattttatgatttagtacatattctaaatttgttcgacctttttaaaatacacggacacgtgcttaccgacatgggttacgggccaaaaacctgttccgtacacgggcacggattttttgaaaacaaccaaaattcacttcaaattcaaactacaaaatttgttgaaatttgattaaattttatgaattaaaatggttattatggatcccgaacattttggaaaaacgatcgggacggatcccgggtcgggatcccgaccgaatcccgatcccgatcaatcccgaagatttttttcgggatcccgtgggattatcgggatttgctaaaacccaatttttttactttttgtgccaagttttgttcatatgcttatctaatatttataattgatcaattcgattgaagaaaaaaagagatgtgaattatatcagatttttatagaaatttttcaaaattagaatatcatataattagcacatttatcaacatagtgtttaatttaatcaagtaatatcaatttgtgtacagtcgtctcagtcgatcatttttagcaattgtgggaatcggaatcaaaaaaaaaaagattttcaagatagatctggaaaattttgttcaaacactataggggaacaaggggaggccgccggtgccgatagagcgcttccgggaaaattttgaatttgaaatgtcatttgttaccagaatttatcataaaattgtccatattttgtgattttgatcttataagaaaatagagtagtgggtttttgggtctgacagagccgagtggcacagaaggaaaaacacgcttgcaataatttttattcggtcagtttctagcaattcctagaacacgttggccataaagctccataataacgatctagaag

SEQ ID NO: 9818 - DNA, 1007 bp, Heterodera glycines
tttttcataatgttccttttttcacttatttttattctcaatcgagccaattttttttaatactttattttcattcaaatttagaattttgccggccattgtttattttacattgacgaaaatgccgacactttgatcgaatcggagggatttttgcaaattgaccaaaaaatgttgtgcgaaattttggaacgcgacgaattgcaaatccgtgaagaaatttcaatgtggaatgcagtaaatttttttaaatttaaaaatgttacaaatttatttttaaaataagtctgaatctttttttaatcactaaattgttttgaataaaaaaaaataaaattttctcttcaatttccttactattttctcttctctgactcgtcgctgctaccatttttagcggcgggcagagaagagaaaaatagtaaggaaatttgagagaaaaacttctctcaatttaacttgatatttccaaattgggtttaaaagcggaaattatcgcatcgattttttccataatgttccttttttcacttatttttattctcaatcgagccaattttttttaatactttattttcattcaaatttagaattttgccggccattgtttattttacattgacgaaaatgccgacactttgatcgaatcggagggatttttgcaaattgaccaaaaaatgttgtgcgaaattttggaacgcgacgaattgcaaatccgtgaagaaatttcaatgtggaatgcagtaaatttttttaaatttaaaaatgttacaaatttatttttaaaataagtctgaatctttttttaatcactaaattgttttgaataaaaaaaaataaaattttctcttcaatttccttactattttctcttctctgactcgtcgctgctaccatttttagcggcgggcagagaagagaaaatagtaaggaaatttgagagaaaaacttctctcaatttaacttgatatttccaaattgggtttaaagcggaaatatcgcatcga

SEQ ID NO: 9819 - DNA, 2326 bp, Heterodera glycines
ttgtacctcttttaatcacttttgtacgttttttaatcacttttgaacctcttctaatcacttttctatcactttttcactgttgtacctcttcaaatcactgttgaacctcttcaaatcactgttgaacctcttctaatcactgttgtacctcttataatcactgttgtacctcttataatcacttttatacctcttttcacttttgtacctcttttaatcactgatgtacctctttgaatcacttttgtacctcttttaatcacttttgtacgttttttaatcacttttgtaccgcttctaatcactgtctgtaccttttttaatcactaaattgttttgaataaaaaaataaaattttctcttcaatttccttactaatttctcttctctgactcgtcgctgctaccatttttagcggcgggcagagaagagaaaaatagtaaggaaatttgagagaaaaacttctctcaatttaacttgatatttccaaattgggtttaaaagcggaaattatcgcatcgattttttccataatgttcattttttcacttatttttattctcaatcgagccaattttttttaatactttattttcattcaaatttagaattttgcctgccattgtttattttacattgacgaaaatgccgacactttgatcgaatcggagggatttttgcaaattgaccaaaaaatgttgtgcgaaattttggaacgcgacgaattgcaaatccgtgaagaaatttcaatgtggaatgcagtaaatttttttaaatttaaaaatgttacaaatttatttttaaaataagtctgaatctttttttaatcactaaattgttttgaataaaaaaaataaaattttctcttcaatttccttactattttctcttctctgactcgtcgctgctaccatttttagcggcgggcagagaagagaaaaatagtaaggaaatttgagagaaaaacttctctcaatttaacttgatatttccaaattgggtttaaaagcggaaattatcgcatcgattttttccataatgttccttttttcacttatttttattctcaatcgagccaattttttttaatactttattttcattcaaatttagaattttgcctgccattgtttattttacattgacgaaaatgccgacactttgatcgaatcggagggatttttgcaaattgaccaaaaaatgttgtgcgaaattttggaatgcgacgaattgcaaatccgtgaagaaatttcaatgtggaatgcagtaaatttttttaaatttaaaaatgttacaaatttatttttaaaataagtccgaatctttttcggactattttataaaattattatattcaccagcctttccatatttacagttttcaactctccctcaaattggcactgtttcggcccgtttcgaagcgctggtggacaaacattttgatgacaggacgattttttttataattccggcaagttttttttgttttttttgtttttttctgttcttttttgtttttgtttttgggttatggtcccaaaagccttaacagccccaaattttcaaaattcttaataaaataaaaatttttggaaattcaagaaagtttatttgtaaaagtgaatagttttttatgtgtttttttgaaggattttatgcgtaaaatatttaatggcctccaagtaggcaagtttttttgtttttttttgtgtgtaaaaatgagaatgtttcaattttttaaattatttttttaggatttttttccaaaaaacgaacttcaattttcagaatatcaaagtggtggacattctaccctttttgaccgtccatatcttaagagaacattttttcttaaaattaaaaaatcttttttttttggaaattttacatttttaatttaattttttggccctttttattcattaaaaaatcttttttttggaaattttacatttttaatttaattttttggccctttttattcaattaagcctaaaaatgcattttctatgaacaaatttacatatttaactaacattttttcaaaatttcagctgggtttgcatggtgtttggatggacattctcctcttttgaccgtcctcaactcggcctcaaattggcactgtttcggcccgtttcgaagcgctggtggacaaacatttcaacggctgaaggcgtaagtttcagtttcaaattggccattaaaatttttctaatctctacttttgtttggattcggtatttaaaaaatttaatttgaaaattttttttgagaaagtttttagaatcccctgtgtgatttgtacctcttctaatca

SEQ ID NO: 9820 - DNA, 1172 bp, Heterodera glycines
tttgtccaaaatgatcaaaatttgcgattttgggctaattttttaagaaaaaagtgactttatgcaataaaatttcaaaaaattctcaatcatgagaaaaaaattacattttattcaagaaagattcctaataccatattaataataataataataaataataattctcaactatgagcaaaaaaattgacataatgccataatataatcaaaatatcgttgaaaattacaaagatttctcaaatttctttgaatttttttaaaacttttctaaatgttcattttcaaggacgtccttggcatccaaggacattttttatttgcaagaaagagggcccaatttcaaggacgtccttgccattcaaggacggatgggagccctgccttaaataggcacttttagcttttgaggttgtgatgcaaaaaaaatcttccggttcgatctttttctcagataaaaaatgacaaattctacccattttgtggttaaaatttcaaaaattaaggtaaaatgaacgtccggcgttgccgataagcgccgccggaaaattttttggaaattgtaataaaatatggtaggaaaagttgcaaaattttcaaaaaaataaatcgcaaaaaaggcaaaaaaatgcaccaaaaagttcaagataaaagcttcaagccaagttaaaaactcgttttcgtgcatattaggctatagcaagttagcaaaaaaaggtaattattagagttgaacgggaccgggaattttgacaaaaaccgggaccgggacttaccgggaccagaaaagtcgggaccgggacctcgattttcgtccgggactggaaccaaccgggaattttcccaagtgaaattttttgaaaaaaaattgaaaatttgagtgcactttgttacgaaaaattgcctatattcaaaaatgtacccataaaattttttaattctcgtttgtggggagaaattcgaagaatttttccattatgcaattttgagtgtaatatgttaacagaaaataataaactgaagcattcgttttaaaaattaaattttcaaatatattcatttcttaggggtggaaatttcgcatttcgcgccaaaaagcgaaatgcgaaatgcgaaacgccaaaaaatgcgaataatgcgaaaggcgaaatgcgaaaagcaaaaccctgctc

SEQ ID NO: 9821 - DNA, 2013 bp, Heterodera glycines
tttcgcgccaaaagcgaaaagcgaaatgcgaaactttcttattatgcgaataatgcgaaaggcgaaatgcgaaacctcggcccatccctggtgcttatctatgcgtatcaagtgcgcgaaaattttaggcatttgcctaaaaaaggaagccctaggaattagtagggattccatttttatgtaagaaaaatcgcaaaatatgtaaataaaatatgtataaaaaatgctaaaatatgtatgaaatatgtacaaaaaccccccaaatatgtactaaaatatgtaaataaaattttttaaatggttattttttggaaaaaattcttcttaaaaagtgaaataggcacaaaatgccataaaaatgaccaaaattgacttagaatcaccttttagcattttaaaattaatttttgatatctcattttggaaaaaaccgcttttttggagtacattttcaaataaaaatttttttatttgttagaagatgtttttctaaatttacaaaatatgaaaaaaaaatgcaaaattttcgacttttttggggcatctaaaaaattttccttaaaaaatcctcaaaaattggaaataaaagtcccaacttttgttcacaaacacaaaaaagaaagtgtttttcctactaattaggctatggagaatccaggaaacaaatatgtatttacataaaaatggaatccctagtaattagcgtaaaaggcgcaccttttttagcacaatgcgctgctgcagctgaagcaaggctacggttcctatgagtacgaccgaattgcctttttacattcggactccagcaaaatgcccggggcccatggcggcccgactttcatttgttggcacagggaatacctgaaaaggtggcacagaaataaaattatattacgattatttttgtgcccttttgtccgttagattggaaattgctcttcgtgctgtcgacccaacagtttgtcttccgttttgggactcgtccttggactggcgacttgagaatccggcaattcattttagaacatttttaaatatgtaattttgtttttattcaggctgattccatcctgcacagtgaattgctaatgggctccccagacagcaataattacataaagaacggctttttggccaattggataactgtgtgtgaattaattatatcttgtataattaggtaattaatcattccacaggcaagaggagacccaattatacggacattaggcaccgacggatggggcggcgaattgttccgtttgcctaagtaaagaacgaatgctggcatttacacacatatattcttgtcatttagtcgtgattacatcataaacacgaaccaatcctacaacattttctcactctcttacgatccggtacattttctttctttccttttttagtaaatttcatttttgaaattatttttaaatttcatttcaaattatctttttccagtcagatacccaatgcagtggtcaaaattatgacaatttgcttgagagtaaccacgacggtgtgcacgtttgggtgggcggacatatggtacgaatgggcggggggcggcagcagcagatagagcagggcacagggatttgttagtccaaaaagtgccatgaaacggagccaaattgccgaattcgcagtgcttttcatggcccgggtttcgggagtttatgagctcatctaaattaatgaccatcattatgctgccattgcgcatttatttatttttgttcagagtatgcttgagactgcgccaatggatccaatcttttttatgcaccattgcttcatggattatgtaagcctatccgaataaatgaacagcaattaaaatatattttttaacaaatatgaattgatataaaaatatgacagttaatcaaaatatgcagacaattaaatttaaaactaaaacattttttgcacttcaaaattaaaattggtcagatttgggagcaatggagactgaagtggcaaagtcgagaacagcgcgaaaagcaattc

SEQ ID NO: 9822 - DNA, 421 bp, Heterodera glycines
tcaattctctggcattccaatctctcgggactctcttctccggcattccaatctctgggactcaactcttcggcattccaaacactgggactcaaatccggcattccaaacactgggactcaaatctgcggcattctaaacattgggactcaactcaccaactttcaatgacattccaatcactgaaacttaacccaccagcatttcaatctctgggactcaattctcaggctttccaatcactgggactcaattctcaagctttccaatctctgggactcaattctccggcattccaatctctgggactcaaatctccttttctttttgtgtgacttgggatgttcgcggcctcgtacgggaacaacaattttctgcgccaaaagtactcggcctcgaagcggccgagtacgggggactt

SEQ ID NO: 9823 - DNA, 2249 bp, Heterodera glycines
tcgtgtatatttgcttggtagttagaccatattctaatgacataacaaaggaaaaaaatatttattatagaaaaaaacaattttttgttaaaaaaaaaatttgaagcaatatttttgcaaggatattatatagtaaaatattatctcactttcgaatataattgcgaaaatccattttccttggacaatatttagggtagaaaagcacttaaatatattgttgaacacaaataagaaatcaaataagaaaaaaagatcataggagaagacggacctttcttattttttagttggggctttaacctcaaaggaaaagtttttggcaaatcagtccccctcaccaatttccgactgcggcttggctttttcaaactaattctcattcattcatttaagtgcacgccataagcaaaatttcttatcatttacataaacaaaacaatagctttttacactaaactgaccaaacaaaaaagcaaaacaaacatttcattttacaaatcattattcaacaatgtgctatctctaaaacatgaaagacacagtagtgtgcatctcaaaccaatacattttttaaaaaacttgacaaatttcagttctgtgtctcatggatgagaggcacaatagtgtacatctcaaacaatatattttaaaaacttggacaaaatttcacacttctgtgggtttacaaaacttttagtgtacatcgcaaaacaattcactaacaaagaattcttttgacaaaagttcacactcttgggtttctaaaacttggtaggcacattagtgtggatctcaaaacaattctaataattacatataacaggtaatgtgattgactaacataagccacacaccacactaatgaattttctaaccaataataacaaataattcatttaataaattcaacatttttctgacaaatcaacaattttaaagcgcaattacaaaatggaaattatatccgtatttgataatgtgtgaggatcacaaatataattaaataacaataacgaacaaaatatcaaaaatcaaacataaaatacgtaatcgaaaaggtatgagtcacaaatcaaatctaagcaacggacaacaaacgaaatactacccatttttttgcgacttcttaattggctccaaagtttccgaactacgacgtttaattggtgtcgtcaaaatcgcctcaagattaacgcgcccagcaccaattttaacggatgaaatctcgcaatggagctgaaggcattcatctatgataataaaaaaaaacttgaaaactcaaattaaaaccaaaggtaatgccgacacaattacaattaccttcaactttcacaaaaaaattttgaagttcgatctgtgtgttctaacgcatgaaccaagacgttctaccaattcttcgccattgacgtacaaatcagccctcattcctttcttgtccgcaacgactgcagcgaaatgtttcccgactggcgaaaacgatgaagcgagagcacaattcattgctttaaaaaattaaaagtcaaaaacatttatttatctctcacacaaaagtcacagaacaaaccactaatgttttatcaaaaacatgacgcacattattgtgtcacacgaaagtcatacaacaaacactaatgttttatcaaaaacatgacgcacattattgtgtcacacgaaagtcatacaacaaacactaatgttttatcaaaagcatgacacgcattagtgtctcacacgaaagtcatacaacaaacactaatgttttatcaaaaacatgacgcacattattgtgtcacacgaaagtcatacaacaaacactaatgttttatcaaaaacatgacgcacattattgtgtcacacgaaagtcatacaacaaaccctaatgttttatcaaaaacatgacgcacattattgtgtcacacgaaagtcatacaacaaacactaatgttttatcaaaaacatgacgcacattattgtgtcacacgaaagtcatacaacaaacactaatgttttatcaaaaacatgacgcacattattgtgtcacacgaaagtcatacaacaaacactaattttttatcaaaaacatgacccacattattgtgtcacacgaaagtcatacaacaaacactaatgttttatcaaaaacatgacccacattattgtgtcacacgaaagtcatacaacaaacactaattttttatcaaaaagatgacccacattattgtgtcacacgaaagtcatacaacaaa

SEQ ID NO: 9824 - DNA, 3332 bp, Heterodera glycines
  unsure (1)..(3332): unsure at all n locations
tcacagaacaaacactaatgtttatcaaaaacatgacgcacattattgtgtcacacttaagtcacagaacaaacactaatgtttatcaaaaacattacgcacattattgtgtctcacagaacaaacactaatgtttatcaaaaacatgacgcacattattgtgtcacacttaagtcacagaacaaacactaatgtttatcaaaaacattacgcacattattgtgtctcacagaacaaacactaatgtttatcaaaaacatgacgcacattattgtgtcacacttaagtcacagaacaaacactaatgtttatcaaaaacatgacgcacattattgtgtcacacttaagtcacagaacaaacactaatgtttatcaaaaacattacgcacattattgtgtctcacgaaagtcatacactaatgttttatcaaaaacatgacgcacattattgtgtcacacgaaagtcatagaacaaacactaatgttttatcaaaaacatgacgcacattattgtgtcacacgaaagtcatacaacaaacactaatgttttatcaaaaacatgacgcacattattgtgtcacacgaaagtcatacaacaaacactaatgttttatcaaaaacatgacgcacattattgtgtcacacgaaagtcatacaacaaacactaattttttatcaaaaacatgacccacattattgtgtcacacgaaagtcatacaacaaacactaatgttttatcaaaaacatgacccacattattgtgtcacacgaaagtcatacaacaaacactaattttttatcaaaaacatgacccacattattgtgtcacacgaaagtcatacaacaaacactaattttttatcaaaaacatgacccacattattgtgtcacacgaaagtcacacaacaaacactaatgtttatcaaaagcacgaagagtatattattgctttataaacacttacaaaccaatctttccatcgaaacgctcttgaaagcgttgagctttcagcatgtaaaatttgacgacctgtatttagtaaggtaagcatctgtaaatagaaacagcaaacttacaattccaagggaacaaatttttgaaaatttggacgacacgctcttaaattctgcgagaacaacattctccccagaagcacacgccaacaaagccgtcaacttcttctcagacggtaaaatgcttacaatctgcccacaaaaagaccttaacaattttacttaaaacaaattactaattcaagcacttacgcaagctgagtgccacatggtgtggctttgagctcttccagagtcgtaagcatggcaacaggctggcaccagatttgaaaaaaccgaaccggtagaaaaaatgagccgtagcggcagaaaaacaacgataaattgtttagtcaccagatttttgaccaaactggtagaaaaaatgagccgtatcggcagaaaaacaattctctaattgtttaacaattctaaaataaaacacaaattaaagtagatatatgaaataatgtgtatacaacaaaaataaatactttttctaaccaatacataaccataaaattttacgacaaacagactttgaatttaaaaaaataagcaatattaaacctttaaattaaacaatgaaagacaaaaacaaaaaattaaaatgatgaatggaggtgaggacgattttggcgttatatttgaacatacacaaaaaagcgaataaatgactaagaatgttttttgcaaaacaaactgaaaaatcaaaatcaaacatttccatttttcaaatcattttttaacgcaaaaaaaacaaacattttcatttttcaaatgcttttttaacgcaaaacaaaaccaaacattttcatttttcaaactcatttttaacgcaaaaacaaaacataacgccacacaaattcaaacaatggcagaaacatacagacactcaactttattatataggattcggatccgggattcgaatttgttcaaagtcgatttttaacgaaacgtccctcagcgagcaaattttgtgctctttgcatccgtcatacttgttttacatgaaaaatttggctctagtgcactttataagtccaatcagagtatatgagtacaataaaatatttatagtcatatgaccatttatgagtccactcattttttttatgagtccaatgatttttaataagttttgagtccaatttttattttccaaactgtcagccaaaattgcaaatacacaaagtaaagtcacggggaaaaaatagatttaagaaaatttttcgcttcatttttaacatgcccataaatttttgtgaagaaacgaaagtgccaagttgtaactagtctattgagtagaaaagtcggacaaccctaaagaatgggggtccctaaattggctttttcaatttttgttcgaattcggtctggggttcggaattgggtaaatccgagttcagattcgtaccctcgaaaagcacttaaaacttgttttgagcccaaaattaaaaaagaagttaaattagggaccacaattctttaccattgccatcaattcgacttctgttataatttggtgctataagctttttttggccagtaccaaaagataaacaaaaatgaattttttttatgctcaactcaaaagttacagcattctaaaaaggtaaaacaaaattatccctagtcatattctattattttaccttttttaaggaattggtattccacgtctttgtctgcaatgtcctcaatttcgtgcagtatattgaccagtntaacatattgtttcgcctcccattgatttggaatgttgcattccatatttgcgacacggtttaaatactgtaacaagtttttcgaagttaaataagtactattgaattttttaagcttctaataatcttttaagtgcagcacagtggcatgcatttttcgttgacaaatgagaatccccatgaattcaatttgcgaaaacgagaagtcatgaatctatggaaaagccaaagaaattggagtgataaaactaatatattttttaataaatattaaagggagttgaatttaaggtagcgcgacatttgcgccgcggacatttgcgccgcgacacttgcgccgcccagccaaatcgacatttgcgccgcagacacttgcgccgcgacttttgcgccgcagacacttgcgccgcccagccaaatcgacatttgcgccgcaaaaaaaaattttttttaaattttcaacaatttataagcgctaatatttgataaaaccctaataaaagttagcaaaaaggtaatcacaaagataaacgtccaattttttgtcttt

SEQ ID NO: 9825 - DNA, 988 bp, Heterodera glycines
aatgtattagcatttggttttcaatataaaaagaaaacataaatgacatttgttataacttaataaagcttgacaaaaggtctatctccatttcttgcacactaaataaaatttaatctttatccacccagatgccctcgaatgcatgaaaataaggaatattataagctgtcaccggataaaaaatgattcaaaatgttgcaagaaaagaattttcaactccccaaatttactgttcaatttcgaaataatgaactgtgtacttctactaagctgtgtttatttgaaaaaggttggcctttcaaaaggctctctgaataaaggctcacagaattcagctacaattattttgccgatattagaattttgtacggttaaaatatagattaaaataatgtattagcatttggttttcaaatataaaaagaaaacataaatgacatttgttataacttaataaagcttgacaaaaggtctatctccatttcttgcacactaaataaaatttaatctttatccacccagatgccctcgaatgcatgaaaataaggaatattataagctgtcaccggataaaaaatgattcaaaatgtagccagaatatagctttcaactccccaaatttactgctcaattacgaaataatgaactgtgtacttctactaagatgtgtttatttgaaaaaggttggcctttcaaaaggctctctgaataaaggctcacagaattcagctccaattattttgccgatattagaattttgtacggttaaaataaagattaaaataatgtattagcatttggttttcaaatataaaaagaaaacataaatgacatttgttataacttaataaagcttgacaaaaggtctatctccatttcttgcacactaaataaaatttaatctttatccacccagatgcccctcgaatgcatgaaaataaggaatattataagctgtccccgggataaaaaatgattcaaaatg

SEQ ID NO: 9826 - DNA, 1351 bp, Heterodera glycines
cataaatggacatttgttataacttaataaagcttgacaaatggtctatctccatttcttgcacactaaataaaatttaatctttatccacacagatgccctcgaatgcatgaaaataaggaatattataagctgtcaccggataaaaaatgattcaaaatgttgcaagaaaagaattttcaactccccaaatttactgttcaatttcgaaataatgaactgtgtacttttactaagatgtgtttatttgaaaaaggttggcctatcaaaaggctctctgaataaaggctcacagaattcagctccaattattttgccgatattagaattttgtacggttaaaataaagattaaaataatgtattagcatttggttttcaaatataaaaagaaaacataaatgacatttgttataacttaataaagcttgacaaaaggtctatctccatttcttgcacactaaataaaatttaatctttatccacccagatgccctcgaatgcatgaaaataaggaatattataagctgtcaccggataaaaaatgattcaaaatgttgcaagaaaagaattttcaactccccaaatttactgttcaatttcgaaataatgaactgtgtacttctactaagatgtgttggcgctagtgtaaaagttggcctttttgaaaattttttaaaaaagtcatgaaaatacatttccgggggttttcggggccgctgatcacgaatatgacattcatttcgaccaatttcgaaccccggacccggattcgaacaaaaagtcgaaaatcgtaaattttcactttttataaatgataattttttaaatccttttagcaaatggttaaaatttcaagatattccattattgattccaacaatctgccgctcctcggctttccaacattggacgatataaatttgagatggcttttttcccaaaattctgaagagattctacaatttttggctcacaacggacttatccaaaacaaaatgatgtgcctaatttgttcaaacaatatggctctgacaaaacgtagccaaataaaggatggatttgaagtaattataaaataattatcttttattaatccttttttaagtggcgctgtcaacaatgtcatcttagaaaatctgtgcgcgaaaaaagtttttttcacaatagtgctttgagtctcacgcaaatgttcaccatcatctacatgtggattgaagactatcgaaacaaaaacggtgtcaaaaaattgggtgtgacaaacatacccttggcaatttttttcacttttgtcgtcaacaatggtcaaaacaggcaaaaattggaggaaaaaaccaagtggtcgaaattga

SEQ ID NO: 9827 - DNA, 1591 bp, Heterodera glycines
ttggcgctatactaaaagtgggcctttttgaaaatttttaaaaaaagtcatgaaaatacatttccgggggttttcggggccgctgatcacgaatatgacattcatttcgaccaatttcgaacccaggacccggattcgaacaaaaagtcgaaaatcgtaaattttcactttttataaatgataattattttaattcctttttagcaaatggttaaaatttcaagatattccattattgattccaacaatctgccgctcctcggctttccaacattggacgatataaatttgagatggcttttttcccaaaattctgaagagattctacaatttttggctcacaacggacttatccaaaacaaaatgatgtgcctaaattgttcaaacaatatggctctgacaaaacgtagccgaaaaaaggatggatttgaagtaattataaaaaaattatcttttgttaatccttttttaagtggcgctgtcaacaatgtcaaagtttttttcacaatagtgctttgagtctcacgcaaatgttcaccatcatctacatgtggattgaagactatcgaaacaaaaacgctgtcaaagaattggacatggcaacatatactattgtcaattttttcaacttttgtcgtcaacaatgttcaaaacaggcaaaaattggaggaaaaaacaaagtggtcgaaattgacgagacatgttggacgaaaatgaagcatcatcgaggaaaaaccaaaaaggggagccaaatttggatgtttggcgccattgaacgtggtgaaggtgcaaaaaaacttccataaacttttaattttttaatttaaaggtggtcaagcattttgtgtgcaagtgaaaaaccgcaaaagaaggactcttttccgtcaaataaggaaatggattcgtccaggcacggtgatcatcagtgacgaatggccagcatatctgaaaatgtctctacatttgccgcaatatgaacatctactaattcgtcacaaaaaaacaactggtggtggtttctcaaaaatcatcacgcttccaaacgggactgaattcaatgttaatacgaacaaatgcgaaggaatgtgggcccaattgaagcagaagacgaaaagaattcatggcaccagcataaaattgacagaatcatatatgcatgaacaaattttccgattgaatgctagggctaaaggattgtctgtatttaaagcttttgttgatttgttgcattttaattataattttaatgattaatcttgttaaatctaataaaatacacattaaaattgcatgaatgtgtaaattttggtgaaaatttacgattttcgactttttgttcgaatccgggtccggggttcgaaattggtcgaaatgaatgtcatattcgtgatcagcggccccgaaaacccccggaaatgtattttcatgacttttttaaaaaattttcaaaaaggcccacttttagaatagcgccaaaaatttttataaatttcaactgtgacaacagcaattgtttagaatgaaccgagcacagcgaaaatttaagcagaagcaatctgtgggacaacagcagaacatagtcaatgatgga

SEQ ID NO: 9828 - DNA, 3246 bp, Heterodera glycines
  unsure (1)..(3246): unsure at all n locations
gaagagtcgtgcaaaaacattcaattnggntccccttctcttcacggaactgttggtccgttacaacaaaggtagaagcgatgctggtgccctttatgaattgccgcccgacgcaaaagcatcaccctttggacacggcacttcgaatgcacaaccgaaacgaacattcggcacttcatttgatgacgacttcaaacccaacctttcaactgcagttgatgtgaatgtccaacaaaaacctgtagacaaaacatcagcaggtaaataaatttgaaaactttgatttgcccactatggcgctaatcacaaaactcattaccactgccagcagtcttctaaatccctgattatttgtctaccattttcatgcaaaaaccgtttactaatggactaaagaggctaatttttctcttctaattttgaaaagggaataaagagcaaaaatgctcgcttttgtctcttttaatttatcaaattatggcgtatcctttctgtttagttggtgacatcgaagtgaaaaataatgaaattgttcaaaatggcaaccaattgagcaaagagagcgtttcaactgtaccatatgaacagcagcatggtcaggtgatcggacaagtgaagacggtcaaatacaaagcgctcttcgaattcaacgctcgctccggcgacgaattgagcatacaaccgggcgacttgatcctcgtattcgagggacaccaatccgagccgggttggcttggtttgtgttatgcttttttcgccgtcgtcttttcaagtgccgtttaagctggccaaattcgcgacaaagtcggctggttccctgcctcttttgcggagcccctttccgccgctgctgctggcccattactgaagaggggcggcagtttggccggctctccttccggcgaacctttggccatcattcgcgaggagtgtgagccgccgccgaccgggcaaattcaccccacggaacaaaggcgtggaaatgctttcgacaccgacttcactgctggtaagaatatagagcactaacaattagtgagataattccccatttagcatttacgaaaagtgtttcattcaccgattctgccacaattggaaaagcggcggcggcactgaccaaaggcaattcaatgagtgccagtccatcagtttctgctgctctgtacgatctcccgcctgcggacacagaaactgtggtgaaattgacaaatactactattccatcaccgaccgccactatcgaaccggtaatattcttttcttatctttgaaaaatttccaaattgcgtttcagtcatccgtgccattgtacgaattgccacccgacaatggtaaaatgccaccatcgaaagcgtcagttgctgacagtatggtgttgtctgtgggtgtagcgttatatcagtggaaagcgcgcaatgaacaggaaatgacatttggacgaggcgatgtaatcgaagtgttggagcagagcgaaatgaggtggagaggacgacttcagaaaaacaggtgggagaattcaaattacacccagtgattcggaaattgttgtgccatttgcttgtcttctaattttagacaaatcaccggatggttccctaaaagttatattaaaatttctgctccttcggagcagcaaaaggatgaaagcgcaacaacggacctttatcagacgggtcaaagtgcagcaaaaaatggaggcaaagcacgcgtgggtgaaagtggagaatggtttattgtgagttatacggacaataaatgcactgaaagctttagaattacctgaaacctaatgagacatgagttgacgacaaattattattctttttttttttgcaaaaggctctttaccaatttgatgctgtcgagtcaaccgatctctcattgaaacccggcgatcgaatttgggtgaccgaccaacgtgatcaatggtggcgagggacttgcgacgggaaaagtgggatttttccggcaaattatgtacaaaaggcaggcgaaattgcatcatcaatgcagagtaagctatctttattgttatcagcatagttaatccaaaaagacatttatatcttaaatagaagactcgaagatcgacgggcaaacaattggacgggcaattgcgaatttcactgcgacagcatccaatcaaatttcacttgttattggcgatactgtcaaaatctaccagacaacgccaggttcacaaagagagtggaatttaatttgggttttaaaggggatgttttaggcggttggtgggaaggcgaagttgataaagcaggcgtcaaacaaattgggtggttccccggcaattatgttcaggtgtgggaaacagcgcaatccaatactttcgctgtaatcacccggaattccaaatttagctgttgaatgcatccgatgagacggtaattgctgtggcagcattcgattatacggcgcaacatgaggacgagttgaccttcaaattgggcgacatcatcgaagtggtggaccattcggactcactttggtggaagggcaggaagaagggacagccagaacagagcccattactctttcctgcaaatttcgttcaattaaacaaataaccttctggatccattaaaatcttttcacatcagccaactttgaccaaattctttctttctaattcataatggattttttcaattgacccgatattcataacgcaactaataacttaaaatcaatttgtagaaattttgttaattaactcattattggtttactgtgttttttgtgacatattttcccgcaatatacattgtaattattataaattaaagctatagaagatttacttgtagtcaattccattgtttcaagggtgtgatgggtgctgctaccgcgtgacaaatcacatttaggcaatcttttccccgaatttttcacaattgtcacattttttccattttagttttgtaggcgatggtcggcgctagttacacaaagcaacctatattttgaaaattttttcaactttttggtcaaattttttttttgttttttttacacataatgatgaatattaagtattaacagcacaattatggtgaataaaatgtatattcacgatttttatcctaaaaaaaatttacaaaacaaaagggtcccccctatggattttgattaaattcaaaatctatcactttataactatcgccaaatttgtttattaggcccaaataattgtcatattcgtgatcagcgacctttaaaacaccc

SEQ ID NO: 9829 - DNA, 1127 bp, Heterodera glycines
ttggatgggtctgttacagggatgggatccgtccttgaatggcaaggacgtccttgaaattgggccctctttcttgaaaataaaaaatgtccttggatgcaaggacgtccttgaaaatgagcatttggaaaagctttatttctcactattcatcaaattttattctctagaatttaattttaagtattttcatatgaaacgtcgaaaattttaaaggacgaataatcttgaggttagatgaaattctggttatctatttgttctgctaatcttacatttacatctagatttatcaaaaataaatacaaaaaatgagcgaccatgaaggggacttagcggcagtagccgaggctcgtgcagcggcaagagctcgtgaagctgctgccaatgcaaatgttttggtgagtttttaatgtgataaaaatcctaaaattttcggggccgttgatcacaatcctgtatccattttggcaaatacacatagccgatccgatttacgcacaaaaaattgcaagttctagttttaacattttcatctaaaaattgcttaaatacccgaaaacgaactgaaagccaccaattctgcaacaaaatttaatgaaaattttcggtttttgagagggtgcgaaaataaatattgtcgtggatttattgtttgcagttgggtgcagagcagggcgttggaggtgaacagcagcgagagcgtggggcgggcaacaacgacaaccagcaaagtaaagttttttgacaataaattttttaaataatttcccattggatccgattggcatttttaaaacttgaattttgaaaccagtttgttgctattcataaagagacatttttaagttcgttagagcttgggccaggctttgccaataggcatcactcagaaattttaatgaatgggataagaaaatagtgaaaaatttccgaaatacagattagtgaccccccccctttaattttatatagttcgagagaaattgtgaaaaactattgaactttggtgctctagtacaattttggatatcaatgagcatcatcagtttcttatttcagttgctgcacttcatgctcggatggacattcttgaacatcagcaaattcaaaacggtaatggtttt

SEQ ID NO: 9830 - DNA, 4374 bp, Heterodera glycines
cattactcatttatcaccatcccaaattccctcccgcttttcttcctcgtcggcccatcaactgtcattttatcccctccccccatcctttcaccgttttcccctcaaatcgtcgccagacgaagtgcaaacattcgaacattccgtcgccctcaaactctgagccgagctccattcattgtcagccttatccaaaatacgattgtcagctttgttatttgctgttttttggtcgtcaaactctgattttcttttcttgtttcctagcgcgtattgattttctgattttgatcgcttaaaacatgccaaaagcccactgattccctcacaaaggaacaaaggatgggtgtccaagcaagtgactgtgggaattccgggcaaatcttccagggtaattaggccacccattagcatttgttattacatttctgtcattttttcaaagtgaatctcctggccgagatatgaagttttcctttttagcataaataataaaatatgatatttattagttaattattttgttaaaaatacatttgatgagaaaaggcaaaataaaacaattttatggcagagaattgaacaagaagaaagaaaaaaaagtggtgtgaggggaatttctgatcaaaattagctgaaatatctccgagatatcattttttcttccgttctagcacagaaaagatttttgaaattaatttgtgtaaaagatggcaatcatttggggtgcccagctgatcaattgatcagtccatttgcgagtaattcgcctgcgaatgtttcccttccattctgctgctgttgtccatcactaattgattgtccttcaaccaaccagtgatcacttcctcttgcgatggtccgttctttgttcgacatttgtctggcctccgtttgccagcgcagtttggtgttcgatgccgacctttctcttctcccctgcgactgtaaacaacgtttgatggagtttttcgcatcccatgaccaagtgattgtgccattttttctttgattagccaaaatccgcttcagttaaactccgaactgtgctttgggcttatgtcacggccaatgtttggtcggaatttggtaattaatattttaattgaaaaatatttatgtcaaaatgcttcagactcgcctctgcttttacctcagcgaccaattgaatgattcgattttggaagctttggccaggcatttcttaatcacgaacttttcagttaaatcgctcttttcagttttaaccaaaaccttcgcattatttcgatcgtcgaatgcccccgggtcactgatacggtatttaatgatacggtgccaaatgcatttgccaatatcatttgtaaatatagatagcatcagttttcattactctttttaaagattgtccgtcaatttaaaatttgtattaagcaaaataatgtattaatttttaatcataaattattttttaattaattcttttatgattttttcaattcattccagggaattgtcagcgtcactctccgccagaataaactcgtctgcctcgagttagtcggaattccgctgctcacttccaatgcgctcaaggctgtgaattcgaaccgtctgagaagcgtcgatttgagtggatgccgaaaggtgattaattaagccaggcaaaacgcctaaaacacggacacgaacccccccccccctccccaaaaaccaggcaaatgcccgatttctttgataaaattgaaaacatttataaaaaaattttaaaaaatgatcacattttatattccattgacttatctcagatcgcttcagaaggcattttctacttggtgtttaataatccgtcaattgttagcctttgtttgaatggctgcaggggattggacgaggtgtttcttctttgttttcagcaaccattcgttaattaggccaattattcagcaagcactttacgacatcgcgcgatgcatcggcgaacgtttgttccgtttggagttggaccaattgcacaattcgaacatggccgagcacaccgaggccatcagcagtctctcgcgccactgtcctaacatttcccgactttcactttgccaatttttcccggttggcgccttttgttcccattttttgattccccccccccccctttcccttaagtcctttgaggaagatgaacagcaagaggagcagccgccatgtctcatcgaaggcaccggcctccgtgacgtggatttatacggtgggaatggcacaaaatgccacccaaaccaaacgaatggcatttcacttaaggcaacttcttctgccaacttccccgccttcccctcaccatttattcaattcgtttgtcggtgacgggccaagagaacgttcagactcttctcgactccctccgggagcagccgcatttagccaacattcacttgcagttgcattgtctcgaggaggacgcagtaaacaaattttgacgagaaatttgacaaattaatcataataaccaaaggaattgttttagaattccgttgaacgtgccaattccttcctttgccaatttcttccgttaatgggcaccaaaatcactcggcttcatgtgtgttttgcaatttatttagtgaattaaactgatcaatgacaaattacagtatcctgcctgtttttcaggttactgtccaacgcctcgtcgactcggcctttttggttcattgatttgatgtgatttgttcgttaattgtttctcgttcagctgatctctcaaattccttccctcagccatttggctttggatgtcgcctttttaaatgcccattttctccgccgtctcttcgccggcggcgttcattctccgggtgctggtctccgttccctcagactttgccgacttcgcatcacttaccgggcactgttttcgattggccgatgggtaagtggcgcggcagccaaagtgccctcatccttttaccttgataaataatgcggcattgtcaaacaaattcccatttgttttgaaggcccgttcgcttgtcgacttggaaacttcgcatatgccagcggtggacgaccgttttttggttttgttgggaaagaattgcaaatatttgcaaaatgtgagctccgtcattccaggaacattgctgttgtgtaccggcaattttaggttaatttcaacggatgcaaatgggtgacagacaaaggagtggcgagtttggccaggtaattgggaaacaattaaggcaatcccgagactaattgtaaatgacaacatattcaggaattgcaagcttcgagaagtgcggataaggtaaattaattaattagtggggctggcaataacaaatgtttctttctgcagaggcacttcctgcaccgataagtccgtctacgcatttgcacagtgcgtttttctgggatttaatgagtcttaaattagttaattagtccatcattactttaaggttctgtccaactctcgaatggatagcacatgccgatttcagtggaaggccaaatttcagtgacaaagcattgaaatgccttcgcgactcgtgcattcagagagtcatttgctgattgacattcattcattggcaaatgtccaaattttcaacccaatttgatggaattccttcttcacatactgtaaatatgttacttttgcataatgcgatggatagcaaattcattttgtaatggcattgacataatttttatttcccctgaggcgccttttgtcccccccccccgaatgtttttcgcctttttaatggcttttccacttcactgccgtgcatcccttcctcatacatttggccaagtgcatgcgctcgttcctcctttctaatggaaaatcgatcgctgctcattcaaccgcgcgttctccaattatacaacgggtggtgttaaattccaagaaagccctctccaaacggcatttttggcactggaatttcgaaaattcattagtgcctgtgtcgtgcgaaaaggcagacgcgccgccagcaacacgaaaattgccagggaacgaagcggcgcacccaaacgccgggggggggcaaagagacattgcagtgagaggcacagagagaagagacaaatgggaagggaaaagcgggaaattcgcttttgcatgagaacaaaaaaaggtggggggggggggaaatggcacaaaaaatgcatggaattggttaggaaaaaagcggctaaacagagaaaaaagaaacattgaaaaggaagacaaaggacaaacgataccaccagaaaagaacagcatttcatgttgtaacagaagcaacagcagcagtgtcggctgttggagacgagtgagtgtcgctgctcttcggcgctaatggcgaaagacccccctttttcacttcactccccctccctctctca

SEQ ID NO: 9831 - DNA, 2400 bp, Heterodera glycines
atggaaagagacggacgagaacgaatgggataaaaagaacggatttaataaatttatccgatcagaaaaagagaacgcgaaaggagtgatcaaaggatgaccatgtcgaggataaaggatgaggatgaaggattaccatgttttgtgagaaatgcccacggagacagcgcaaaaattagcgaaaggatatttttttaaaaatgaaagcgaaagcaaacgaaagaaaggcattaattcggagtataaaagccaattagcatcaatataagtcacattcgtgcgatttcttctgctctcttccaaatgttcgccttcgtttgccgcttcgttctgccgcttttccttttcgcccttttggcacttcccccggccaatggcattggacttcccatgcagaaaatggagtgctgccaacaacagcaaatgtgttgtgccgcaccaatgcaatgcacgccatcgtgcggagggtgcggacggcgccggcggagagaggcgagcgattgagaagagagatgttttaacagttcgaatttttaggccgccgttcagccgctgctcagagggaaagaaacgccgtgcccacagacggagtggcaacagctgatggaaaatgtgggaaaaagtgctaaactcagcagttgctaacccgggacaatgttaaggcaattgtgccactcgacgacgtccaatcggtgaactccgtccaaaaggcgctcctccgacgctttccggacaacaaatttttggtgatgtgcgcaatggcgggggagggacgcgcggaaggcaaagagccgctgccaaatgaggtgagccgagaaatttggaggatttaaacaaacaattcattgccttttcgtctaaaatccgtcgcttatttctaccgtatgctcaggtccacctcagctccagtggccacgggtactgtaacgtggtcagcgaacgcatttggtgccaagcggccgcagtcgtcggctgatggcacttatttattacttgtttattgatgttcagccctttttttgctttcatatttattgttattaataaaatagataaatatgatttgtatgggtttttaatatttctcactgtgagaagaacactaagcaaaacaattgttaaattattattacgagacagtttctcgactcgaccaaccgaaacccaactttaatttttaaaatttttgttaaaggaagtcaaacttaattaaatataaacaactttgataatttattgttttaattttgttctgaaataatgatttttacataaaaacaagattgaaaaaattaatcgaaaacgaaaaaacttacttatacttacacgaaaatttaatttataacaaaaatatcaaattttaagtgcccaaaaaataataaattatttgaacactttttaattaaggttttatattttaaaatgggaaaaaataattttatttatttatcactcaataatgagctttcaatctataaaatgctttttaaatgaaaatattcgattaagtttaaaattttttatgaatttttatcctacatacgattgggcatgtctccgcggttagccgacttttgcgccgcgacatttacaccttatttatgtgctttataaaataagaattgatagatattcattattaattcctttttcgaagcctttcatgtcaattccatattgaagtgcacgtaatgattgatcaaatcttgatcattttggttttcattgggaccatatgcgataacaagccttcgtattgcctgatcattaagcggcggattttaagcgaaaaaaataggtaaataaataagggcataaaaattgcgaaataatgcgaaaaatttgaaaatcagtgcgttttttcaatgaaattaaattaaaatcgatgaaaataacttattgagaaaattaattacaaaggaattgaatttcattcttttttcgaagcaaaaaaataattggggtttctacagaaaattctttttttcagttttttgttagtttgtattcttaatcattttttcatatctttgatgaacctattcaatgttaagattttaatggttaaaaaattgaatgtcaatctttgtgactagtaattttttcgaattttcaattagttatttttgtcgatggcttatagttttagtaaaacttattgataatagtggaatttttatgaatataatatttttgacagcgcggcgcaaaagtccatttttgctgggcggcgcaaatgtcgcggcgcaagtgtcgactttgctgagcggcgcaaatggcgcggcgcaaatggcgcggcgcaaaagtccatttttgctgggcggcgcaaatgtcgcggcgcaagtgtcgactttgctgagcggcgcaagtgtccacttttgctgtgcggcgcaaatggcg

SEQ ID NO: 9832 - DNA, 2407 bp, Heterodera glycines
tcatatcatacgccgcatatgatttttaggggtgatttaattgaaacagaaattttgcgtatgatatgacactgtgtcatagagtcatatcgcagatatgacccgaattgaaataggccccaggggtggagcgcgtacagaaaaatcccacggtcgcgcatcgcagattcaatttgccgcggtcgcggatcgcggtcgcgcatttaaaaactcaaaattttccaatttttaaaaattttattttaagttttcttatataaaaaattaataaattcctgtgcataaaaaatttgcctgggtcagtgtccaaatttgtgaagggattctagtcatgcaaagatttagagccggggtaaatgaccatgctgcggtccccaactcgcaaatttgttcaaggacacatttggatgcaaatcatattggtttttggtgccctgcatatccaatggtatataacaacacatatgcattttccgagttcagttcgggtgcttccttgtgagtcaagaattaataacacattttcttttaagaactgaaaatatgtctcttaatcaattgtgtaaaaagggttcccaaactttttgaagtccatttctcctgggaaattggcaattttaccgaacatcagctgaaagcgtgagtacccagtgacttcagacggagaatatgtgttaccagattggaggcggaatttgcgtttgtatgtggaccacataccctcgatgttttgggtgtgaacattttggtggttgggattatggaaattttcattatggtttacagtataatagtataatgttggtacccctggggcagattgggaatccccccgcaagccgcccacatgtcgctatcaattatactcccaggagcatgccgcgctcaatttctccgaacagccactcattcatattacctaccccttaaaccgcagtcatgataacggcctaattctatactccaaccctggcccccaatttggatcgggggtcggacatacgtcgcggagaaagatttcggaatcgttctagggccattttttggggcaaggaattggttcgaaggaatgatccattgctgacagccgatgaagcaccgacaaccccgcaccctaccccggggggaaacaaaagacgacacggcagcagcgactggtaaatacaaaaggcagttaaaaatgcagagcatggacacaagtcagcagattttgaacggagagacaaacgacggccaatgaattgccattccatccatttgaatcaattttggacaataaatgtgaaatttgttgaaaatgaaaatttttactttttgttcgaattcgggtccggggttcaaaattagtcgaaatggatgtcggattcgtgatcagcgaccccaaaaaccataggaggcgtttttatggttttttttaaatttttttttttcgaaaaatgggggggcagggatggcattccgaggccccaacaattttcggaaatcggaattccgggggtcaaaaaaatttcggaaatcggaattccgaccccaaaaaggtcggaagtcggaaatcggagatttttcaaaaaatataaaatataataaaaatttataaatattttaatcgactaattttttaaattcttaactattaaaaggttcacattgtttttttgcggcgcgcttttttcaaaggattttggtgaacaggggggggggggacaggcgtccggcggtgccgataggcgcctccgaaaaattttttgaaatttcagtgcaatttattaaagaaattgtacaaaaattactaattttttgaaaaaaattcaaaaaaaatttccgaaagtttccgactttttatcaaaaatttcggaaattggaagtcggagttccgacgaccaaaactttttcggaaatcggaatcccgacctcaaaaatatcggaagtcggaaatcggaattccgtgggcgacaaactgcactattaccgaaaattttcgagactcgagaaactgagactgagaattggtcccagaaccaatcttttttttttgttggagacggatagccaaacataaatcaaattctttacaaatgataattatggaaggtaatgcctgagtaaatttatgcaatgtattctttcttttaaagtcaaaaatgaacaataaatgacaagtaaatcatttgctcatcaacggtttcatttcgcactgatcgacggacaaaaatcactcaaaaagtgatcaattgtcagacggcggtcggttggcggggcggttaaatggcaatggcattcgtccaaaaaagggcaaaaaggcaaaggacggcggcggcggtgccgaaccattggacgaagaggggccaaaaggcactttaaatggcgacgttcgtccaaaaggaggcctaaagccgaagggcggcgg

SEQ ID NO: 9833 - DNA, 1186 bp, Heterodera glycines
gcaaaacaattgttaaattattattacgagacagtttctcgactcgaccaaccgaaacccaactttaatttttaaaatttttgttaaaggaagtcaaacttaattaaatataaacaactttgataatttattgttttaattttgttctgaaataatgatttttacataaaaacaagattgaaaaaattaatcgaaaacgaaaaaacttacttatacttacacgaaaatttaatttataacaaaaatatcaaattttaagtgcccaaaaaataataaattatttgaacactttttaattaaggttttatattttaaaatgggaaaaataattttatttatttatcactcaataatgagctttcaatctataaaatgctttttaaatgaaaatattcgattaagtttaaaattttttatgaatttttatcctacatacgattgggcatgtctccgcttcggagcggatacacccgcatatgatatgcacaagggaaggggtgtcatatatgacggcgtcatacgtagaaaagggagttaattgaaacgcgcatatgattaatccgtaatatttttgggtccaccgcacgacgatcaaacacaatcaaacgaccaaataggcttacaactttaataaaattacaccaaacaaaattaagtaaagtcggaagacgagatgagaaacaatcaattacgattaaaaccaaattttccggaggagaccaaaaaaaggacaaaattgaggagaataatacacgaatgaaaaaatgagaatgaataaaagaaggtcaaatatcaaaagtcaaaacgccaaaacaaataaaaataggcacaaatttaaataattaaaacatccccaaacgctaaaaagaggcgtccctgccgtggcaattagaaacccgcgcattcgactgtcaaaaggggtgttcgtttgggtgtagagctcactgccgacgaaagccgcgcacgaaacgacgtccacccgcaccagagaaggaagagttggagctgtggccgcggtaaggatgcatgcgcatgtaaggaccggacacaaggcggtcgtctcgacccaaccctgatcgattagacaaggcacgtgatggaggtcggtcgcctggacccaaacccccacgttggttttggcggacgacatgaacagcagaacgaagcgaacgaattccaagctctt
